United States Patent Application Publication US 2014/0057251 A1 - sequence listing, part 140

SEQ ID NO: 263999 - DNA, 731 bp, Cannabis indica
tatggatttgacatgatacgaaaattattcgaatcatgttcgtgttttataaatgggaaatttgaattagtatgcttaaattacctaataatttttcccctaattgcaaagttagtaaaattggtcatatatgaccacttttcctattttcctaaactacccctctcatttgaaaccctctctcttcgtctctctcagccgaacaaacccaacacctaaaacaacccatttcagccaccacggttagcacacagcccaactcgcaacccactccgacgaactcgcaacccactccaacgaactcgcaaccccaacccactccgaaaatgtcaaaggtatgtgttttttttttagaaaggatttaaagatttattttgtttgagattgtttgtgaaatattattggttagatttaagaattttattgtgaaaatgggattcggatccgtgaaaatcggatttcgactgtgaaaatggtgaaaagggccttcggatctagggaagaaggccggcccgatggggtgcaggtcggtccgatggtccgattatgggtccgagtatgggtccgatggtccctttgggtcgggtccgatggtacgatttaaggggtccgatgggtgggggtgaggagtgatctgtataggcagcaggagctatgtccgatgggtccgatgggtaccctatcgggccaatcggacccatcggacccgagataattttttttttttaaaa

SEQ ID NO: 264000 - DNA, 775 bp, Cannabis indica
ttgtatcactttcaaataacatagaaaaaaactaacataaatttagtatacgtgcctcgtacgtagttttttgctagtatatatatatatatatattatagtgacaaaatgtataagttcaatattaataatatttgatacatagtttacttaatgtttcattcaaataggtggactgattgtcagattgaatcaagtccaccactttcattatgtaatatctacattctttgttactttgttgtggacactaataatgaaaaaattgaagtaactatacttgataacttgataaaatttgaatattcaaaatataaactaaaatttgcaaaatcataccaatggattttggtaatttatttcagttgggattgattgtttgttagccctaaagtacttggcataagcagcaaggattgtttctccaatttctggacgattgaacattagtgcattaaccgaatccaaaaaacgaatgtgatgagcttataagttaaattagtacatgaaactaggaagtaactgtaagctagataagataataatgaataaaggtaagataatatatgactgtatgtggaaaacaaatataatcaaacaaactcaccataataatgttcaataattatatgtgcactttaaagctcatcgactattttaatttgtatatgtgctaattaggtatatgtgctaattaggtatatgtgcactgtctaattcttgttttcatgctctaaaaaagtattaagggaaaaaaaatcttgtagatgcgtac

SEQ ID NO: 264001 - DNA, 576 bp, Cannabis indica
atgtgataaaatataaattaatactgtattattacatttttaatataataaaaaattatttttttaatgttttttcaggttacgagttagtacccgaccaacaaaaaacaaatttttaaaacccaaactcgaaacccgtgcagggtattttcaagttgaacctgacccgaccacacgggtttttaagttttcaattttttttgcaacgggtcgaagcgggtggtcgggtttttcgggtttgcgggtctaaatgttcaaccctaagatgtatgacatgtcagttagaacaatagttggtatatctacgattgcatcttaatatcattttgtgctcaataaatttgagagggaaggttctaaagggaaagacttttttatccctatcatttcgaagttggttgattctctgggtcttattaatttgccaattcaaggggataaattaacttgggataataatcggccggatctggcccatgtaaaatctgcccttgataggggccttgttaatgagagatggaacttactcttccccaaagcagtcctttgatcttttcttactagtaactcggatca

SEQ ID NO: 264002 - DNA, 1555 bp, Cannabis indica
ttagaaagaagtaaagaaaataagaaaaacaaagccaaaatcaagagaacctccctcttttcctccttctctctttcgaaccagccattaaccaaggaattggttgctgattcttggtgtttttagtcaaagaatttcaagggaaatcaaaccaaggtaagccttagcatctctatctcttagttcttgaattttaagttttgttgagtagtgattttgcaaattagtggccgttagggttaggttgtttgatagttcgaattctacggttcatttgagtttgaatatagcttcttgtagctggttttggtgtatgagattggatttatgcaaatctatgctcttttagttgaatatagcttcttgtagttgcaaatctatgctcttttagtttaggtctttaatggcatattgtgattcagtgagattttttgtgaattactggttggaaaatgtagtttatgcattgtttaggtgctctggaaagtatggatgcatttggatgagttttaagcaagttggatcttgtttggggaaacctggtgcaaaccggctagcggtttgccaggcctgtaaaatcggcaagccgattttggcaggatccccgaacaagccatttcctcaattctcgtccattccagtgtcgtagttgggtgtttccctatttcctgagctagtgtgatccctggagagtataagagaaccttggattgtgggttcgggtttcccggattagggtttcgatcatgtgatttacccgtttcattatgtaatcagggcatccatttagcgcaagacttcccgttcaggtcggccagcacacttgaatctggaaagaaggtaagaactggatataatgtgtaatatgaatatgcgaatgtatgtatatgcttagtatatatgcatgcttatatgttggattcatacactaccaacacttgtacagttacggtacagagtgcattgggaaagtgtatgatgtctgaaagtacatcgtggtgttaccagcaattgtacgggaaggtacaaggtatttgtggtacaacacttaatagtactcaaggtgcgatccatgttgggctttgtgccctaaataaaactctatttcaatgtaatctctgttattaaaatatcaataaagagaaaaaagtattttcatcacttatttaatgtgtcatttggttcatgttatcatttatatgtttattttatttacaaattcatccattcccttatcgcattaatattcttgtttattgtgtcgtcaacacagttgaaagtaatcaaaattatgtgattaaatatatattactagatttatcagtacactgggtttaactgatatgataatctacaacatagtttacttgcaccttggataagtgttatgtcctttccaggacatcgtttaaagtaaagcttgggttggatgcatggggtatgcatcggaggggaccaatattgaactttgaataaatatgataaatttaccgtaatatctacacaattaaatatcacctagttgatcctagattaaatgatcttaatcctgaca

SEQ ID NO: 264003 - DNA, 533 bp, Cannabis indica
ctgtaaattttgaatttgacttttcactattgattttcaaataaccccacacactaattaaaattagtttttaaatcattttaaattatatgattatttattgaatctttctcaattaaattatagaacacctaacataaaactaaatatacgtgccttgcacgtaactttcttctagtatatatatatatatatatgttatgacggccctgactttagtgggccatagaaaaaaaattatttaggccttattagaaaaaaatatagtatttttaaatcagtaataaaacggtataatttaaagataaatattttttgggtcctgagatagatggaccctaggcacaagcctagccggcctatgccgagggccgagctatcccgtgtttgatttcatggtaactcgttttgattgtgtaaaaaaacatggtggaaatacagtcatatgatgaaacacctgcttacctcagtactatagtcccatgtgttcttcttacatcagctatggacacaagaaagacacacaccaaaca

SEQ ID NO: 264004 - DNA, 754 bp, Cannabis indica
acatattactattagcagttagaaaaatagcacaaacaggagaacatttgattttgaaaatgttaatgaaaaaaactcaacttgaaaagatgtttcttaagtagggtaagagcagtaataactcttgattctcgcccagtgtgatagcgatgaagctgtagttgggaactgaccaaatctacataaacacaaacacataaacaatgattcccaaagtaatttcccccttcaataattgttataccactaaacactaatctttagaagacaaagaaactctattattatcaaacctagagttatgaaacaaggaacaaagcatgaaatttaccacttgtttgtcttaccaccaagtggatccccaaagttacaatactggggaataggttatgaacttaacattttctaatgtgagaaaactattacacataacacatgtaacgtattaaatcacaaattgccttgtaagatgttcttcatacagtcacatatatacctgttactgcctcagtatcagcagcagttccggcaccacaacagtagatattgggagccatataatgaattttttcacaattcttatcacaaactatgggtccttcagtggcccttgtatctgctccaagaatgacaccatcctgaagaaaagatggaaaagacaaaactataagtgcataaagcgtcaaagctgtcaacttcaaaattattgaagcggcctaagatgtagtttgcaaatacatagaatatatatagt

SEQ ID NO: 264005 - DNA, 937 bp, Cannabis indica
gggttttgcctctggcttctgcttttttttctttgcctgagggaaatctttcttgaaataccctaccatgccatactgaaagcatgtctttcggtttcactctttgggatgatgtttcttacaatgtgggcactcaaggtaagagtaaccctggcgcccacctctgccttggttcccacggaaccgcttgctctgccccgagccaccagatgccaggtaacttttctcttctgatcagtggtggaatcaccaccatctctaccatagacaggagtagggagagtgggggttccaccaacactcggagtcactcggggcccttgaaggaattttaccgcaccctcggctcgcagggccttctcaaccatttatgcatatgatgttgcttcattggtagtgatcactaaatcatgtctaatcttcacattcaaactggcgagatatttttatttcttactgaaatcaataggcacgatacccgaggcaagcttggccaaacggtgaaactttgtggtatattcagtaacaaacatcccctcaatttgcactaactcaatgaattctttttgcttagcactgcagactgcttcattataatactttgcgttgaataactcccgaaactcttcccaggtcataacaggaatgtcccgagtgagggacaccaactcccaccacacaagagcatcttcctggaactgaaatgtggcgcaggtcacccgatcattacaaaccacctccataaaattcaaaattcgcttagtcgcagtgagccactgctcagccttcatcacatctagacctccaagaaacactggaggtgcctgcttacggaacctctcatataatggcttcatacggttgtcagcaacatgttgttttgctggcaccgctggagatacaactgttgggttttatgccctaaataaaactcttt

SEQ ID NO: 264006 - DNA, 726 bp, Cannabis indica
tatatatgtcttttataataattattaatttgtttagattataataataataccttattaatttcttaattttgtgtaactacagaacaaacccagctctgtacgctgaactttccaaaggtcaaagccccaaggtaataataataagataacctatatataaactataaattataatgtatcatgtatatatatataaataatttctgtataattattattgcagtttatggtatttgcctgcggagactctcgggtttgcccatcgcatgttctagatttccagccaggagaggcttttgtgattcgtaatgttgctaacttggtcccaccatacgaccaggtagtttctctattcctttcttttcttttggatctaaaagcttaattagtataattagatgtaggtagagtagtctgtagttattatattgtcttcaataatgtacaaagctaatgaattttgtttttgttgcaacacagaccaagtacgctggaactggatctgctatcgagttcgctgttctgcatcttaaggtactaaattaattattactatctacaaccatgttttgtttgtaatggccactgtttatttattttgtgttttttgtggaacgtatgttatatgtgcaggtgagttacattgtagtgattggtcacagtgcttgtggtggtattaaggggcttatgtctatcccagatgatggagctacctccacgtaa

SEQ ID NO: 264007 - DNA, 2452 bp, Cannabis indica
aaaaaatagtactaaacaaaagactcattagaacaaacagtagataagtaaacacaaatcatccattatatgacatggaggtatttcgttttttaaaagaaacgacatcgagttcatatttttatgtataactaaaaaatatttattgttattgttgagaatcatgggatatggctctgataccatgttgagaatcatgtggttccatctcaaagccaattggcaatgagtggagtagcccatgttcttatatatggctcaattctctaccatttattctatgtgagacaatgtcactacagttattaaccataaagtgcaaaagctaaataaaaaagaccttaatcattcaccatgccaaatagcattagtagtcaaaattgtacagtacctcattcaggttcccaagatggcctattctgaagacctttccagctaccttgttaaggccaagacctaagctcatattgtatcgtttccatgcccttttaacaatttctgcaccgtcaatataaggagggacaaccacagcagttacagtgttactaaaccattcctccttttgggtgcagttcttcaaaccccatgcctcaacagcaagcctatattatgcaatgtagtcaaatgatcataaataaaagttagcaaaacatgcgtagatattcagactattgtatgcttctttagagttaaattgattcaccttgtggcatttcccaaacgattatgtctttcaataacattgtcaagtccttcctcgaaaagggagatcgagagctgctctcagtccatacaaaaagctggatggaaggggtgtagggccaatatgttcccatcttgtagaacttcaagtaatcactccagtcaaagaaaactctaactgattttgcagttttagttgcctctagagctttggggctagcacacacaattcccataccagtaggaagagaaagagctttttgagagccagttaatgcaacatctactccccactcatccatacgaaaatcaagtgcacaaatggaggaaaccccatcgacaagcaagagtgctggatgcctgtaatcatctgagatttcaacaaaatgtgagcaattaaaacataacatatgcatctagagaattaaactaatcatgtttgttttacaagagaagatttgatccaacttaccaagtagttttctcacttttgacaagtcattagtgactccagtagctgtctcattgtgaacaatgcaaatagccttaatggtatgcgaagaatcagctgcaagctttgattccagaacttctaggtcggcaccacaaccccaatcactttcaaccacatccacattgaacttaaggcgctgttgctgatcaatccagagcaaactgaattgaccaatcagaaaagatacaattcggtctccaggagacaatgtgtttgtaagtgcactctcccatgcaccagtacctattattaattaaaacataaaataaaagagacacattgtgatcttctaaatgatttacaaaacatgatgaattaatatgatatggcattggtcgtagtggacagtacccgttgttgggatcataaatggggttccactagtagtcttgaaaattttcttaacatcctcaaggagagcttttgtcattgctggaatagcaggagaacgataatcttcattgttcctgttcattgctcggaggactgattctgggatattcacaggccccggaacaaagaggtggttccttcctggtgcatttacatagtccatttttgtttctttgcagtttcagctacaaaaatacatttagaaaaaataaaacgtttagcatagtttcaataaccattagcaaacgctactcacatagcccatatgtcatggatggatagtcttgtttgtgagttatatagttgttttcagagctcaaaacatatgagcttcatgaaaaattactcaaaatttttcatgcccaattcatggtgactaagttgagaatcaggctcatggtctcattttcatattctttttttcttggattgtacaacataattcaaaactttttgttgaaagctattgaattaaaactccaatggtgaaagctcaacccacattttatttatgtgtagaatttcaatgttcaaaaagcctctttttatgaaacacacgaatattagacaaaaatgacatacacataaagttctttcctcataagacatattataaatacaaatttctttccacatatatttcaatttattagcaaattcaaagttctttactcataaaatatattataagaaaatttataagtgttaaaataataaagtgatgaaaataagcatctaaaaaaactcaaaattaaatttcaataaaatatcttaataaataatttttttttttattattttaactttaagatatgattttaatttttattttttttttctaaa

SEQ ID NO: 264008 - DNA, 6786 bp, Cannabis indica
accaataaattaaaggatacatgccatgttcaatttcacattatcaatttcaaaaatttataaaaaaaattatgtattttttaaatacttgtttactcaattttaaaagcaaatttgaagcactatatttcccaaatccttttgctccgaaccaccaaacaagtccttcacttcagcattttctcttttctttatgtatttatgagatcccttatagtttatttatgggtgcagtactttgaagagtggaccaagtcatcaaatcactcatgtctatataaaaatatgttggcgtttaccagttaatagttccccccttgaattatataaaacaaaattaataaaatcaatatcacgaaaggataccattttgatataaatattctttaaaccaagagaacatcaaactaaagttatatatatagactattggaaaaagactcgttagcctatcgatctacaagtgtgattctttttgtgttaaaagttccaatatgattcttagctatactcaataggcacttgcgaaaaagaaaagtagataaaagaaaagaaaaacaaaaaacaaaagtagaccaaaagcttttacttaatctactggatttaagtgttggtagctactagatagtgattaaacaatgggtgcccaccaacaactacagtaacataaatgcaactcaacagtaagaaatgtggggtatcaacatgccgccactcgaagaagaaaagacactttcatgtgcttggttgtgacaccacgtcaaaaacccacttcccattttcactattcaaacttctcaatcccattagaatttgttctttctttcttcccactctgctttcctctgcccccacctctttttcctgtcctaagttgcaatgccacacatcctacaactacaaaattacaaactaaaattcagagccccacacaaaagtttaaaagcccaaaccaattggtataatcgctatggtaagaaatactcactacaaatcaagttacaagtcttgaaaatctactctgaaaacaaaactttaagatttgtaaatagtgacctattaatcatgaactggttgctgttactttgttacaagtgggaacagtttacactcaaaaatatttctgagcatagacaattccttcacacattattacgcatggaaaggaagtactggactcaaaggactagtcagtatttccaataaacacctagactggtcaaaaacaaaccattgttagaaacccaattaacgataaaaaaaagattcagaggggcatgaaccagttccgaaaactcttgcatgccagttacagatatctcagatagatggaacagcataacctctcaactttcccttttaatcaggcatttgggaaaaaaaatacaactatgcctagtaagagaatgagagagggggagtgatgatgtatataaagaatgaaatattgcctaaccctgatcagcttcgatacttcccttgtacttttctctttttctttagttttttacactactattccgtatatgtatatggatgtttttgctatcattccattgcatctctctttccaaacaaacaattatggaaagcagaaatcaatccaaaattggatgtatctgcatatacatatcgaaatttttcagtggccctcccaacactccaagcagataatattaacctcccaaatttggccgtcaagttagcatgtcagttttacctctatgtacacgaacatgattcagcagcagcagcagcggcagttacttcatacagtcaagcttgtctcggggagtcatttatgattcaattaagccatgtgtggcttgagagttattttccatttcggcaacatggccaaatgctgcatttaagacacccgcccagatgagctacatctggatttgaatgtaaaatcaaccctctggttccttcctcttcttgttagatcttctggttatcttggttctctctgttgcatccaatgtagccagaagctttggttcagacaaggtaacaggctctaaatgatcagttggatcggagttggataaagccttatcatacacaatagctgcatcaagggagtatatccgcagggcaagagcagatagcgtggatgttttagcagcagcagaaaatgaggaccaataccaccattcattccttaggtactctgtcttaatcatatcttccaacacaaatgtggcttgaaccatctgacacaagtgggaaattagcaatttatcaaaatcatttgttttgtgacacgaaattggttaaaggagggaagggcacaagcaatgaagaactaattctaattagagtgtgaatatgaaactaatttttaagtgtggactcaacttgggaacccaaagcttgtatgtgccgaagacaccactggtaatagtttcatagtatagactgattattggttatgagaaaccatctctactcataacataacaaaaggcagaaagctatatacaaatatttgaaagcatgatcaagatcctagtgaaaaatatggctccaacttcatgttctatgatatcaatgaaagaaatatgcatgtaaaactgtagcacaagagtaagacaaaatcaacaaaaaggagacacaaacctcatatattgttgttgcagatttcacaaatgcacgccaagcccatctccttcccaaattcgactttgaaggtcttaaagcttcttcaggcagagcagcctccatgtcaagaagattcatcttgagtcgccttaaaatatgagacactttacccaccaatggtgtcagagaagactggggaaccacacagcagcaagtgagcccactaatcgaggaatgactaccagaagactgtaccctgtctctttgttctagacatgccaaggcagatttctgagatttcacaaccacattaatgtctgctgatctcttaggagatctgtcagattgaccgtcatgacaagaaacagttgcattagcatttcctagagaatacaacctttctgcagtgtcggaaccatcaacttgtaaacccacatctttcttagacattaaagcaagggaagcatcagtgagataaggagccattgatgggacaaaagaaggaatcccctttgaaccaagaagacctatttcctctattgcatccttacaagagtcttgtgtcacaaatgtagaacgaatcttttgaaagtcatatgggcaaccaaatccttcatcgtgaaacttaatcagcttagcactaagctcagacaaaacagtttcaggaattgcagccctgctaatttcccctgtgcgatcttcacgactactctcagatttttaaagtgcctttaactttggcagcatcagttggctccttaaccttctcacgggctataacagctgaattacatttaccttcattatggccttcaagttcaatatcattaagaaaggttcggtgacaagagaggcaatggggtctacaaggccaaatgatttctaagcattcacaacggtacatcttatcatcattgtttaacctagcccttttccctcggttttttcaagatatcagcactttctaactcaacacatggtccatatcttttctccatccaacaggaagcttttgttaccaaagagtcggataatacagccttttcatttgcggtcgctgagaatgctgcaaaatcaaactgacccttctgaaattcttggaacctaagcttttgccagtgcaaaatactctctttcagctctttttccttagaatcagtattctttaagcacctaatgagctcattgatttcctcatcagttttataagaaacccaaggtgaaacagaagcattattttgttggtgttggtaaggatagaaaccgtttgatccctctgaaagaatatcattactcacaagtggctgaatataatactgcaaagctgaactattaacagcttttcctcgaagacagttcatcattcttccattctgcaatgccacacttccatcaacaataatctgtgcatgtccagttggtgtgccagaagcccagtacaagcgacccacagagtcactacccaaaaattccctcctcacagatacctttagaagctctaattccacactagtgattgaaccctgcaaaagtgcaatatcactcttaacagagttcaactcagcatggtaggcctgcaactcattcacaataacagggggaacttgttgagctacgctagtgcccctcgcatctgaacgaccatgctgatctaaaggctgctggcttaaactagttctgattaatccttgttggttacttgttgaacagagttctctgctggaaccatcaacttcctgcggcgaagaattggatgcaggcaactcgtttgacccaaatgatttcccatttttctgtgaatccttgtgggtgatggcattgctctccccagcagaagcataggcttcttttaaatgaagttcactatctgaaatatctcggcaattgtactcagactcggtggcagatgagcgtctatcagaaccactattcccaattgcttcttgatcacccgctactgctggaagatcatctgctgatgacctatcacccggcgcttgtgattgagatttgctgtggttagcaggagatgaatcctttatatcaactgctccaagggcactgagtatattagggtcaagctttgtagctcttgaaactaagctttcttccctggacttgagatttttccattccacaaacagagaacgcagtttctgctgcaactcagtcgatgtctcgacacactgctcaaggtgttgacgaataatggctgagttaagcagctcatcaacaaaaaacttcaacatgaaggtcctctgcaaacaaaagtagagataaacattgtcagacataaagacattgtctcaattctaaaatctataatgagacaaatgatgcaatcaaataaagtcgtaaagagtagcagacttgagctggtaatccagctctgtcagtttcaaatctcagaacaataacgtgagtgcagaatattttttctaagtcaataacaacaaatacaaggcatgtatctgaacatgtgtccttgaaaaaatttcatatcaaaaataactatcaataagattagtatctatttcaaaaatccatgtcttttgcccatctaaacaacttccatacaccatccatttataacctactgcatttgaaggaaagatgggctactacatgtataagtaccagctcagcactgtgaagccaaataaagatcacaaaagccagaatcagcacagtgcgagtaaaaagacaaacctcgtccacagtgaattcccaatactctttttcttccattttggaagccaattgtgtgagtgcctccaaataaacacgggtaacttctccttgatattttttaccagaccgctgcttaatcacctggatattttctggtacatcttgagcaacccgtttaccaacacaggaaggacagtaccaatttccttctggtatccttgcaagaggaggattcaaacagtaagtatgatactcagcatcacaagtatcacacaacaggacactgtcatcatctctatcaatgccacatactttgcacacgccctcatcccaaggggccttgggaatcaaagttgtggatgaaagtaaatcatctatctccttttttctttcagagttcaagcaatccaacttagcaaactccgcaaatttatcgacaagagaaacaacctgtataaggtttggggaaaaaaaagtgacaacaattagataatatggcaggtaaaaataaaaataagtaaatttatgaacataaaatcaagtactttaaaatttcatacatcaccctcatcagaaaaataggctgtgcagagaagctagacgctgaactaattcttttttctataagtttgttactaactgctagtttccttccccaggcactaacactatgtttggtaagaaggaaagaaaataagcgggatgaaaaaaatttgaaggtgaagaaaatatgaaggaagaaaagaaattaattttcttccatgttgtttggtaaacaaggagagaaatttttcttatatgaaaattactattctgtttaatataattaaaattttaataattattagtgaaggtaatttagtaatttatatttacatttttgtccacattgattttctctctgggtagataaattttggtgcgcccaatgcctatatttttctctcataccaaacacgctcattgatacattctctccacttttcactcttaagttttctttccttccatttttccaccataccaaacatagggtaaactacaagcaaaaatccaataaaacacatgtacatggtactaatacaaactagtttctctcaaatcctttgcaaaacagaagcctcattaatgagaaacagatagaatttgtgctggatcaagccatcaatttcattgggcactcacaagtcgcaacaacagttaaaagtaaaacgacaagttgaagaaagataaagagaaaggtgatgagaaactcctacctcctcatcatacaaggtctcaaaattttgcgacaatgtatcagccaattcaaccaaatcaggctgatccccaaaagcattacggacattactccataactgcaaagtcaaagcaaagtgaaataatcatcagttgtacaagattcactggaaaactctacaataaaaaaagttcggcccatgaaaaggagatggaaacagtagaatgagatagagagagagagagaga

SEQ ID NO: 264009 - DNA, 607 bp, Cannabis indica
gtttggtttactgagtcattatatagactttttttgttctatacttaagtcatgctttcatgtatatatggttttatttggtgaaatttattattatgtaattaagttttatgctttgatgggtatatatgtgtatgttctcggtttgtgattgaatctttgtgaatctttttgggtctttctttcttatttaaatactcttatagttgcatctgtgagtctcaacatctctctctctgtttttatttttttttccaggcatgttttaactctgttttggtggatttggcttacaaaattctctcacacctttagatgttagttttttgaattgtaaaacatatttacagtaattggttatcttgttttattccaattattgttaaagattttaaattttggctttaaggggttggaaaaagcattcttgaactcaatcttatcttttgttttgactcatatagtttaaacaaatgaatatattgcactaaaataatcaactctctgttttaagaatctgatatacggggcttaattttaaaatgttatatattatttaaatttgtctttgaccacttgatttttggtttaagaaatgaattattta

SEQ ID NO: 264010 - DNA, 927 bp, Cannabis indica
taccatgtatacaatatatatatattattttctacttttattgttttttttataatatatttttttttcatttttatacaaactttttctattttgagtttatgttgttttaaattcaaagttatgatgtttctattttataaaagttgtttccatttcaatattatgttatttctattttcaaaaataaataaaaaatcatttataaaaatataaataaaaaagtcccttaaataatttgttgcacacacaattattttttttatacgtatgataaacaattgtttaaattttatttttagcattataaataattcaatttttttttttagaatttacaagtaatcctaaataactaaaacgtacacgatcattaaaaaaagattaaaaaactttcatcaatgtcagatacgtggcctacaaaatcactcttttaggagggtgtattaaatatttttcatgtattgaaaatttacaggtggtcctaaataattacaccgtacaaaatcattaaaaaaattataaaaacttcctaaatgtcaaaacaaatttgtggtttacataaacactcttttaggaaggtgtattagatatttttcttttattgattttttttttttttaaaaaaagaaatttatacttttagggtaagtctataggtacaatccaaaggacattttgataaattttatatatgtttcgatattaagaagagatttttagtctagttttttttatggctttgtacgaccacctataaattattaaaatattataaataatttacaatgatgaaaataagattcaaacaatgacttatcatacatataagaaaaaataatcacgtgtgtaataaaatatttgaatactattctcggcactataaattattcgaaaattttaaaaaatttataaataattgtaaat

SEQ ID NO: 264011 - DNA, 905 bp, Cannabis indica
ctcaatgggagaatgccatttcatgggatcttcaggcatagtcttgggacacattctttgaaagagggattgaggtagatcagtctaagattgatctcatttctaatttgcccactccaaagactgtcaaagatgttagatcttttcttgggcatgctggtttttataggaggttcatccaaaacttttcaatgatttctcgtccactgtgcaacctcctagccaaagatgctaattttgagtggacacaaaagtgtgaggatgcattccgaacacttgttgcaaaattaacatccgctcccatcatacagtcacctgattggaatttgccttttgaaatcatgtgtgatgcaagcaattttgctgttggagctgttttgggacaacgaagggaggggaaaccgtttgttgtctattatgcaagtcgaaatcttaatagtgctcaaatgaattattccactactgaaaaagagttgcttgctgttgtctttgctcttaacaaatttcgagcttacttgattggttcacctattacgatcttcacagatcattaagtacctactttccaaaaaggatactaaggcgggcttaatacggtggatccttctattgcaagaatttgacatcacaatcaaagacaagaaaggtgttgagaatgttgtcggagatcacttgtctcgacttgaatttagttattctgctgatgatccacctattcgtgatgatttccccgatgaacaactgcttgctgttactaagttaccatggtatgcaaacatagttaactacttattaacaggtgaagttccttctgagtggagttcacaagatagtcgctagtttttggtcgaggtgtgcaatttctattgggatgatccattcttgttgaagtatttccccgatca

SEQ ID NO: 264012 - DNA, 738 bp, Cannabis indica
atatatatacatacatacatacaagtacatgtattttatatatttttgttttctataaactgctatctgtttgtaataccattttaatgtagagtaaatacaggagcatttttcttttttcttttttggggtttgagggaggtgataaggtagacgcgtttgttttttaaaaaattttagcatacattttattatattctatatgtcaagttgcacataataaatacacttttcatttctttaattgcattttatattagttgtgatccttttatatcctagcattgaatggctaactggaaatgtttcctaacgttgtataaaaatatatataaaaaaatcatattggctaaagaagggattccattttatagacgataagtagagttattagattagtttgagaattttacagtggttaggcttaagttactattccatgtgtataatttgctatttttacctttagtcttcctgaaactgcatctttagtatatattagcaataagtcaatggtcaactttttcatccttggaaaatcatgatggaaaagtacattagcatgacattgtgtttggtaggcgtttctggtaattttgtcgtacatgtgctgacctttctttctctctctctgtatattatcaatttatttgtcatcacaaactagtgcaatagtaatagagtagtagtaagtaagtacatacatagtgacttcatagtcaactaataactaaccac

SEQ ID NO: 264013 - DNA, 523 bp, Cannabis indica
tcaaacttaggaccctaaaaattttatataaagtaattttttcattagaaaaaatgattttattataaaattttaataaaaagaagatcaataatactcacactttactttagatataacataaaaaaaaaaaaaaattgaagccattattactcagggtcggcctgtactcagtcattaagagggaaattctccctaataagtcgggctttttaggttgaactaggcccaataacattcctaatatggtattagagttggcctagttttacaatgttgggtgcccccaatatatatcaatttgttcaatgttgtttggcatagtccatgttgtatgtgagggggccaattagaatctcacattggctggagatatatgtttgagaggaaattacactctatatcctttttatattatcttcttttatttttaccttcttttttaaagtctattatttttaccttttctttttaaacattgtaccaattttacccttgtcacttcaagatactctccatgtga

SEQ ID NO: 264014 - DNA, 840 bp, Cannabis indica
tactcataataatatcaataatattattaataataataattataacttataccccaccaaaaataaaataaaaaagaaaactaaacaccaaaaaagggcagcttagcattttggataagtttttttctttttctttttctctctctaaattatttaactttttagatcgattttgctccttttttccctagaataattaacatgcacggtaggaatgtgagtgtctgagatagactgcaagggaggattaggaaggaagtagagagagagagacattccctctcaaatcctctcctccatctccattgccaatggtctctctctctctctctctgcttttcttcttgataaaaaccaaaaaccctcaaaaccctcaatgaaagttaactcagttcccacttaaccttgtcactattgttgtttgtaatcttataaaattattattccattattttatatatgatcttgtttttattatataaacacatcacattttcccaaaaaaaaattcagcttcctaagacctaagttgttgagcgttgaagaataaaaagaaagacatctttcaaagaagaacagtgtcttttacggaaggccaaggaaaaaggaaaaggaaaagaagtagagaactagttagaagaagagggaagaaaatagtccattctttgcattattattgctcattcaaggatgttatctaccacttgcattctcttaatatgcctctcgagctttctctctcccattgtcagagccacattaaccctcaatctcaccctccctcaccagcatcctgatcctgaagctgtggttcaagaagttcaaaggtaaagcaaaaaa

SEQ ID NO: 264015 - DNA, 637 bp, Cannabis indica
catgactaatgttatttaaatacattagacatgtatttattgttcatcatttcctgcagaaaatgatacaaattgaattcaattacttttaaagattgtccgtattctatatattagtcatgttattatacattgttattacttgtaatgtttatattggaaattattgcatgtggcaatattaaaggtcatattttgcatacatcttgaagattatgcaaaaactgtatttatatattatttaaaatattgtaaaataaattgctaaataatttcttatatttttatggatgaacaataaataaattcttaacaatttataataatatttgttatacccaaagttcggtaagcacatcagaggaggacacgtgtcaagctgggaagaactcaaacacacaagcgacaagtacgcttagcatggaacaactcgttggaaatataattcgcagggtaggtttataactcggttggctaaatagacttcggcgagacagaaacatacgatctgccattttatgtattgacgagaaaccatgtgagtgcttacaatcatgaccagggctcaacctcactgcgtgaaagaaaaagcgacgacactaaaaatacttagcgtatattatgcgatatacaaact

SEQ ID NO: 264016 - DNA, 683 bp, Cannabis indica
catcagattcttaaaatctgataatttttttttatatattatttgaaggctgttgtttattcaattgttaatgtgcataactgtagaaatgcaatattttactacatcttcagtatagttttctaataatagtcacatggaaaatttatgaattatccattcaagttatcttgcacgctatgttagatctatgagttctcatatcttctttcttctggtgtttgtaggatgcaatgtcacatatatggaagtcactagtggaagattcaaagaagacaatcgatgaacatttggatgttattattgatgatttgttgattcaatgtggttttagattatggcgttcacgtgaggcgtcctgtattcaaaatgttcatatagatttagttgtattcaaaatgttcatatagatttagttgtattcaaaatgttttctaagtgtctactgtgtttataattgatttgtacataaaaaaaatatattttttctttggtaaaataatttgtttatgctattgagattaataaaattcatctgttcttgtcgttttttataaattttaatttagtagaattagtttctatttgtaatttttagaaagaataaattctttaaatatgtaatttatataatataatatatttggctcatttattaattttttttttctaataaaaacatg

SEQ ID NO: 264017 - DNA, 535 bp, Cannabis indica
agtacttgagttaattttaatgtggtctatgataattaccctaaatattataaaaataaggaagcaataatgtatggttatgttgctaattaaatgaagacacaagttagggttattaccctcaataaatgttatttcgggcataccgtaatatgttgtaggaatgggtatttagtatgtaagttagggttattaccctaagattctatatgctttgataactattgaatgcatacatatatgtcaagagttatgtgcataagacataacttggttagacctagtatattactaggataaaccactgcaagaacgtaatgtatggattacgtaaacatatatgaatagggttatgcgagcaaggcataaccaagttagactgggtaattataaccgagataaaccttactaagtccttattgtaaatagacgtgtgaggcgtaacacgtaggtctatgacatacaaacatatatagacgtgtgatagaaacacgtaggtctatgccacatagatatatataggcgtgtaagcgta

SEQ ID NO: 264018 - DNA, 897 bp, Cannabis indica
tttagcgtgtcacttatcaattttacgaataatgtgatttaggggcctgtaaatcgttaagcagctgttccactcaggttggtcgtcacacttgaatttggaaacaaggtaagattagtataatgatatgcatatgtgtttacatgtttagcatacatgttagttaagcctgttagattacattaaaatagtggtgtcaatatatttagtattatattggatatcgataaatgtatgttgacttaagtactattttatagcaccacatcggtaatattagagtatgactagcataccgagtataggctgatattatggtcgatagtaatgtactacttgacagtatcacatcagtatggctagagtatgactagcgtactgagtataggctgatattatggtcaatagtactatcgtacaaacgttcttgactcaataccgtgtcggacatggggatagggttatggttgggtgtatgggcgcctaattataattcaggttatagttatgttattgattatgcttttcttactgagtctatcgactcacagatattttttacatgtgtaggtaagggcaagcctaaggttgagtagccgtgagaacgagcggatgaagattgtacatgtcgggacggttaggcctgcagcgtatagtttttgggacagctggttgtatattgtctagtcgctaggcgacaacttttgtactatgcactatggaacttttataaatattttataaacgagatcccaattttatatatgtatgttattttggtatttataagtaattaaataaagttttaattaatcacgttttcaataaacttgttggtttacccttcttggaaatgtagattttataccccttggttcctaaggcataacttagaaa

SEQ ID NO: 264019 - DNA, 532 bp, Cannabis indica
tgtcttattattgctttatcacatatctattgttacatattgttcatcgcttataaaatagactcattgtcgttggctaaaagcgaagtcaacaaaaatagtaatgaataataagttaattaataaataaatataatttgttgagaattaaataatttataattaaataactaattaattcaataattaataaataatagataattaatttaatattattgtcctcgcttttagcaaatgacagcgagtcttaatcttaagcaataagtgatataatttagatgtaatgtgaaaagataaataaagagcacatagtttttcaagaggttcggccccgagaagttcggtaatagcctactccccttgatttgtattaacttaagaaaaaagaataaaaagattcttctcttaaagctcttacaatgacatctctgagtatactctcttagatcattctttcgaccctttgtccagtgagaatagattactatttattgcgctatgtgcttgagggaaggtttcccttttgttt

SEQ ID NO: 264020 - DNA, 623 bp, Cannabis indica
gttttttctgagcttttttcacgtaagctctcaatgagagtaccaaactgttaacgcagatttttgttaacgataataaagcctatttcgtgattaatttgcataaaaattataaaaaataaaagaagaaaataaaacatgaatctttttacgtggttttgtagttaaaattctacatagtccacgagtcaatctcattcagattattctgatacaaactagggttcttttctctcaaagatttttcgtccctttttcagtacgttctgcccctatttatagtaacatagggtggcagttaattacaatcagatacgaatcccacaataatatttcccgaaaattgtaggctttaattatgcaccatgtaaataaatacagttataaattaaaaatcatacaattgtcatttatctacttttactgggtcaatactggcgtggatttagatacgctgcaaagtgtatctcgctggggcatctcactaagaacttgaatagcaacaataatcctggtcacttgagctggagcttttcccatgtcttttcaagattaaaaatgtaaatctcgtcgtttctgcaattgaagacataacgctcctctgacaatcgcagttcttggtg

SEQ ID NO: 264021 - DNA, 1168 bp, Cannabis indica
ttcattcgtatattttgaaattaatttaagaaaaacacacttagattaatgaaattaattcaagataaactatatgtatttttcttgtatttaattaaaatatagaattataactaactagatttcttttgaagcatatttttttattatttcattaaatattccaatttacattgtaaattagttatttctagctaattttttttttatcaacttaaatttgaatatcttatgaatttaaaaattgagttgaggaattctaggaattagttattgaagattcttagggtattttttaagttgaaaatttgttaaatagaatatttttcaaattaggtggttacaacttaatttgttatttaattaatttttttttgaaaataatttaagttagaaatttagttattttagaacaacttaaattagatatttttcaaattttattttattatattttatttattttttaatttctaattttatattttatatcattttcgaaaattaaataattgaaaattttaattttattttattatattttatttattttttttaattgttggttctacatagttatttttttagtgagtaatcctccctaatggaggaacgttcattagcaatttaatgtcgtagaatctcgaaagataagtattatttgtaagtgttttatttttagtagagatcaccctaatggtggcgactattagtaagacttacaaaagtatgaaacaatggtggaggctcatgaaataggaatgaccttgactctcgcctaaatgggacaatgtcggattctcttttcgatcgaataaaaggttcctagaatgcttatcattttagatgagttgatcactttattcaatggatgatgctttgactctcgtctaaacgggacactgtatcagtttgttgaaaacattagaaaattaaaatatgtaattttttcgtatttttataaacatatttgtttacttgttcttttctaaattttgtgtatgaatttgttgaaccaagtgatttgcttctgtttattgatatttgtagtgccaaaatgaataaccgacaccccgacccactcctagtcaatgcctttgcaaatgaaccctatagtgtgaaatgttggaagttattttaccaggaacttagatctactcacaagtat

SEQ ID NO: 264022 - DNA, 1262 bp, Cannabis indica
attgtactaagtaaggttgggttgtacaataaaaaaaaattgaatggtttatagcttatccaaaccgcaatcattaagctggcctattaaaataaaatatatatgtatacatagaaaattgattcttaccagagagaacaaccatgtccttgagatcaaggcctacattctgaaactttgagagaagtaatggaacagtggagtttgggcctgggatgttgttgtttgctgctgctttgttagcacttaggctgtctttccttcccatttgaacttcccaactcggtccacctgactacaattaggccaaaataacaataacattaatgtctctaacaaaatcacctgatgattttataccaaagaattctactactaataataacaataattcattattatgacaaaccagaaggacagagtccctggcggcgacagcgagaatgtcggcgcaagaaacggttgcagggcaaaaggattcaagctctgatttgatagcatcaattacttcaaaaccccttaaggagttgcggtttggtgctgctgttttttctccaacaaagttgttagtgtcatctaacaacactgaaccatcacacccctgcatatgcatgtgtataaacattataaaaataatcatttttgatgcataaataaaaaaaaataataagttataaagacatgcattgacaaagcagtcatgaaagtggagacgaagtagggaagcagccattctagagtcctccataactgcccttttgaccaaagaaaagatgatatcttcagcttctgggcaagcgtctttgtatacaccaaacccaacaccaacacctacacctacaccaacactaacaccaccattttcatcaccatatccaccactatcactctttgcttttgagaataatatcataataacaagatttaacatgagtagaacctgaacaacaaacttactatccattcccacttattcaattttcaaatattttcttgttaataataagtgaatagtttcttctactatatatatagtttgatttgatgtacaaaatggtggttaaaaaaaacataagaagaaagacatggtcaagagggtagctttggaagaggtcattgagcatatgattttgtacctaataccatgtgcaagtgtgatcactaggcctacgtaagtattatctaattttctctatatctggggcttttgttatgattcactttcattattatcacctcaaaatacacacatatatagttat

SEQ ID NO: 264023 - DNA, 609 bp, Cannabis indica
ttaatctaaaattaatactaaaaataacctaacagtatctttgtaatttctaatgacagaaaaaatacccaaaacactttttcagaattctcaatagaaatagcccaagttgacaatatgtaaacatgtgcgctgggccgagtgccaagtgtcaacctaggtactgggtccagttttaggcctcctgaaagtttcgtttggtctccaaaaatagttaaattctaatttttgatgaaaaaagagaatatgctcggaagacttttcaaaaaaaaactcctcagaactggcccaggttgtcaaaatgtcaacatgagcgctgggctaggccaaggtgtcaacctgggtgttggccccttattctggcaccaggataggttgtctccttcctgaaagcacttgtgtttcccatttttgatgaacacgaagaacatgcaagagtcaaattttcgattcgatgcttggaagtggcccaagttgacaaatctgtcaacctgggcactggggtgcctaagtgtttgggtgtccgagtgctcaaaaacaaaagttctccaaatttaattttgatgcctcaaatatgttcgtggtatgtctagtttatgtcccaatgca

SEQ ID NO: 264024 - DNA, 660 bp, Cannabis indica
gtggaaattgaaaaaaaagttgaaataagaggctgatgttaccacttctcacttttgtttagtgggttgatgattgtttatatctatttttctcacacacatatcttttggctatgaaaatatacattctttgttatgtgaatatataaacccaagatcaaatttttcaatgagtagagtgttttaggaaaagacaaaactttgaaatgtagataatgttatctatgcatactatgcatatgtgtattcctttttgatcaaaccagaggccattttgtataagttggatggtgtcttttgttttaagaaagtacaaagctttaacatgtagatagatgtaggtaggcagtgaaggaagatcgagctcttctacgcgaggactgggaagagagaattcaacctctattgaaaatggaatctcttaagctcgatcccaacttctttcgcgttgaagactatttcgctgctaaaactatcattcattctcgctcttttttggttgatgatgactcccaaggttatggaatggtccctttagttgacctgtaagtttattgttgttcttgtcaaatttgaataccctttttgttaatatcaatcctttaacttccacaatcttctgttatattccaggttcaatcataaaactgcagctgagga

SEQ ID NO: 264025 - DNA, 1127 bp, Cannabis indica
gaggaatctcaaatacgcatggcagcgtaccaaaagaaattggcaaaatactttaattccaaagtcaaaaacaggaaatttgccattggtgacttggtcctaagaagggtctttccggcctcctaagaaccaggattgggggtactcagactaaattgggaaggcccatatgaagttgaagatgaaataggctctgagacttataaactaaagcgaatggacggatccatagtgcctcaagcctggagtgctaaccgcctctgaaaatactacaaatagttaggagttcagtatttaaattcatctttactctataagtgaacttgtggcggacaaagtataagcattatcccacataaatttaagctaagtgacataaaagtcttttttaagtcacttagggggtactgaggcataaacacacgtaaagataggcaaaatagaaaagcaaatagacaaagaacttaaaaaataagttgtctaaaacaaataataaaaggctcggggtagggccataaagatgtctccccttacaaaaaataaagataagaaaaactaaatattgtcttaagggggagaagtaagtgaaataacaaaaaaggatgggttcaatcaatctacttgcggagaaagacggagaccccttttctcggccaagactgccttcagcttcttattcttttcccaaaattgagctgatgtagcctcaagatcaagcaggaagtggagatgaggttcgaacttgtttgatttccagcaatgaaaactccatcctcaaagcgcttcttgcagtgcttgtaggtcattagagctaataaggcctccctcgcagccttggcgacttcctttaaagtctgctcccaaaactcgcgtagctccttgagttcaacaatcatgttggcagtggtttccaagtcagtatgttgtaactcttcaagagacttgagtttcacagagagttcttgattttcctctcaagcatcccggaggtccttcctgcctagggcaataatgtcatccttggccttcagtgcttctttgtggtcctgctccatgagagccttctccgttaaagtatcgttgtgaagggcctccatccgatcttctgactccctgagcttcctcat

SEQ ID NO: 264026 - DNA, 1705 bp, Cannabis indica
ttaggtcaattgatctcaatcctagatggttaagttctagcttattatactatacgggttctttgacttgttcgttatagctgactaataggaacatcccaatatacttacatcttaaaaacttggtagttcaattgagtgggagagttaatcatagatatagaatctataactattagaagtgaaatgatcgtttctttatagcttggtttaacgcgataaatgatagagtgttcatttttagaattacattagtttactgaaatatcatttacaagtggctaagtgttttaagaataaaatacattgaagggtaaaatagtaaatttgtccctactcaatgtaaaccgtctatagaggatcattgactatttaaattgtaacaatgggtaattcatagcgtatctatatttagtatatagagttttctatgtaatcaggagtgtaattctgaatcaatagtggagttaggaggaattaagaagtcgagaaatttacttggtaaattttagacctacttattaggagcttggttacataggcccatagtcctcgcattgtttgggataatatcatcttgtagactcaactaattgatttaataagaattcaaaaatagactaagtcttatttgagtattttcaccaagtttgggtattttcgagaagaaaagagaaatacgagtttattttttaattagtacactttgtgagtctaattaataaatatatttaaattatattttattttataattattaaaataaaattagtatttaaataattagatgagaaaaatgctaaaattagaaaagacacttttgtttcattacttaaaataaaatggcaaaaatctaactctaaaacccatatgtatatccggccctaagagtaagatttaacccaagtctttattccaaacccacctcatctaaacctaaccttatgtgaatacctacataaagaaagagaagataattgaaaaacctaatgtcacttcttcttcttaccttaatttttgaaattacacagtattctctctcaaaaatttgtttcaaaggtgatttgagtaatatctcacaccattcaaggtgatactcatgcctttgtggaagactgttatgaacacaatcgaaggataagaaaattcatgttcaaatcttaataatgctctgctacagataggaatcaagggttagagatctgaacggaagaagtcgtattatttcgctgccatcaatgtaagattttttataactcttatacgtttatttattatttttaggaatttcatatttaggatgttagattatagaattatcatcaacatacatgttagtatatttaaattctggtaaaataaattccctacaagtgtccctattaattgtctttttaggttaattaattaattcaattagataaatatttgaatttgaaaattaattaagatattctctcaatcgggatataaatatctataactgattttggttatattattcattcaaaaaattaaatatgatctagttaataaatttgagtttaaataagtaattatataaaaatttattgggtttatttaaatatacagtataacaagtataacaaagttttgaacaagttttttacaatagaattttgtacgtaattttgaaagcctaaaaacgtttttaccagtaaacatttttctctatatcacataa

SEQ ID NO: 264027 - DNA, 738 bp, Cannabis indica
aaaaaacaataaagataaaagaagagagaaactagatcggattataggctatagccgccgtagaccagatcgatattgtggctatcataattccaacgagttgtgcacctccgatccatggtcaggcaaacaactcgcacaaatctccttcaaatctgagaaaaaaaatatacaaaacgcattaaaaaatcaaaagcaaaagcacaattgttcgaatctacccaaaaaaaacaaaaacatagtaaaatggaaccactagcgagagagaaaacacacagagagagagagaaagagagagagagagaatgagagcgagagagagacaaggatgagggagaggggttggggttttctggttcatttgaaccactagcgtcggctgtggccgactttggtgttgctcaaatcaaatactaaaaacctagaacattggggataacagtgtcacgatacctgaaacatcaggtttgtcatcaagccgaggtcgcttctcctccgtttcttcggatgcattgccataaggtgtgtcgtgctcagcgtttgaatgggcctgttcgtcggagttcggctcggcctgttccaaagcttcgggttccagctcttcgaccatcgcgtcgcacaaagagaaggcagagagaggggatcggaagagtgaaagagaaaagggattaggttctaacttagggttttttttatcattttctatgtataccgtttcaattttccttacaaaattta

SEQ ID NO: 264028 - DNA, 1658 bp, Cannabis indica
aggttgtacaattaacagaaaagaaatataataaaaatattatttctcttcattctttaatatctctctatggacacgaccgctcatactacactacaacgatcgctttgtgaagacaagtttgggcgtaatcaccatgcaaaaagccatggagacgtcagggattcacatacaccctaaggccatcccaacagaactcgaagaaatattggaagagtcctcactgagcactcagaaacccaagaccagggaaccaagccctatacgctacccttctgaggaaaaccatgggaaaaatcccacttcaatccctagaagaaagaaaaaggtgcaggatctgcggaaagtccgctcagatttcctgaaagggaaaggtccgcagaggggcaagctccctcgagcgagtcttagccctcaggatcaagaggatcgaaaaagcatatccgtgcaccaggagcccggagagagaggaaggaaaaactggagataccctcaatttgacctaagataaaaaatcaacgaaaaatacggtgatatacgagatcacctagacaaaaagaaacatgcaccagcggtctccacgggaatactaaatgaaggaattctggctgagttggcaacgctgcggaaagacattgctcaggtctctcgaaggcaaaagggggacgactccgattccgcttgcgaggactgggaaccatgcgcccgacacatattggaggcagagctccccaagaatttcaagatgcccgagatggcagcatataccggagacttagaccctagtgatcatttatcccgtttcaaccgagtggtgacaatcgtgagtgtcagcattaatgatgccaagtgtctatgctttccactaacattaagtggttccagtgaggaatggttcaaaaagttggaaccaggatcagttgattgctagaacaaactacaagttagctttgggagacagtttgtcgcagcgagaaagattaatctcgaagtcagcgccctgactaacataaagcaattgcccgcggaaaccttaaagaacttcataaaaagattcaaagaggaagcttcaaagaccaagaaggtggacgacggacaacaacttgctcttcttcaagctgggatccgtacggggaccccattctggaacgaattacaacaggagggagcagccaatctccaagatttcctaaagaggttccaaaagtacatcaattatgaagaagccaagatagtggcctacaggggatactatccaaccagagtgccaggatatgtacctggagctcagctctcgggagccatgcccccagccactccttaaatgagcgacatacaattctccgctacactaggatataatcagagcatagccttggctcctgcatcatcacactatgggaatcccataaacaacccctcagggatgagtggtcaagctccatctcagtccgctcctaccgcaagcctgataggacctcctaagagctcccggagcaagcagtcctcaaagggtagcaaccgaacggaggataagcaccaacaaaggggatacacccctcagtatactcaatacacggagctcaaacacacatgagcgggtatactttgccacaaggcaaaatacacattaccagaagcctccccctgtataggga

SEQ ID NO: 264029 - DNA, 504 bp, Cannabis indica
taactcatccaatcctgatctaaatattaccaaaatttttacagaacctaaaaacatcataatgaacatatttcatgaagaaaccttaacccagtttgcaacaaatttaagttagcacaaccaagttaagtttgagttctttgaactcgaacttgcataacttttgctacaaccacccaaaacaattcaaaccacttctaaacagtcctaaataaccttaataatcaattcataaccttcataaacttattcaacatgttataatataaaaatccactgaaaactaacaaaaatcctagaaaactaataaatttaaggttaggttttaccttagaagtttggaggagctagttgttgaactccttgatgaattctagctaggaagaggattaaaaatggtggaaaacactgagttttggccctggttcagaagccacgaagtagagggagaaggaaaaggtgatttggtatttttttttacttttcttttttgcttttgacttt

SEQ ID NO: 264030 - DNA, 1382 bp, Cannabis indica
actcattaaccactaactcgagccaacataatcaatgttgctcaatacaattttctaatccaagctcactctctcaatttctcactctaacttctctctctactgtgttatatctctcttattattactctttctattctctaatgaaaatgagatgagtagtcctttttatatagaccaaaggatccaagatacttgctatcatatttcacggttaagttagttaatgaacaactaactaaccggatcttgattgaggggtctaaggaataataccacaaactaatatcagtcatccaatcgatccaaattggatgttggattggttcataactatctattggatgtatttcatgtatatctattggtttaatttagatttatataatattttagacctagtatttattggatcggatcggatccatccaatattttagattcagtatctattgaattaaattggatttatccaataataataataaaaaaattaatgttaattttcatatatacattttttttgcgtttaacaacataaaatctaattactaattcaaactaagtgaaaatattaattcgttcgattggatgtttgatgtattgtagttttggacaccccatccaacattcgatctgatcagattggatattaaaaaataacatccaatccgatcacaattgaatatttattgtttttgatcaaaaaaaattaaatatctaatatttgacagtcggttgttattaaattagatcgatttatgcagacacctaatcatatgcttgttttgctatctataaatgaatgtaattttatttttttctccaattagtgacacactttgcataatatatattttctgacccctcctccactcatccccagagtttggtgaagaaatttctggagccttttatctttgttaataacaaactaaagtcctgcattgcactgtgagctgccagctgaaatattctagtcagctttctttctttttctcattgaagtaaataaattataggcttttttttttctcttcaattaggcaaaggcccaataggtaagattgtaacctttggggaaaaaaagaagaagaaaaagaggcttgaatatagagggtctattttgcaatttcaaatggtcattttcctctctctttctctgtccttaaaattaagatagaatatatcttggctcagtcaaattcacactaagtagtccacttgttgattggcataattttttttttttttttgtagagtttctaggaggaaagcctggctacatgtgtggacaatgaagtttcatatatgaacagaatactgcctaattgggtgtagcaactcgagttttctgagagagagagagagagagagttgtc

SEQ ID NO: 264031 - DNA, 2870 bp, Cannabis indica
caagttaggtgttcttgtaattctggttgaaaaaaaaaaaagtcagctcaatttagttagtctccgttgtaaggcacaaatggtactatctgattcttttttcttcaactccgtgtagaagataaactagagataatctactatgtggaatggaaggtaaccgtctttttcttggtactctatttttaggattgttgatccaagctctatttttagctcattacctatcatttaaaccaaagtgttgtagttgcaattatttagaatgatcatttcacgaacttgaaagttgatggaattttaattttcatcccaataaccattatgttggagtacaataaaaatgttattgatatcctacatccaaaaaagacaatatattaatattgcatctataaactaaaatcttaatttgcacatatttcccacaatcaattaaagaaagtaaactaatgataatcatcataactgaatgcttttattctttttttttttctttgtgtttatggtagattaggcttcattatcctagtcttcatgtacaacaggcctcatccattgtgcaaactgtgatggtggagaagtaagatgttttgtagattctgactatgtaggagaccttgacactagaagatcatcatcagagtatgtttttcaattaaatagttgtataattagttggaaatcaaacctagaatctatagtttcattatctacaatagaggcagagtacataacatgcactaatgcaattaaatagttgtataattagttggaaatcaaacctagaatctatagtttcattatctacaatagagacagagtacataacatgtactaatgcattgaaagaagcactctggctaaaagaaattacaactgaacttggtatcaacctaaggacaataccaattttgtgtgacagcgaaagtgctttacacctcagtaggaatcaagtctttcatgagtgaaccaaacacatttatgtgaggatgtattttattcgagacataatctcaggtggaaagattaagctacttaaggtccctactgaaagtaatgctgcagtcatgctcactaagtcattatactactgctaatttcacaaagtgtcttcaaatcttcaatgtttcaagtcattttgagtgctaaggtccaatgctctctgtactatgtatattataggtcaaggtggagaattgttagatggttttgcccttgtaatatacacacatgtacattagcagcttagttagttaggactgaactattttacaattaagtcagttagttattaacaatacaaaatgaagtctattagtacttcccgatctgtacatttctttttagtcttgtaattagcactataattcatattaaatactcaataaaagattcattcatttctctcttgtgtctccctatgtttatttgtgattttgttcttgattgagttttggaatcctggtatcagtgcagatcagagatatgtttccaacaagaacaaaaatttggggctgcatgaccccgtccaaactctcacgccataacttatattgtaacttataaataaattgatcaatcaattctctttattatggataaagtgcattgtattttactatttaaatacactcaatttatatggctataaaaaaaatatatgaaataacaaccgcgatggcagcaaaacggatgttagattccatatttgacgacaagaacaagctatctatctataagttttacatccgttttgtatgacaataacaacgtcaaatatggaatctaacatccgttttgcatccgttttacatccgttttgtatgacaataacaacgacgatgtaccaaacgaaccgtattgtattgtatttcatgcaatatttttatgtaaaactatatgtaatattaacttgtatgagcatataaatatataatatttttgtataaattaaaatttaacatagtattatatgaaaatatgataaataatccaatttaatatcatacaaaatgatttaatacaacgtactaaacgagcccttaatcaatcaagggcttagcttttattttctacaaactatcggcatgtagttaagggaacaacaagctcttgatcagtgcaaatgagatgagggagataaggttttgtttaatgagctttaatttttatttacatatttcttgttataatttggtccttccatttactttgatggtctaaaaatggtgtaaaaaataatgatataaaaaatgtgttcattgagtccatcccttattatatatactcaaaaagtaaggttgaacattaggcgtgtttacgggatttcgagttcacgggtttgggtttacggctttcgggcataagaaaatagcacatgtacccgtccgtaaaatgggtatgggtttgcgggtttaaagtttcgagtttgatgggtttctgagttggcagttggctagatttttgggtttgcatatttgtttatttttgttagaaaaaaaaattaaaaaaggccaagctcattaacagtataaaccctaaaccatctccttccttttttctcttttgtctatctattctattcttctactatatctagtatctacctctctcgctctctttgtaatagttatttttttttaaaaaaaaaaatgatcgatggctgttgtgaggcaaggaagagatcgatgtaggagtgtaaatgggtcaggtcggatctggtctggctatgatccgacctgatctagatcaggatctgctctgccccgtcccgctagatcagatctcggattggatcagatccgactagacttattcaaatcgaatttgatctgataactctttttttttaaaaaaaaaaacttata

SEQ ID NO: 264032 - DNA, 91 bp, Cannabis indica
tttctataccttggtcgaacctctctcttctcttttcttcttctatatttcgaaccactagtagttaaggcaagttggaacggtgccacaa

SEQ ID NO: 264033 - DNA, 1203 bp, Cannabis indica
ttgcttcacacttgtctgaccacgcgaatcgctgattttttttagttaactcagtcaatggcatagatattttagagaatccctcgtcgaaacatcagcaataccttgctaaaccgaggaaacttgagatttctatcactgattttagcctcagccaattcttcactgagtcgatcttgcttagataaaccataataccattctttccgacaatatgccccagaaatgatacctctgacaaccagaattcacattttttgaattttgcatacaacttgtgatctctaagtcgttgcaatcgttgcaataccattcgaagatgatactcgtgctcctcttctgactgagagtatacaaggatgtcatcgataaacactatgatgcagttatcgaggaaatccttgaataccctattcatgagatccataaaggctgcaggagtgttagtcattctaatgacattaccagaaactcatagtacccatatctggtccgaaacacagtctttggtatatcttctttccgtattttgagctgatgataaccagatcgtaggtcaatcttcgagaacattgtctttccctgaagctgatcgaataaatcgtcaattctgggtaatggatacttattcttgatcgccaacttgtttagttcccaataatcaatacacattctgagggaaccatctttctttttcacaaacagaaccagagctccttagggcgatacacttggtcaggtaaacccaatatcaagcatcccttgaagctggaacttaagctctttgagttctgctggagccattctatatggacctttagaaacaggttcggctccaggtgtcagatcaatcacaaagtcaatttctcattgcagcggtaatcttgataactcctcgggaaaaacatcgagaaagtctttaaccactctgactacttcaggcccaaatgtttcgggtctgctagagtcaatcaccactgctcaaaatcctacacatccactgtgtagtagatccctagccctttgcacagaaataaccgaaatctgagatccctaaactgatcaaacataaacaaatggatcctcaccttctggctggaaagtcaccattttctgcgtacagtctatattggcccaatacttggacagaaaatccatccaaagtatgatgtcaaactctgttaatttcagttctataaggtc

SEQ ID NO: 264034 - DNA, 583 bp, Cannabis indica
aaagtaaattcaattgaaattaatcaccctaagctctgatcattgttaataatttttaattatttttttttcttttcattagaatttaaaccttctttattattattattgtcactaaataaaatttaggaatttaattttttggtaattaactacagttttcgtaggaactatattttacttatcaatatattacttgattcgactacgtatacttgcgtaatagaattttcataacaagtttttagcatcgtttttggggactgtttttagttaatatcaaaataattaaattttattctaatttgattttcttttcaccttttactaactatatttgtgtcaatctttctcttttcaggaacaactagtttatgcgatgtcaaggaccaaatgcaagcgtgcttgttgatcctaaaatacagaagacttatagacagaatagaagaaacaagaggtcaaaaagagttccttctagaggggttgaattagaagaaatgggggtgcaatggatcaagataatgcccataattcaccttacagaagccagaggggttatcttctacgcgcaatgacagaggtc

SEQ ID NO: 264035 - DNA, 1318 bp, Cannabis indica
atgaagctctaatgatcgcacttcggaccccaatactactcatactacggaaaaaaaatctgtatatttctctcataaacgaagactaaagacttcattttgataaaatcttcgaacataatgataaaaaagaacactacaaagtttgactcttcactaggcctcaggtatttgttctatgtgcgatattgagaaaagattgtgtatacccatttcgagttttgatctttttcggtcaagtttcgaggaaatagcaagattgaggttagatcgtatctgggatttgtttacacttatctaaagttcggacctttggttgattttgattcaattctataatggagaatgagactacttataatggagggttggagattgaaaaatttaagagagatgatatggaaattgcaccatggaccaaacagatcactcttcgtgggttgatggcaagtatagtgattggaatcatttacagtgtcatagtaatgaagctgattctcaccactggtatggtcccaaatctcaatgtctcagctgctcttcttgcttttgtgtttgtaaggacatggactaatttgcttagcaaggttggaattgtgtcatctcctttcactagacaagagaatactacaatccaaacttgtgcagttgcatgttatggtattgctgttgcaggttagaatttaaaatcaaaacagtgtttgactttgttgttatgtttttctttgctttgagtcttgggattttattatcttttttctttcttgggtgtgaaatgcaggtgggtttggatcttatctgttgggtttgaaccagaaaacttatgaacaagcaggagttgatacagaaggcaatactattgggagtactaaagagcctggtattggttggatcactggttttctctttgttacttgttttgttgggttattgaccttggtacctcttagaaaggtcttctagctctcttttggtctttctctttgatgattttcttctccaaattcattcatggatgaagttatgtgctgacgttttttttgtagattatgattatagactacaaactatcttatccaagtggaactgctactgctgttcttatcaatggttttcacacacctaaaggagacaaaatggctaagtaagcaatgagtttttttctcaatctttcttttgatatcaaactaaacagaattgagtatggaagaagtcttaacaagttgaggcttttctattttgttgattcaggaaacaggttgatgggttcatgagattcttttcaattagtttcatatggggtttctttcagtggttt

SEQ ID NO: 264036 - DNA, 631 bp, Cannabis indica
gtgatagaattgggaaaataggttggatatatacatatacttgttttggtgagacagaaagaggtttgcaggttggccaatcatataaagtagtagttgtttgtttgtacttctataatgcatatatatatagatatataattataatgtatgatatgtatctcatcatgattaattaataatatgtgtacataaaatatccatcaaacactttattcataatatggatcggtaatgtggctaattttttttaaaactacaaaggtttagtcttaatcaaatgtaattagttaaaaaataatgtctttgtttagtttacatagcatttttatattttacctgcatgtttttaaatataaatttagggagactatatataaatataggaattgtctactgtgcccttactcttttttccctatagtatgaggaatttttttccaccaattatcaagtataattttgagttttactttaatacaatgcactttattgtaggtaattatttaatttattttattattttaataaatttttgtaggtaattattttgagtataatttattttttcaataaataaattgttagactagagaagatgaaaaaaaaaatacaatttttaaatgtgtgc

SEQ ID NO: 264037 - DNA, 854 bp, Cannabis indica
ttcttgtctatgataaattatagagaattgaattagtacctaacaaaaaaatattgtagtaattaaaagtagttgagccatcaattggttatatgagtcataataatttattgtagagtgattttatcatactagtggtgcttaatactgtgatattatgaatgagcttattataataattaataaattaaaattatgtgagactctattctaatacttaatatattaaggaaaatttatacaaaatattattttacatctttacaatttttttttttttttttaacttttatggtttttttttattatatttatggtgtcctataaaaaaaacatgaaaataataaaatatatgtagtccatatttttatatataaaagaaattaaaaatgtttaaaaatttatacaaatatcttatttttgtattttttttttgatttttttagttaaatatgaaataatttcataaaatactaatagcagtattatacatcctaatactttataatactacttttagcattttctttctatttggttgcacccataattaattccatcacttttcacaccaaatttcaattcattggggttcttaatcttaggtctccaagtaaattcatttcattggttaaaccacaacttttgatccatttttttttttgaacataacttttgatccatttataacacgtttttttcaagtattttatgtttaatcatccaaagaaataattaatgtcatatatacaaagtcataatttataatatattgaaaatgcatagatgaataatgataaataataatgccatatatacaggaaaacaataaataaatgggtataggaaaaggt

SEQ ID NO: 264038 - DNA, 2924 bp, Cannabis indica
taccgtcaatatcctattataagctcttagtcaatttttgtacccgaaatacatgtgagaatattttttttttcatgtcgatgttcgttatatttacaacatcttacttgtaaaattttaaattttttcgaatagtttacagtgtcgaaaattatgtttgaagttttttgaatatgcgtggtaaattagaatactaaaaactttattttccgtattgtaaactattcagaattttttaaaaatttatagtgatgatattgtaactataattaataccattatgaaaagaaatttgaaaaaaaaatacaaacatgtgattttgggtacgaaaattgactaaaatattgtaataataggttgtacttaatacttttgactttttttttattatatatttttttttaaaattaacatatcatattacttttgtaatggagtgcacttgtaataaggattacattggtttttgtatataatcatcattacaatacttaatgtaattgtaaagtctttttggcaatttaagtgtcaaactattttatttatttattgtgtgatttctttgtgcaattaaactgatttggtctccttgatatagtgtctttattgctcttttttctcaaaggaaataattatttttcaactgtccattttttattttggaaacttcttgtaagagaagaaattctcttatgaaaagtcggttttatttagaagctttgagcattgctctttctctttattgtgtttgattgtgtcttgataagatcagatcaattacactatttttgacaggtatgaagtccatgttcatgatcaagcacttatttggcaagttttttttctggtctggtttgttgttgcagaaacttgattttgatgctgcaaatcaggattttttttaggaaagtttgtacagctgtggaatcgattttgtggatgtctctaaggttgctatgttctataaatagaacctagagagcaaccaatcggttcaactcttgtagcttttatttttttgcatattttttcttttgtaaagagagagttctttttgtgagaacctagttgttcatctaggttttagcgtttatatttttattcttatactggtcttagggtcgattagaacaacttatttgaataagaaaaatgtcttcgagagaagacttgttcaagccttacttctagaggaagtaagcattcacacatcaaagacgaagggagttcgatgtttgatggtggttctgaaattagattcgtgaagtgtattacaaaggattgcggcaaagatttagagggagtcttttatttaagtcaattatctttgtaattatttgagactttactaattgatttctttctctaagcgtggccccgtggactaggagtgttcgaaaggacaccgataccacgtacaattcccttgtgtcaagtaattttattttctactggttttctaatttctggttctggtttgtttatgcaaatctgtgttctgcagtgatagaattacattttgctgctacaggctgttatagttgtgtttttttattgttattgtgtaaaaatttattggctttggcaaaaacaagatttttcaataaactgttgtatataatcatcaatacaatgctcaatgtaacaactgttgatgctgaaaattagctcaacaacaaatttgtattatgacaatgactttgttaacccataaacttttcctggtgatgtggacatcaatatttgacacgtgacatgaaggatgatgtcacagagttgagtagacccgagtcataacagtcgacctggaggggaccctagccttgtgcccaagttgacttcgggatttctggggtggaagttcagactttaataacttgaatccagctcactatctttcaatattctataccatgaagacatggaacaacctaatttaagctccgagagctaaaattacacgaacctgcaacccagaagccaacctgagcacccagggtttcacccggtgcctaagttaacatatccaactagggttttggtttttgggaccttcttagtgaaaaagagtcaaaacatgcattgggacatcaaatagacataccgcggacatacttgaggcatcaaaattagaattgaaagaagttcatttttgagcacgcggggccccgggccccgagcacccaacacccaggttgataatttgtcaatttgggcgccttccaagtatcagatcggagatccaactttttcatcttctttgtcttcatcaaaaacaaggtatcatgtcctttcaaagaagaaaaaaaatactttctgggtgcgaaaaatagggcccagcgcccaggtctggggctggccttgcgcccatgttgacatttagtcaacatgggccattttaaatggagtttttttagaacacttttgagtatcttatttgtcctcaaaaaatattaagattcaactatttctggcgaccaaataaaatttttgaaggggcgaaattgggatccggtgctcaggttgacacctagggctgggcctagtgcccaagttgatatatcgtcaacctggactatttccgatcaagttcataaaaaagtgttctagtcattttttctttcattagaaataatgaagattcaagaaaactcgggcagaaaaccacaaactcaagcccttggaaacagggccctagcccaggttaacctggtacaagcttagcgcctaggttgacaatcaacgtgagatctgccttcaattgctcaaattctaaatttgatgcgaccattgaatctgaaatggtcaaaaatggggtaggagacctcatccttaagttgagaagcctcgtccttcaattaagaagtcttagaagtatcaaaaatgaaatcccaagagcttgagagtaagtacccagcacccaa

SEQ ID NO: 264039 - DNA, 589 bp, Cannabis indica
agtctttgtaattgtggcttgtcaatgagtcttttaatttcttacatttttttccggtatctcgttgatgggaattaatagcttctaattctttcggagtaggatcatgcaacgagaacaaattttttgtttaagcatcgtagaccaattcaatgtactgtgtttgaaatctgattttagtaggcaacctgttgtacttaattgagtctcataagataaaactaggtaggctatagtgaaaaaaaaaagcaatttgattacagatttctagattctaattgtcgtatgtactttatattaatttagacactgaatattttaataatagtaagcgtagattatacaatttgatttaaaaacatccattcatcaatattatatcccctccatttattagaattatatttattcaaatgttttgtttataatagtattatgtatgctcaatatataaaggaaattaaagaattatatttgttaattaatttgataagcaactttcaagtagaactagggccaaaaaattttccaattacattagcacaaaaggattgagctaatttgtttccaaaagtttgaattattacga

SEQ ID NO: 264040 - DNA, 1461 bp, Cannabis indica
gctagataaggctgctcaacagagactactacaaacaggatgatggctaaaaagtccctatctgacaagacgttcgaatagggacttgtgggcaaatgttattccaaattttgtccacctaaagtggcatgtcaacgtaagccaaagatagagcataggtggagtacagccccgccaatagtagaatagagcctccatgcaagatatagcaaagctgtcaagaagcaaaagaagggagtgaagtgagccctcaaggagttgtaccaacatccttcgctggctatgaggagcatatgggccaggtagggtcagcctataggttgtctagggttagcgtataggtcggccaggatctgtacacaaactgaccggccaggaaatgacttccggaccttaggagcctccgttggaccaagggaacctggccttttcaaggaaacaatgtacaaatttgtccccaacttgcaaaaggctcgcctccacactgaaagattggcctccacttggtgcagctatagtgacatgctaagtactgtaggccttgtcttgccagatcctgtaggccttgtcctgccagatccgataggccttgtcttgcctagtcctggcaggaccatggcctgctaggattgacctagcatgaccatggccggcaagacttccttgtagctctatgggtggctaggattaatttgacaagactctatgtacaacccaaaatgtggacacaaggcatgggctacgaattaggccctgaaaggccaaaaaaatggctaaacaatatctaaactcaagggcactttcgtctattgtaattatctaacaaactatataaatatctaggttttaaacttgtaatctagggtttaggcctcctatataaaggtcttaaccctagcctagagaccagttatacccaaaattcggttgccatctcaatggaggacccacgtcaagataaagggaatgcgaatcgatgcaattacttcttatggaataactcattaattacgtgagtatcagagtatatttgtaacccgctgactgtaaggtcttaggcgaggaatcaatgtacaaactgacacttagtatattaatgagaaaccatatgtcactgaatacgaatagcgagacatcaagaatagaacacatttgaaggtggaagcgacatatatcaattgcgaaagtccttagaatacaaactaagtacaacggtcgttccggctcaaaaccaagcgaggtgcccgtctctctatgggaagatttcttatagattcatctagttagggttagcgaggcctaaaatcttggcgagcctcaagataacattcaaatgagcctcgaagaactctttaagaaccgtggtcgttacaagacatgcatcaacgaccccagaagaaaaatgggcccaactcactattgaaattactagaaccaagcttctgtcgagacatctccaga

SEQ ID NO: 264041 - DNA, 584 bp, Cannabis indica
aaatcctgataaaataatccctaacaactagcctcagggccatggtaataagttactttcattaaatatggatttaaaacgatgtttgtgttgatttggatgtgttcatgttagtttatgtgcatatttaataattttatggaaattgcaatttacgttgataaatattttctgtttcgttctgaaaatattttttcttgaaagtacatgaaaaattaataaatttaggctttatagaactcaatttggattttttttataaattagttatgattttttaaagtttgaaaaacaaaatatcttagggatgcacatccgcgcgcgcatggggacacgactgagtgtcacgtgcagctcgctcagaaaaaaccccttcagacaagagcgtgtccgaagcttgccccccacacggcgagcttcctcacccaaataggctacattgcatacccctgtgcccaattttgtttttgtgataacttttgattcaaaaatcatttttcattgaaaaaaaattcaaattttggtagaattttatgtataatcaaaattttcagttaaaaatctaattattagaataaattaat

SEQ ID NO: 264042 - DNA, 1819 bp, Cannabis indica
caatacaatacgacctaataacgcgttccaaatgagcccatatataatttggatggagaactaagaaggatacataatattatataatagatatattagagagaacaaagagtaataaggtagttgttaaaattactattatatatttttatagtataaatatttgttattttttagaaggttaatttcgatatttagtatagttattttgtgtttttttcttaaatcctttgaaaaatagagagatcgaaatttttaaaatttggagagagaatgtctccctcaaactcttctctaccttcatttctccctccaactaaataacaatgaattttatctctcccttcaattgtctccctctccacccctctttccttcataccgaacatagtgaaagacttcaaaggtcaaaggttcgaatcagggtggctccgtcctttgagtatcagccttgccacattttgcaatgtctcgctagttaagccaaatgattgcacctttgatcattgtagataaagacgatctgttgagtaaagtattagcgaacatcaattctaatttaagaagaattagagttgtcatcttcctttttctgtaaacacttaaaaaaactcttttgaagtcattttttcatgtccaacaaaaatagtgctagacataaaaaagttttgggagatttcatttacagcattgatggacatgaaaaaaaaattcatcatgtctaacgatactagacatgaaaagttgaagggggcgtgataaataattactattattttttattttttttttaaattatgcaattttcatgtcaagcatgtagtgttagtgttagagtttatgtaacatcctattagtttaggcgtgttatcgtgattttatactaattgtacattccgttgctaatcaatagatttgttgaaaaacgtgattaattaaaattttacttaattaacatttaaatgaaaacaaataacttttacatagatcccgtatttaatccttaattaaatatcaactagaaggaaagcataacataaagagtatctgaatatctctaagaagtatttttggaaaggcaattaaagaggcgtccagaaattaaggctgatatgtcactccattaatactgaatccctcgatattaggacattatccctacgttagaccctgaaattgtattaatacgctcattttccaatatccataactttggcaaaattatgtgcgaagacagcgcacacatgccacctattattatcaggtggtctccacgcgtacagacggacgttgcttcatgggcagagcttcaccaaatgggtccaatatcaatatattacttgtatttacctcattagtaggtcatgtttaattgcaaaccctagcaggtttaagtatagtcatacttaactgtagtgtataaatgtaacgtgatacgttcatgtaaggggggttgatttttctaaaagctaaggaaaaaagttaagattcataaacgagacaagaacacttgtataatactcaaaggcttctttagctaaataatattaaattgtggactaagatttgttaacacccaaactacgtaaaagttattatcttggttttgaaaaaccttggtaaacaacatatttaaaaaagaaggaagggcgaatcacatgtgatatattagtctctctctcatattattattatttcttaaaaaaaatactccctctctctcatatataaacataaacaaaccctaatatatctcattttctctctcattcatttacagtcactactttcagcccttaaaataaataaaaaaaataag

SEQ ID NO: 264043 - DNA, 595 bp, Cannabis indica
tcatctgagaaaattatcgtaagagaactagaataaacataaggtttagtgtttgttcgcttaagtacattgtcaaataaagtatattattatataattaatatattgtaatacatggaggatgatactcgccatataataaggacatatcgccataattcatatgtttgttatatagcaaggataatcgttgggttttaagtggtaaatttatttaaatactaacaaagtaggagaatatggtaacaaattatatattttatttgatttgatttataaaatataattaattatttactagtgaattaaaatattataattatagtcaaatttaattaccaaatatttcaattattcaatttaattttctgaattaattgttaaaatattctgacaattaatctagtagagactttgataaaatgtctcacctatataaatatagagtctcggtccccgagctcactacttattttgtgaaaacagtaaattcaaaaagagtaaagagagcttgaaaacccaattacctacactaatcagtttccttttcttttgcatatccaaagctcgcatgtggattgaagctcaaaaaaaa

SEQ ID NO: 264044 - DNA, 726 bp, Cannabis indica
acccaatatcatgttagcttcccaagggggaaaaatatcccgaataatatcaacatcccaagtacgagaatccatagaaaacagagagctcacagtgtttgagataagacccggatgagttgagtaaacaaacctattgtcagtgcttggtagccatggatgagtgagaatattagtagatgcccccttaccgatagtgcgaatggctcccttcttcaccaaatgttgagctccccaaatgctacgccaaacaaagcttggattattaccaagttccgctgataggaagtcagaatgtgggaaatatttggctttgaagattcgacccaccaaagtatctagattacaaagcatgcgccatccttgttttgctagcatggcatgattgaagtcatggagatggcgatatcccataccaccatcatctttggaagccgccagacgattccatgacatccatatgattctatttcctttacttgaagaggtcttccaccaaaagctagccattaacttctcgagctcctcgcaattaccaataggaatgaggaatacactcatagcataagtaggtagcgactgaattactgttttgagaagaatctctttgccagctcttgaaagaaatttgccttcccaactattcatacgagccatgaccttgttctttaggaaaccaaaaataacagatttgttccttccaatgatgttaggcaaacctaaata

SEQ ID NO: 264045 - DNA, 3571 bp, Cannabis indica
taacaaacatgttagaatgaatagtgtgtgtgagggaacacctattgggtctctgaagtgcatttaaatgccagcctttagatgacattatatcatttacttcaaatatgtccaaaacatcagatccaagtgcaacaattgtcatgtctggccttccgacgataaacaactctggaatttcttttatcctgcaatgataaaataaagtaagttgcatctttcccacccttcaaagaaaagtgaaaacacgtacccttctgaattctcttcgatacatccatgatttgtcttgtgttctgtaagtaccctgtgaatattaaaatggcacaggattacaagggaacccacttttcaagtaaataacaaaaacatacattgatgttgcattaggaaatcataaatatgatacataagagtttctcaccttcttcgcccagagacatcatggctgcccaagctccagctattaaaccacccggcctactaccagctatggttggagacacatagaggccgcctgaccactcagttactgaaaaatgaagtgtaaacatgacagactgagcatatatcaaattacataagctgacccaagaaatcaaagaaagaaattcttgtcattggccttcagatctagaatattagaaaaactcaggaattgcttctagttccacaaaatgcaggctgcagcccccgtcaaatgtattattcattcaaatcggtttttgtttttgctgagaataatttaccgaattcaactccattcttacagagtgtattttagttactgtatactggaacaattaggaaaaaaatgggcctggttcggcaattttaaatatagctggcagcattataatacaatggacatatggcaaatgataagttcaatctgctgagctatgattgaacaagtcaaacatatggcttctccatttactgttctcaaattattccctactttatatgtgacaatatttagagtgaagaggactaaaaggaagtcacaaacaataaatttttaatagatcaaagcaacttacccgcaacaaattgatgctgctcataagtagaaaccccagtgaagccaacattcccagcaaccaagatgccatgaatagaaaaaggacattagaatctatttataaaaaacaacaaacaaggaaaactaaaagcaacataagtgttattcaatttcaattctgatacattaagagtgacacaacaccagcctccaattcatcatccacaaattttaatagaaaattcgaaagggggggataggatacctttctaatatcatgatttctatacagaaccacactagttcccttaggagccaacccatacttgtgcacatcaactgatgctgaggtcactcctttgatggaaaaatcaaaaggggggataggatacctggaaaagagaaagctatcaccatcagctctaatgaggagaatttccaacagatgctacaaaataaaattataacaacagtacatgttgattctgaaagcttgttgctaggatatatggtagacatgcaggtatcaccaagagacaacaatgaaaaaattccctacaaagctagctatgaaaaaaaatgactttaggtaacgagaaaatttaatctaccaagaaaatttacaactagagtcagccaattaaagatatagcatttgtaccctagtctacgtgcaaaaggcaatacaaatccaccaagacagaggtccacgtgtagacatatcccatagctagaagctaattcaccaagttcctgcaaaattatttccagattttcttaattgatattgtatttaaagaaaaataactatcccccataaatgcaaaacgacattgtcactcacctcaatagggtcaatgattccatgaggaaaaccaggtgcagatccaacaatctgcagaataaaagaattagctctagctctagctcaactgatgaacacaatagtagatgggaaatcatctacactaatgactacacaagacacccatggttccttatcgttctttttctgttattttttttctcaatagggaaagaatgcacaaaagtaaggaaaaataaatgaagtaagataaagagaagcctgaattctcaatgcataccaaaacggtgtttctattgatatatcttttaattgctttgacatctgcttgaaactctttatttacagggacacgccacaacttgatgttgaaatattgtgcagccttgtcatatgctgaatgtgcagattcaggtattatcctgagcttgggaaaaaaaatcatgtaaaaaattcaagcaaaaatggaagtttaaaaaatgattgtagacatacatttcaggtgatgatattcctttcttagctttcatatagtcacgtgatgatttcactgctaaaatgatactctcagttccccctgaagtcatgtttccacatatttgccctccagaagatttttctttactgccaagaaatgcagcagtcatggcaaccacttctgcttcaaaccttacaacactttggaatacatccaaatgtaatggatttgtatgtgaaaacctgaatgaaacatgaacaagttcagacaaaaggaaaacatgtacatggatgagagaagctgtcctaaaagctggcaatattgttgcgaagatagcaaaagcaccgctggtgcactttattggctcattaattctccagaaacaacacaacaatttgccaatacacagcatgatttctatttgattccaaacgttttgaattagaaaaatgcaagtccaaattgacatctctaaaccccttatattttttgaataagaaccaataacaaatgaacctattttaaatgtcaattttctatacagtatctagatgtatctttttccctcgactcctaagtatatccagtagacttaacaaaattccacctaaacgaatctcatcaatagccgggggaaaatcaaatgagctgaatggaaaagcatgtaacaatattagaatattcaaaggaatagtttatataatggatgcgctaggtttactaacattgagcatgcctcattaatcagagaaaagtgtccttcacattcacttccaccaatatagctgaaaacagcaaaaaaaaatgttgatgatcacagcagcaaaagacgtaatatatttcaaaatatttgcaagtaaaaagttcgcaaacaattacggaacatacactgtaccagagcattttccttgccaagctacatcttttcttttctcatctttcataatgtctatgactcctgctcccatccccacacttggcaattcagtcctccaaccttgtcttttagatttgccacccgaatttaatttatctacaacctgttctttcatcaagggcaaattccagaaaattaatgcaatcttgtttagaaaaatgattaaatcaaactaactgaaagtctgaaagaatatatgtacacaaaattataaaatgtaaataaattaaccctttgattgatttaggcaaagtaattggaattcacagagcagcttaccagcaacaaaaacaaaataataataat

SEQ ID NO: 264046 - DNA, 1148 bp, Cannabis indica
atttataatataataaataatatttataaatatattaatatgtataaaattatttaaataaattagataacaaaagtcatacctattttagtaattatatatttaacacctatttaatcatttagcttaccaatcacttatatacaaaattttcaactcacaggtgttttaaaattatatttaccaaacactcagtaattttttctcacagcatagctacaactgctttttctcacagcatagctacaactgcttttttccacagcacagcttccacgttcgaaattacatgtcgaattttttttttttcaaattttttttattagcggtattggttatagttacagtatcatccctgtaaatttttaaaaaattccgaattactgaaaacagagttcgcgctattccagtttaccacgcgcgttcaaaaaattttaaacgtattttcggcactgtaaactattcaaaaattttcaaaaacttacagggatgatgttgtaagcataacaaacacttcgtgaaaaaaaaaatattctgatatgtatttttaagagtgaagattgactaagaggttgtaacagaatattgacggtagcaatcttcttttttcttttagaaaaactacatccaaatttttgttttggtcatatttatgtcaaaattaattatacagtggcatgtgcaacatagtatgaaaaaaaagtatccctccctcaacaaaagacaaaataaaaataaaattaatattatggtatatttctcacttcgggaaatgtaattgtaagcattgacccttaacactttgtgacttttcaaataacattaaataaaaaattcttgttagtgagttatatgtgtagtacctaccaagattagacatcccataacttaacatatatttgaaaattctggacagttcctctgaagaagagtgcgatctagagttcgcagattagtgccgtcgatgttgctattgtcgtcgtcgccgtccatcggcgtttcagtccgtccttgtctcctccattcaagtgacggttccacccctcacctccagatgccgtttgctgccatcagacggaacccaacattaaatttctttgtcttctcgctcacaggtaaacttctaatccgccattagtattgcgttt

SEQ ID NO: 264047 - DNA, 777 bp, Cannabis indica
aatcacgtaatacgcctatgctagttagggtgttacagtgctcctgcagtgccttttccagaaattccagtggcacctgcccctgttgtccaggccgaacctatagttgcagtgaatcggatggaacctttgtatgaaagattccgtaagcaggcaccttcggtttttctgggagatccggatgttatgaaagccgagcagtggctgacagtgatcaccaagatattgaatttcatgggcgtcaccgggaatgatagggtggtctgtgccacttttcagttccaagaagacgcgttagtgtggtgggacatggtgtccatgaacacgatgtcacagcaatgacctgggaaaagttccaggaacttttcaatgccaagtactacaatgaggccgtcagaagtgccaagagaaaagagttcacccacctgacccagaaagaaaatatgagcgttactgagtacacaacgcagtttgatcgattggcgaggttggcctcgggaattgtgccaaccgattttagtaaaaaggcaaaaaatacttagatgggctgagtgcgaagattcgacatgacctaatgattactaccgatgacaaaaccacctatactgaaatggtggaaaaggcactgcgagttgagggcgcagttgggtgcatgactgagtctgctagggctccagtggttggcggggctcctacccctcctgcatcaggcttcagcaggggaggtagtggttcggccatggatcagaaaaggaaggcatccactgcaaccggtgg

SEQ ID NO: 264048 - DNA, 604 bp, Cannabis indica
tctaaactagtccagtattcttccaacataatttatcttacgttgtcatgacatttctaacaactccgccaagcttccacggtcgctaggcccaaaaacattttatttcagaaatggtatccatgatacccacatattccaaaataatcttcgtaattaataaattacgctttatttaatgatttaaataaattcaccctaattacactaagtaagatcataatcttactccattaccaaaataattacatatttaataaaatatgtccagttaaatactgtattaatttctgggacattaaaactatcccctccttatagaaatttcgtcctcaaaatttacctgaaaatcttaggatactgctcccgcatctgcgattctaactcccaagtcgcttcttcaattttgatgtttcgccacagcactttaactagcagaatagtcttgttccgcaatgccttttcctttctgtccagaatttgtaatggttgttcttcatatgataagtcggtttgaagtttgatatcttcataactcaatacatgagttgtaacagatacatatttctgaagcatcgagacatggaatacgttatgaacccca

SEQ ID NO: 264049 - DNA, 610 bp, Cannabis indica
tctaggtaaccttcaaaattgagggttcccataccaatgacttttccagctaagccattaccaaaagtgacttctccacactgcataggccgaacgttagtcaaaaaatccttgtcacctgtcatatgtctagagcaaccactgtcaaaataccacatttgagatgcaacacttttattagaaaaaccagctaaataatttttcttaacccatatttgtttcaaacctttatgtgtcttttgagatttttccaaattaccaaaataatttgttttaaacatatttttcaacgtgaaacatttaggtctgatgtgtccttttctaccacaaaaatgacaagtaggaacaaatctttttacctctgatcttactctttttgtaaatcctggagattttgcagcagtagaaaccgcttctgctacgataagttgtgaaactgttgttgcagacttcccatttgcagcatcaggaagattcgtcggaacactagattttataaactttgtgattccacaactttccataccattcgatccaatgcctgcaaaacctctttgacctgcattctgagctttttcaaaaatagaggatccagggttaagcatttgaa

SEQ ID NO: 264050 - DNA, 970 bp, Cannabis indica
gggcacatggtcaccgattgtggcatttggtaagctcgtcgacgacacctaatctgacagaagactacctcgacccaccccacggaacctgattggtctcccaaattgttgtcgtcgtggatctctctattgtcgcgaagttatccatgtcgtcgagtagtcatctattgcaaaattttcattagggttagagaagatggtaactctatggcagctagattttgtgggagaagatgaagaggcaggagagacatgatggagagattagagttttttaatttatttaatttttcaaaaaaaaaaaaagtaacgacacataacaatgggaaatgaattttaaaatatttgtttataatttttaaataattataataggtgtaccaatataaatgtgtcacgtgtataagaatgtatacataagtttttgacttttggtatatatgactacgttaactaatttttgagtgatctatcattggtacgtaggtaaattaagaatttaataaagttatgtggaggacaccttaaaaatacaaataaaataatattttaaaaaattttccactaaaatattaggttgaaagattaatttcaaataaatttagaatttatgaaatttaacggcaaagtactctaatggtgtaatggtgcgtaaatcaaatttcggccgagacacaatctcttctgttgtaataactaataaaaaagaaaaagggtggcccatttatgaaacaacgtatctctttcaaccgtcgatcttccacttgattacccaaaaccaacgggcttgggcgtgccatgtcatcaatccagacctttatgtatccgccaatcaaaagctttcaacgaccagtatataaacaaaatcaacttcctgtaaatttcatcactctcaaattttccctcacttttcctctgaagattgtctttcattttccctgaaaaagatctgatggcgccaagagcagag

SEQ ID NO: 264051 - DNA, 597 bp, Cannabis indica
ataaaaataaaatataaaaagttaaaatatgaatttaagttcgtataaaaaaaacaagctagtttgagtatatatgatacgaatcagaacatgatacgattcatattttttttgtagcacgacatgatataatttatttattttataacacgacacgatacgatataattcatattttttttataacacgtcacaacacggctcatatttacacccgaacaaatattttacatcactatttgtgggccccaacgagaagggagtggttcggtggatttaggtgtaggaaaatgatccaggtggccgccattgatgaatagtgaatgattacaaaaaagctatattttaggtgggaatgcattaatcaaagttgctatcatttaaaattttctttgatgtaataaagcttaacgagctaatataattaattaatgcgttacacagtcacaattttactgtcccctacgcaaactcccaaaaatacaaaaacaaaatacactataacctctatttaagaatactctattcaagaataacctctaatttgttataaaaaaatcaagtcccgatttgggccaattataaataagaataacc

SEQ ID NO: 264052 - DNA, 1154 bp, Cannabis indica
gttgttattggcttgggtttgactatttttgtatcggttaccatagttgttctcctatatatgatgagagaaaaatagagacaagccaaagctactgcaacatatgatgatcaaagagcttgaaagactgagcaaactctgtcatgacaacttggaaaggctacaaaatctagttatttttcatacctcattgttatacccaaaattcggctaccatctcagtgggagacatgtgttttaggataaaaggaatatagatcgatgcaatcactttttatggaagaactcattaattacgtaagtatcatagtatatttgtaacttactgactgtaaggtcttatgcaaggaataaatatagaaactgttgcttagtatattagcgagaaaccatatgtcgttgaatgcgaatagtgaggcatcaagtacattacatctaggaagacaaaagcgacacatgtcaactacgaaagcccttagtgtataatgtacaaactaagtgaaacagtcgggtcggctcgagacctagtaagcgaggtgtttatctcgctatgggaaggcttcttgtaacttcactcagttaacttcagtaaggtttacaatcttgacgagtcagaagctaacgttcaaatgagctttgaagaactctttataaataagaaccgttattatcacaggacgtgcatcatcgacctcggaagaaaaaatggccccaactcgctattatgatacttaggaccaagcttgtgttgacacatccctagatacaacgattaaagacgtgtttaaatacacgatcatttttacccgataaaagagtgaaaatcacaactatatgattttcaaatcataactgcatttacactacgtgatgtgtaattaaaccccatgattttaggggattattgttgtaaacagattacagttaactttgtaattaactgcccactatgtagttataaatagtgcaagcaagatcaataaagggacagaaaaactcatacaaaagaggccctgacaaaacaatcaaaaatctgaataagattgactcatggactatgcagaattttaactgcaaaaccacgtaaaaaacccctgtgtgttcatacttttattttacagcttattattttttctgtgtgagattgtcacggt

SEQ ID NO: 264053 - DNA, 2575 bp, Cannabis indica
gacctctgacgtgtatatatatataaaatatatatttatatatcacaattcttgacattctacttaattcttacaatatatatgcaaaagcaataactatgaaaatgaaaacaatatatagcatataagaatttctgcaccttacatttaaataattgaactgaactaactctaataattctatgcctaattttagtacgagataaaaaaaaaaaaatcattaagtcttttataacaatcttttaatcacaatataaaagttatttttcggtctcaaaacaatacttcttatatcaaaagtcctttatatattagtaaaacacaaaagttgcttttaactataaagtaatattttgttactcccccgtttcaagctttcattaataggctttccctcacagactaatgactcttatacacgagtacataattctgactgctttttgaagtaaaaactggccctacagacaagtattttcagcgtgctttttcctcactcgcacattttatgggaaaattttgcaggaggtcaccaatcttgtatatcctaggtcaagcaagcttaaatgtggagttcttttgttgatataggcagtatcaattaatccatttaagttatctttaactgtatagtctcatacctatacagtttcaaaattatcacacttgatcttcttcaaataatgtgaaattgcagaacttacctaacatttcccccttatagatcacgaaactatactaactgtcacatattaatttagacacatctatatccataaattatcctatgactaataagttatcactaaacacaataattcttctacaaataattatgtgatttgggaatactagttttgtaagatgttagacagatacttgtccgcgatttttgagtactccttaacaatttatcattgatttatagtaaaatgacttttacaaaaaaaaaaaacaagaaagttatcactaagcacaagattagcacttttctaattgtaagtgcatgctaattacaatattaatactatatataattaagaatattattatataaggatttcacatatacaatatttccaaaaattttagggtttggcattggaaaagtgacaagtccaataaccctaaacataaaaaatacaacaccaaaatggagtatagtaagtgaactacattacatgcccaacttctttggtcgaatctagactaaatgaaaaggaatgaaaacttttacatgatatattaagtaatgttagtttggtaaagtcaaatttatatacatatatgcatatatatacacttctcacacaccaacaaatcacaaaaacaagtactatatatactttcttacccaactctcccaaagtacttaaaaaaaattacttgtactaggaaaaaagcaatagagattgcctctaggcatggagagagctaagatcatatgtaccaaagttataaatatatttatatatttaatcaaatggatctagagagaatgtcatgagatatatattgagtctatatagatatatttatatatagatatgatcacctcaagagggttttagaagaaagatgatgaagaagaagagttagatatatatatatatatttatatgtataatgtcacatggccatttttgtcatttgtgccctactgacaagatgagagagagtttagagagagagtggggtcttattgagtgagtacttggagaaattagtccaaatatagggtttagtggggtcttttgtaataaagtgaaaataaatgaaagtctcaaatagttaagtactcatcattcatatatatactctctttcaaaagattgtaaaaataaaaaaaaaataaaattatttatgtaaaattatggtttttatactatcgcagtcgcaagatgtgttggtaaaagtaatttttgtcagggcattatactattacactgaaaaaagtcacttttttttacacaacttgttatgatagcgcaaatatgagttgcgctaacttgtaaaaatatgtttgtaaaattataaccgttacagtgcagtttgcaatacgttagctaaaagtgatatttctttcacatagtaataataaataaataaatattcaaataataaacaatctttttggttaattgttaacattgtagaaaggctctcactaaatataaaagtaataactagcttttttttttttgaaaactagcttttaataaaacatcattttaactatatatataaatatattaattggctttggaattaggtgaaaattcactttaaaacacatacgtacatgaactaataactaacataataattcaatacaaaacctataagattatataattaggtgagtaattaattatctatatatgattttaaataataataaaacctagacattataacacaaaacgaagtgacatatttatgtgtattattaatgtgtgagattttgattgaaattggtacatttatcaaaggtatcttaagtttattatttttattatataaatttattaaacttaataataatataataataataatatagagttgagggggc

SEQ ID NO: 264054 - DNA, 602 bp, Cannabis indica
gtctcagttcggtctgggtacgtgaccgtgtttgggcctgagtttaagtctcaatttgggtctgaggttaggtctctgtttggttctaggttcgggtcctggtcacggtcctagtcttattctagggtcctggttcggtgattcttgttcaagttctaattttgggtcccaattctaagtctgggttcgggttgggttcttcgtctgggttctggtcctagtctgagtcactatcacgggtataggtctggtttcgattcaggtccccggtcccatttctgagtttgggttcgggatctagactagggtgtggttctaggtccagatgctggttttgtgtccctagtctagttccatgtttgggtctgagttcaggtttgtgttcggatcccgagtgtaggtttggtttgggatccgggtccggctcccaattcgggtctaggtcttatttggagtccaggtgctggtccggttacggttctggatcatggtccaatttcagttattattccaaatccaagtcctagttccagtcccggtcaacttctggttttggttctaattttgggtcacagggcacgggttcgggtccacttttgggt

SEQ ID NO: 264055 - DNA, 976 bp, Cannabis indica
aaaaagaaaaattatgtatatattttatataaagaaatttaaatttaaaatatcataaatatttttaattttaattattattttttgtaaaatttgagaacaaaaaatattgatatcaaatttacgaattcggtctatatatagacacatttaaaattggttatgtgagttttggttaagaatatagtaaattacaatatataccttatcatatacgttacctgtaattaagttttttttaaaaaaaaaatatgtatatataatcacatttaaatgacacactaatgtagcaatagctaaattttttttaaagattaaaatcttaaatttcaacttcaaaataaaaaaaaaatacattacctaattaaaaaaaaattaaatatacatgtattacacttaaatcacttaattgaacctaattaaaaaaaaaactaattatacgtgcattgcacgtaacattaacttaatatatataaatatatatatacatacacctaagcgtctgctcaccttccctcggcgatacaataaataaaaattaatatattttttatatttattatttattattttatttattttaatttattagttgagacataaaataataataataataatttattttattctgttattatatgaaaaaaaaatatatttttctaataaatattaaataatttaatattaaaaaataattaattgaaaataattaatttgattggatttttttgacaattaatttaattagatttgatgaacacttccattgctgctaaaatagctcaaaaacttgtcacgcatggtcggccagtcccacttatcatgcgcatataccgaatagtccaagctacgagcgatgtaattgacacgtgtgaagattttatagatattaaggccatatttagctgccaaaattaattcatttttacttttttttttttttatttttatttattttttactttcctacctt

SEQ ID NO: 264056 - DNA, 709 bp, Cannabis indica
gcggcttacgatgtcacttaagcaaactcagtctagtgtaccaagcatacggtatggactacacaatcaaatcttatactatgccaatgagttttaaacattttattgcgcttctctacaattgcacatggtagttttctttctaccatctctgaacttaattcgaagcaaccatcaatgtctcctccctaggatgtctagtattcccacaaagaaaaacaatacagtctcaactccatcttgatttactaatccactttagaagactaactagctcaacgacatcttgttccagcattcggaccatctcgatccttccatgcgcttacatcccctctaggataggccaactaggttcacctcccactgagatgaacttaattggctctgataccaactgtcacaggttcaccttttcaggcaacggaacacccgtgcggcaccttcacttctctaaacaattgtcagccttccaactatccgagtaacaatgggctcattttttgagtgatcgtgtgcctcatgcacacttttgtctcttgactaactcctgtcgagtcatgctcgcgagcatccatgagtgcatccgtgcatcgagactctctagccaagatactcgcactatccataggtcccactatgataaggcaaatcctaacattgtcgcttacctagtcactcgtgaccaaggtagcatgtgtgacaagat

SEQ ID NO: 264057 - DNA, 1043 bp, Cannabis indica
tcttcccaataataatgtttcacctcagaaaagaacttcttcaattgttgacgagaaagctcaggaggagttattttcgcagccaagaagttgacataatcagcataccaaggtaccatcagcttttccctcacattaaagagttgttcaccaggaaattgctcatttatctgtaactctttcgtattctggctctcttctagctctagtcttgacagatgatctgccactaggttttcattgccttttttgtcctttatctctaagtcaaattcttgaagtagaagtacccaccgaatcaatcttggctttgcatccttcttgatcataaggtatttaatcgctgagtgatctgtatagacaataaccttattcccagttagatagggtcagaacttatcacaagcagacacaattgccagcatctctttctctgtagtggcataatttagttgagcatcattcaggattctactagcatagtagattgtgtgaaataccctgtcaaccctttgacccaagaccgatcggattgcataatcacttgctcgcacatcaactcgaagggcaactcccaattcggtgaagtgactattggtgctgaaatcaatttttcttttagaacctggaatgccttcaaacaatcttctccaaactcaaacggaatgccattaacaagtaaactggacaatggtttggagatctttgagaagtccttaataatatttggtagaaaccagcatgtcccaagaaactccttactccttttacagaaactggaggtggcaaattctctattgttgaaactttagctttgtccacctcaatccctgcttttgaaattttgtgtcccagaacaattccttctgttaccataaagtggcacttctcccaatttatcaccaagttagacttctcgcatctgattagcaccttttccaaattctctaagcaatgattgaaggatgagccaaagaccgagaaatcatccataaagatctcaatacaggattcaattaagtccgaaaagatagccatcatac

SEQ ID NO: 264058 - DNA, 817 bp, Cannabis indica
aatgattagccagaaccctctcaccgaaacgaggatgagaggtaaccgaaaactgatgaacgagaaatttctcatgacaatgaggaggagcttgggactcaacctgaagaacgtacatcacctacgagaaatcaccagcattattcccgaatccatagagtgaggactcgtacagaccctaatggggggaaatacgacaaaccacactcaggggggaaagaacagagcatgaagaagcaagtgtaaccttgaggcggtcaaggacccacagtcgatcaactagaagaggataaagtactcaacgagctaatgatcgagaaagtatgggaaccagtaaattcgcgaatcactcaaagacgaagtccattagtaggacgaagtctatgagtaggaagcgatctatgagtaagatgaggtctatcagcaattactcccaatcggatttgcgagagcacttgaatcaaaagaaacctgatattttccaacagcttggtccaaagcaagaggatcccatccaatttcgaataaatgagctggaggataagttcagcagatatcaagtgggggaactagggagacaatctggatacgactcagacgaggagcttgagccgtatcatccagatatcatgagtacctcttttccttcgggattcaaaaacccacttgtctcatcatatgacggaaccactaatctggtcttgcatttgaacaactttaatacgataatgcgagtgagtaatgtgacaaacaattacgctgtattttgctccccacctcgcttgttggagcaacaagcagctggtttaacaagttt

SEQ ID NO: 264059 - DNA, 651 bp, Cannabis indica
ataaagaatgaatagtatcacatgagaatgtgaaagaaaaaattacaatagccttttaatcacttttcatgaatctcaagagcctaataaattaaaaaaaaatctcaatcaaataatttatgctaatgaacaaatcatgaataattcgaagtcatcaataatagcaaaaataataaaaaaaaaaattatgtctccaaataattatggagaaattttaataagtgagagaaagattaagaatctatctatttatatttatatatatataaataaaaaaagaaagaaatagagtgaatattggcaataccacttagaaattaaggtcttaatgctatctagtgaacattaaaaatattatcgttctatataaaaacaatgaaatttgataggtaaatacgataaatggaacattaccataggatgttctctccactttataatgctaatcctttgatcaaattataaataaaaatcaattaaagcataagaaaacaccatcatcattgtcatcataaataataaatcagatccaatactaatgtaacagacatttagtatacaaaaaatacatataggtttaaatttatataaaatatcattcaaatataaaaagaaggtacctggtgtcaaatcgtaactttcaaaaaaata

SEQ ID NO: 264060 - DNA, 764 bp, Cannabis indica
aaaccattataggtactctcgtcctatatcgaaattcagttctattttaactatagcataattgataactcacttctcagatactcgcaatcaaaatcatagacagataattggtgaatcagaattaaaagtagttaagtacgaatgaaatagaatacatagaagtgggggaaaattaatcatattaataccataaagcaatatcaaacaatatccatctaaccctaattaagtgtttagctacacatgttcatggaagcaaaattacacatattaacttaagaaaatagaagaaattagagaagaaaagaatgttgaaaatcctctaaaagaatgcctccagtattgactttggtctctgaaattcgtgctctatattctgctgtttatttccctctgaattgcttggccaaaactattgaagtctccttcttttatagccaaaaatgataaaataagataaaaatccctaaagaaaaaacctattctccataggattagaaaacctattctgcttagattagaagaggatgtgagttttttgctgtgttgactgatagtattttagccataactctcgcgatattactcggaattggacaattcaagatgttccagaaagataaaagagagatctagaactttcatgttttgactttttccaaaatctaattagaaaatagtcgaattcaggattgaattttcagctttattttcttgcacaattttttttctattttcaatatcatctttttgtgagatat

SEQ ID NO: 264061 - DNA, 1242 bp, Cannabis indica
tcgtatcagcataattagtgcgatggaacaaagtcaagcactcatttttctcattctttgagaactttttgtacttttccttaatggcagcaagaaaatcctttgcattttcaatctgaggaatactatcacgaatggactcatccatgtgatacctcataagcatcaaacaacagcgattggaatgctcccaatcctcataggatttcttatccttttcagtggcatcatcagcaggtttaggaggtgcatccattctcaaggccaaatccactctcataagagtcaaattcaacatgagagattctacccactgtttgtggttggttccattcagtgtcaacatggcagaggttcttggaatgcttaaagctgaatgagaaacaagagcaataaccattaaatgcatgttataacaaaatcatgtcatttgtgctctttttctcataaataaatgatcgcaaaataacaaatgatcatcatgtatgctagagttcttagacaaattaataaagtagaactcatacacaggtaagaacaatctattaaatattataatcaaatacattaatttactatcgaaaggatagataaattgtgattcataatatttaataaattttcttcaccatattaagcatccttagcaagcaattattatcgataggataattaattacttataaggatcttaatcttatatgggaggaagatacaatatttaaatgttcttcattaccaaacaatttttcatgcttaatcttacggtaagcaagaaaataagcattaattgttgaaataaatcacaaaatttatgtcacaatactaaaattattaaccaaatatgaataaaattcatgcaattagtattgtgtataccacaaaataatagagaattaaaaaacatgaaaatggtggaaaaattgcctaaaaccacccctgcacgcgcccccatgcgcccaatttcctttttttttaagtctgacgtgcgacgtgtcgttttcgaaaaacgacatgtcgttttgtgaaacgacatccagcagggtcataaaacgacccgtcgtttttctctgcaaaatgggcagtctccgtgcgtacgacatgtcgttttttggaaacgacatgtcatttttctgaacgacatcccagcgtaccagtaaaatgacacgtcgtttttggtcggagggggctgatccaaacgacgtacgacatgtcgtttttgcccgacagtggcaaacgaca

SEQ ID NO: 264062 - DNA, 549 bp, Cannabis indica
acgcttatttatccacttataaggtttttagggtcgccgaacctgaaaatatttttattcatcatatagttcatattacattcacacatgctatataaatctccgtaatttataaattatgcttatttactcaataacaaatttatattttatactgaaatagtttagtaagatcataatcccacatattacctaattaacccatagtataaatataaaccttaattatttaccattacgcttatcgggatattacacacatattcttaaaattatcactatgctacttttcccaacatactttataatagcctaggcaggtaatctaatagaaaataatataaatacttattataccatgtgttaacatgtcctcccagcaaatgtacatatttgaccaatcttcaggagctttaaaaccatggctgctctgataccaagttgtaatgccctaatctatagggacgccacagatgtgattttataaactagtttgatactaatagactaactatttattaaaaaccatgataatattaaaaacttgac

SEQ ID NO: 264063 - DNA, 1298 bp, Cannabis indica
aagtggcgaataatggtgattatgatctcattcgataaaattcaattgacttttagctccttcacgttgagttgatgcctattgaccagacttatatataaaagatcaactcagatgtgcaattcttgaatcctaaaaatattgagagaaacaattcgcttaaatgaataatgattcttagtattgtagttaatgatatattattttctttctcctaatatatttagtggcctaaatattccactacaaatgaagatgcatcttaattctaaatattatgataaatgccattaatcaataacatttgttagctgggtatgtcttgaaaatttgtcactagctttttggaggttttgatgtccttaaacctcggatccgttaaatcaaaaccataatcattatttgtcatcaaaactataattagtgtcccaaactattattaataattaataatatgtccattcaaaggtggtaaacagataaagtctcacctttgttatgcatcgcttttttactactaagcttagctaggctcctgtttattatgccaattgattagatgttacatgaaaatgtgactatactatgctgactcagtcaaaccctaaaaagataaaaagacaataataatattataacattattatatataactctgtgtgtggatttaacctaatttcaatagagattaattattgtataaacacacatattatgacagatatagagctagaaatatgtgtatctcctgctagaacggtccattttgagttttgaaaatacgggtcattttgtaccgggtcattaaaaaaatatggatccttatattatatgtcataaaaaatataagttgtgtggtgatattgctatactataataattttataagggacttacgtagttctgaatgatccacgagtccaataatttagtctgatgcttaaatttgtatcgtactttatttgggtcaattgtttattttaaataaactaactcattttttttatactggtttaaattcatactctataattttgtatatttattgtaactgatgagcttgatgagcttgttattaaaatatatgtgtattttataatttaaattacttttacacatattttttcaacaatagttacacacaattataaaaaaaataattataatttattagaattttgtaacgtccccgcttcaagcctccattgggtccttacacccacggaataatggctcttatacacgggtacgtcactcttgctgcttcatggattgatgactggccctacagccaaaca

SEQ ID NO: 264064 - DNA, 864 bp, Cannabis indica
gggggcaggaatcattcttgtcaccccggatgggtatagaattcattcagccttaaggtttgggtttgaagcatccaataacgaggccgagtacgaggccttattggctgggctgaggctagcaaaggagcttggtgcgaaagcaattcgttgttttagcgactcccagctagtagtcaatcaagtattgggtgagtatcaggcaagaggattaaaaatggcggcttacctttcgcaagtacaaaaaaactccaacaatttgagtattactctatagaacaagtacctcgtgaacaaaactcgaatgctgatgccttagcaaggttggccaccactaaggaagctgatacactcaacgttgtcccagtagagttcctccctaaaccgagtatcaatgtggaggaaaacgaagaggctaacatggagctggtcgatactcaaataacgtggatgactccactcattgattacttaactactgggagtctcccttctgatagagtgaggcaaggaagttgctgtataaggtaccaaggttcactctgttggatggaaaattgtacagaaggggatactccatgccattattgaggtgtgtgacagttgaagaagcacaaggcatattgaaggaggtccatgaaggattttgtggggaccatgccggaggggatagcttagctaaaaagataataaggcaaggatactactggcctactattagtcaagactctctccagtatgtaaaaaggtgcgacaagtgccaacgcttctcaacaataccacgagccccttcagtggaactcacttctatgacctcctcatggccctttgatgtgtgggggatagatttgattggatctctac

SEQ ID NO: 264065 - DNA, 2827 bp, Cannabis indica
aaaataggagctcatccaagtcaaagcatattgacataaagttcctagttgtgaaagaaagagtgcagagtggacagatttccatagagcatattgggacaaactccatgatagcggatccgctcacaaaaggattaccacccaaggtctttcatgagcacactgctcatatgggtgtagtattacttgaggatatcatgatttagtgggagtttgtattttctttgctttatgtttgtttaagacatttatgtatttggttattttctgatcagaaataaagttttcagtttattcactctgttttgttatgtttaagtttgacctcactttggtttaaggaggaccagttggaaataggcatgttcggttcacattgcatgtaatttccatgctacacatccatgattgatctatgtcatttggctatatttgtatatgtgaccattgatgggtttagtcatgattgatatgacgaaaatcgctttgatcctatatgggtatagttgatggacgagattgttgtgaatacctttacataatagcaaattttgagctcataaggttatacatttatcaggtaacatatgttgcccaagtgggagattgttggattaaaaatcctatgtgggcacatatgtataatgtatatgctattataaagtgtgatacaaaattaagtgaccaattatgttatgggtatcaaaagggtattaaataagttaatttataatttgttgaggggctaaattataaatacccaaaactcattctaagatgagtctataaataggtagtggtccccaagaaacactagagtttctgaattctctcattccccatcagagaaaatacctaagaaaatagtgtattcttggaatatcaaaaccttctctgcaatctccaacaatggcttcaggttagtgtttccgctcatcttttatcatcttcttcttctttaatttagcaaaggttctatacttttatgatttagggttttctatattaaagcacttttaggaatatgtttagatctgtgatttatatatttcttaagtgttttataaatcctaacagataacacgttagtgcgtactatactacactgattctaaatcataaactagctacatgtatcgagaatgacaacttatagtaatacaatatatataagaaggaacgtcgtcaattaaactttatgccttaattaatttacctatatattggagaaatgctaaagagcaccagtggtgcctagcacccttctacgtgtcaatattgctattggtccaattaagtatcgggtcacatataatttaatataatagcttttaaggaatattgctagccaatcacaacgcaacatgtcgaaaagatgctaggctggtgcctaatagcaataccatataccatgttgtggcaatttgattcagtaataatgagtagatttataaaacttacgtactcaccctaaacagccaactctcgatacctatattgacattatcatatatgcatggttctcaataaaaagaggggcggcaatggcattttcctttttttaatatatatttgttgtattttgtgtattattacgatgaggtgtagattttgtaatctgtaatggatcatatttgctatataatgacatgtatatatgtaaacggtggtcaaactagttggctctctcaagcggtcgtgacactaattttttgctctttattatttttattccaagataatttacactactatacaaacttgcttttttagtgacaactcaaggtgccaacactaaaaggtttttagctagaagaagataagaacaaaggaagagaggaaaataattgtattgattcaattagaagagaaaatacagagtaagtgagctgtatatataagctcactagagtagtacttaagatggccaatggaatggacaatggaatggacttatctttccttaagagggcccaatcaagtgtttggtttctttattaaagcttgaaagcccattccaatagaattacaaatcacctaaactaaggatttacttttccattataaaatcaatagaaagctaattccttaccaacaaaagtccattttgccctataacaaatttgtgttgataattattagatatttatatgtaattttattattttattttttaataattaaatttaaaaatgtgcatattctcatcacgtgataaatatatttgtttgctaaaaatattatttattttttcaatttataaaataatggtaatttaataaaacaaatattatttttgaagagtaaagggtaatttggtcaaaataataaatgttctattccattccatacaataccaaacataataattcttattccgttgttgattccatagcctttaccaaacaaaagaatagaaattccattccattctattcccattctcattcctattcccattcccattccattttcacttagtaaccaaacgccaccttagttaaaataaaaactaactaactaacaactctaacagctcactaacaataacaagtaacagctcactaaaattaagatactcttaatacttctctttaaaatgtggaatgaatcttttgcagtctcatcttatctttgagtgattaaatctgtgttgaaactaatagttttgttaacaactatgcaacttgttccttggtggaaacatgaaatatgacagtttatttcaatatatgttaaagaaaacgatagattgtctgttaattggtaccgattggtaacacttttattttctaattttttaatcacaaaaggaaagtaaaatttt

SEQ ID NO: 264066 - DNA, 2802 bp, Cannabis indica
tttgtcatttaacaaaacacagtatcgaatctgtaacttttgcaaaatatagggtccaaaatagtatttaccctttaaaatattaaaatgagacttatttattttgatggaatgaatatttcgtttaaaatagaatgtaaaatgaaaaaaaaaattaataatttttattactatttttttatacatttcatatttcatattttttctatttttatttttatttttatgtttttatttcttccaattaaacttatacttaaactggcattaattatatgtaaattaagtattttaaatcaattgaattgatacaatttagtcatattcttaaaattggcagtttagtcatattcataaaattttactgaaaatttaaatttaattatgtagatatgtatggattttatattatgaaaatacaacaaagaagtattcatcctagttattaatttattattatatttcctcttaattttttgaatggaaaaatgtcattttatgaatgaatcaaatgatttattagaatattcaacaattcagtggaagaattatttacattaaaaatacaaactgacgtagagattagaactacatgcaaaaaaaaaaaagaaaaaaatagtagttgccttgttagtatattgcttaacaaaactcaatttaactaatgactcaactcagcaagaagatgttagcaattctgcaccagcaatccaatgcaacaaggcaatcaattttgaaaatgatacctttccatgctttacctttaatccaactaagtggttcaagtgtgcaatcttaggagagacttgaccattttacttgaacatacaacttcaatgatatcttcagagttgttcttaacaatgaaacctaagccaaaagaacaagtcgctccaaaagtaactccttcaacatatatctttaccatattaaatgtagggttggctagttgtgaactaagagaggttctattctatctttttgaccacacttccattggtaaaaatttaaatgtgctgaaagaattacttctgcagttgtcacaaatttttgattccaaagcaggttgtttcttgcattccaaatagatgaaacaaccattaaagaagcctcttcaatttgatctccattgtttatgctcattaaagatcggaaccaatcatgaacggctccaacatgaagtagcaaaagagcaaacaactaaaacatgcattattgactcatatgcaatagcacaaaacgaacagagttgatttacattcacctgtttcatgttgagctgctctttagttgcaagaaccccaataataactctccagccaaaatgaagtaccttaggtggaactatttgagcttccaaaagtgcttccaaaaatcagtcttcattgagaccgaatcaaaatcatgttgaagatacctatatgcacttttaactgtacaaaatcttgcaatctcattaccccaagtccagtgatcatcttggacagtcgaagacaacaagatactaagaatcaaatgatggtctctttcttcaaaaaattcttggactacatcaatatctcaggctttattatccacacacaaaagacttgcaaccgagtggccctccaatcctggatgaatagagtaaacataaggagaattatcatcagggagccaaagattgctagtgatactagttagaattccattccaatacatctcctagcaccgactttgataagatctttaggttcgaagatatttcgccatatgtaacttggattatcgcctaaagagacagtcaaaaaagaaccttgggaaaaatatttagctttatagactttgctaacaaaggaagaatcattcaccaacaatctctaatactttaagtgacttaatcgcatatctgcttgagtattcaaactaaaaaacactgaagattttgcaaaattaactactggctctgaagtcatctcaaatactttaagtgacttaatcacattcaaagtgtcactctcattggctcatcaatacggataactatcattcgcgaataacatatgcgagatgattgatgcaccatcagccactataatgtctctgatatgatgtgaaacttcaaattgcttaaataacaaggagaagccctcagcacagattaaaaataaatacgaggacaaggaatcaccttgatggattccttaagtgagaataataggtcccatctcttttccactatgggtgatcatgtattcaactgtagagacgcactaaatcacaaggtgcacccatctagtatcaaaacccatctttagaacaacttcaacagtccactcgactttaccatatgctttgctacaaatcaagtttcaaagccatacaacactcctttctagttctttttctcttcggataatgcataatctcatatgataacatgatattatcaaagtaagttgtctgaaaacaaatgcactttggttgtctgagatcaactaaagtagcactactttgagacgattatccaaaattttagagtttaccttatacaaaatattacataaagaaattggtcacaagtcatccacattaactggtacgattaagacaatattggtacgattcacacccatattttctcttaacttaattttcctaaataattgttgtgaaattacacacattggtgtacatttccgtttttttttttttgtttttacatcagagaacaccatctaatgagaaagaaacttaaaagagttcaatgactaaaaatattattaataaatgacatccgccaaaatgtggctcttgatacat

SEQ ID NO: 264067 - DNA, 829 bp, Cannabis indica
tttatttattaaaaaaaaaataaatactatttcactaattcaaatagaatttttcaaacgacattatactactctttatccctttccttgacagtatttcaaggtagcgagttggggactatggacctataattataagttccaataaactagattatttattgagtctcatcaactaaataatctttgtttattaattacatgattattctactaaaaatatagaattaactcttagtaattatagaattatatttactgagttttactgtagtatccattgatataatcaattccagtgattatctctccatgtgttggttcgtaattagttttttgtcaaattaccgttttatccttctaattacttatttatcctttagtatcattaattcattagtggaagtataatttagatcccatctttatttgttcacaacattccagttctagaattaacacttaaagggaaccaacatttgatccgttagaaaagtcaagattccataattgtagtcatgttcccagccattcacattattagcttcacaaaacagaagttgtaagagtcatcttctctgagaaactttaacgagtgaattaaagaagctaataacatgaacaggagttcatgattactcaagatttaatccgatctactaatattgatcatcattgtgatataaattaagtctttatagtaaatgacatgttaaataaagatagatgcattcatatcggtcattgtcatatataatctctattatgtataacaccttcactttgatgtcatacaacattcgtaatttgaactgagattacttgcacc

SEQ ID NO: 264068 - DNA, 977 bp, Cannabis indica
aaggcaaccagtgactatattttgagcatagctagtggagatatttcatagaagtctaagaaacacactatcttggctcaatctataaaggagtctaaaatgattgcactggctgttgctagtgaagaagcaatttggctgagaagcctgttagctaagattcttttatggaaaagacctattccaattgtgttaatccattgcgatagtacttcagctattgtaagagttcataactgttattacaacggtaatagatgacaaatacgttgtaagaacaacactggtagagagtttttctcaacaagagctgttagagtagatcatgtacgcactgatgataacttggttaatcctttgacgaaagatttagctagagagaaagtccctaattcattgaaaggaatgagactattgcccttagattgatgaatcactcttaatggcaacccaacctatagactagagatcctaagaaataggttcaataggtaataacaagttatgaagtgatagaaatgagttcatgctataattattcgaaaagttatgaatgaattcctgaagcaatttaaggcggagttaataaaagctcttaatgagttctatactccaagtgtagtggagtaccgagctataggagtactcttgatagactcctctatgcgaatgtgggagtggggtcgcttcctataaaattttgggcaaaatttttagagtgttcactatactgggatagacatgaatggcttcactacgaagagattcaaatcgaaagatacctttgtttatgctcaatcttattattgaatgatactgttagatggaaattttttttttaaaaaaaatcaagggcgagattgttggaactttttacaaaattaatgattttttttaaaaaatgagtgtcctagtgtgtgtggaatagaacgagtctcacatgggatgtgaactcttgtttacaagggtatataagg

SEQ ID NO: 264069 - DNA, 1071 bp, Cannabis indica
aaatttgttttattttattttgtgttttctttcctgatttaaactatattatgttatcatttatgtttaccaaatgtattcctccgccacaagtgaggttacctatacataaccgcgaggggggggggggggggtacaagtctaagacaacggcctcttactcttttttagtaaataaaaaaaaaaaactaaaaattatggattgcaagaaaatggatgggacacaaaaatcagctctagatggtctcttaggactccattgggaaattacaatcggatccactttaaaggaatcgtttccagatttggcaagacaaagttgtaaaaagcgcatgtcatttcagattttatagttaacaatatgcattcagtaacatggaatttgcatctcttgaggaacttgagagaaaatgacattctggagtcaactcactttctccaaagaatggatggcatccaagtttgtgatttgttggaagattgcggaaattggaagggaaataataaaaaaaaaatctcttgtaagtcagcttttgacttgctaagagaggatgagtcccttcttgtctctaaattgggtggatgttctttggaaattacaattgcctcccaaagtaagaatttacttatagctcatgatatctgatagacctttttttttctttttgaagaatgatggtgtgtgatagattgaatgtgcatgaagttcttcaaaagagtcttctatggtcatttcccctagttcgtgtgtactatgcagaaaagataatgagaacagtaaacatctattcattcattgtgacatctctttgagattgtggtacaaactattaaatgagtttgggatgctttggggaacccccgctggttgttcaggaaatgttgatgttctcgattagaggatgcaaggaaagacaagttctatgagtcactgccatgtcagctattctgtagggctatatggctggagaggaagaagatgacccttttaagaacaaagcagcgatttggactagcttatgggaaaaataaggttgtgggtaggggttgaaagagattcccttctctgtt

SEQ ID NO: 264070 - DNA, 1211 bp, Cannabis indica
aaaaactcttcagaaaaacaaagagatctcaaaaaattcggacccgaatttttttagtgatgatgaagtatttgttttatgtattttcgatgcataaaatctatatgaatctcttaatttttgcatttagattaatttggcattgatttaggttgatttggttgtcgaaattgtaaattccgatcggatcttgggtcgggtccgtcggacccacgggaaaaaaaaggggtcaaaaatgacccggctggaggtaggagatgactccatacgacgtgtcgtttttctcttgtgtgaaaaacaatatgtcgtttttcagtagcatgtttcgagtccaactccgtacgacgtgtcgttttaccaatagtaaattttacaaaaaaaaaaaaagaaaaaagaaaaatttataaaatttattatttagatttatttaggaattttaatttttacttatttttgttaatttagtcaattaaattacatttatttaaatttttttattttcatttaacatatattttcgtatattatatgttatttagtaatgaattattatggaaaattacaaatcatattccaatacacaaatagtttaaattatctagttcaacacataaaaatatcttatttccttatctcaaatctcgttgcttaatacttgttatctcgtcactactacctataataagacacgaatcaaggccctaacattaaaatttgtactcttacagtataacagaaagaatactatttttgaccagcaactacacgaattcagtgaaagttgccttcataaaaattataggaattttaattatctttcaatagtatggatcattaaaaatagattaaaaccgagggagttatcatagtttttctgaaactatttctaagaaagaatatggagtaatgaattatacgacagcgaaaatacaaacttttgacattgaaaggttcagaactagagggtaatatcttcatgaaagttttaagaaatttaattccctttccaatgactccaaatctttgaaattagaattatattcatagagatatcgcaattttgtcgaaattgttttttaaagcataacattcaagaaacgaatcacacgatacaaaagaaaactaactttttgacataatatgactccaaattaacgaaaggtttcttcatgaaacttatgaggaattgaataagctttagaaccatatat

SEQ ID NO: 264071 - DNA, 691 bp, Cannabis indica
accaaggttcacattatcaaaaacgttactgggaaagaatgaaattcttacgcaaaaaaacaccaatgagagtagatgttagaaaataaagcactaactctgcataataatctaatcaaatcattcagaacgggttaagttcattaccactacgccatcaacattcactaaaaccaccataaagagcactcgaatcagcttctctacattgttctttaaaaggttaacaacaacaataataagagaggataaatgttatgagtgtgcttgaaatcaatcaaaatagaaaaggaacaacggcttgtaatgaatgtcggctttggtggaagcagagagataaaaccaaactgatgtctcatgcataaaactgtcatcatcagccaaaaaaaggtcacaacttaggaagcaaaaaagatgaaagcaagaattctctacaagctggttcaagttacttgataccttccaacgtgtcatatgctattggtgcaattaagcatagaaccccataaaatttaatgctttaatggaatatcgctatctaattgcaaggcggtggtggtgccagacaacattagtgcctaaagcaatgctcgagcagaaaagatgggagctcaaaagaaatcaatgcatgtctcaatacaaaaaaaagattctcatcattggcagaaacaaataaacgtatgaaaaatat

SEQ ID NO: 264072 - DNA, 4243 bp, Cannabis indica
ggacgagcctcccacacactacgacacacaaaactggggttattacccaattccgcattaaagaaacttcccctaggataataccttgctttaaagatgcaagaagcaagagaattaggcctagttatgaatcttcgtccttgttttccaaggagagctaaattgaaatctctaaaattgcaaaaccccatacccccattacttttgtggtcacacatcctatcccaagacatccaagaaatgcctcttgcatcaccacttgaacctttccaccaaaacttagccaacaagctctcaatatctctacttatttcccaaggaagtaaaaaaacactcatggcatagctaggcaaagcttgagccacagatttaagtaacacttccttaccagcccttgagagaattttagagtcccacccttgaagcttacgccgcacccgatcccttaaatagcccagagcagccgtcttattcctacccattgtactaggcaataccaaatacatgcttctatcatccgcttggctcatttgtaagaaatgatttatactagttctactagtatcatcagtgtttgtactatagaaaatggatgacttactggaattaaccttttgacccgaggctcttttgaatttatggagaagctcgcggacatgagaggcttcttacatcgtcgctttacagtacaagtaactatcatcagcaaataacatatgtgagaccctcagggcaccattaaacactttacaaccatgaatccaacccctagcttcataacttcttattaatgaagataagccctccgcacagataataaaaaggtaaggagacaaaggatctccttgacgaatgccacgagaaggaaaaatagggcccatttcccgacccccatgtgtcaccatataccgagccaaagatacacacttcattaccaatgatatccactcatcacagaaaccaagctttgctaaaatcttctctagaaaaggccattcaatgcgatcatacgctttgctcaggtccaacttcagcaccatgtatccttcttttcctttcctcttcctcttgagataatgcaaaatctcaaaagaaacaaggatgttatccgatatgagcctaccaggaataaaagcattttgagtttctgaaacaatctcatgcatctgatgcttcattctgttagccaaaactttggtaatggtcttatacaagacattacacaaagcaataggccgaagatcactcatcctttccggtacttttttctttggaataagcacaacattcgcctcactgcacccctgctctatctggccagatatgaaaaaatgctgaatgaaatccacaacatccttactcactatactccagcacttctgaaaaaacgccggtgtcataccatcagggccaggacttttatctggatgcatatcaaaattgccgccttaacctcctcctcttggatcggttcagttaaacattgattcatctgggatgatactctttcttgaacacttgcaagaacctcatcacactccactccctcaccagaaaaaagatgtgagaaataatccaccacaactccttctaaacccgaaccccattccttccaattgccaacattatctttcaacttcaaaatctggttggcactccttcttttactagctgctcgatggaagtacttactattctgatcaccttccttcaacaaaaattgtttcgcacgttgcttctaaaaaatttccttctgatcaaagactaagaacaactactttttaacctcactataccgttgaatagaagcctcatctcttttattcttcaacaatttaagctccttcctacaaagctgaatccgtttcttgaaattacctgtgacccctttaccccaggtagctaatttagtagcacacgcctcaatctttgaagtaatattaccatttccatgatggttccagcagtcatggacaatttcaaaacaaagtggttctttaagccaagcattctcaaaacggaaacgacgtatgggaggcaccacattctgaacttctaattccaaacaaagcgggttatgatccgaaggagaggtatctaaattgataagccgggtattaggaaatgattggtaccatgttgatgaaacaagagccctgtccaacctaagctcaatccaattgctagtacctcttcctttttccaacgtaaattggtacccaacaagctcaacatcagtcaaattacaacttagtaaagttttctcaaagccttcaattaaccaattcggataccaattaccacctttttctcactttgatgaagaatattatttaagtctccaataatacaccacggtatattattcgagttaactagagacttaagcaaattcaaagaatcctcacgttgacattgccttggttcactatagaatcccgtcaacctccaaagaacatcaccctcccttcctaccataaaatcaatatggtgttgagaaaaacccaccactcggccctcatcttgacacttccaaagtaaagcaagcccaccactcctcccttgggcctccaccgcaaaactaccttcataactcaaataccaacccacatagtcaactctttttttcaaacattttgtttcgcaaagaaaaataatctcaggtttcttttgagacaccgccccttttaggaattgtagagtccgttggttcccaagcccccggcaattccaacttaagacattcatggctcttggcgggcctgaaatccagcacccgccccaaattcattttttgggccactgttaccataaacctccaaagtttcttctaacatctccatagacccattgttattcggcccacttgtagtcagcccaatagtaatacctatgttcactcttttccttttattttcaagaataaataactccccatcattatctatatttccttccacctcaccttcatcaatacccatatctttgtttgaccctgaacccactttcttagccatattttcctccaaattattcctcatatcacctctattcattattccatcaaaacccataataataggtgattggaaattgattacctgtctggctgtcattccgcttgactgtccaccggaggcccccaccgtcctttccccttcgtcatttcagctagaacttccgcctttcgccatcaatccttgcttaagccatttcgcaccaatggtgtgttgtcttcttcttgccacagccttcaactccaaattatacggcttcaaaatcaagtctagaggagtgtcaaaaagcttcgggcagaatttctctgagtgtccgagaatgccgcagatgaaacaaaacgtcggtaaatcttcgtacttgaaatagcagtagcaaatctctccccctctctactccaacttcatccttcttttcaaaggtaagtccactcgaacggaaactctcacacggagatagtctcgccaaatacccatgaagttgttcttatctgcctccacaaaagtacccacataattccctatatccttgactaccttagcagacataaaaccaatggtcatgccgtgcaattggatgcaaaaatccaatgtattcaacacaacatttcttggtgcttcccctatttttaaacgtgagaaaaccagaggtgctctatcaaaggtccaaggattaccttctataaccctatcaatatccacatcatggtaaaattgaaataggtataggttctgatctaattctttcacatacaatcccctacctagtctccataaggacgccattttatgttgcatagccataaaatcaagagccttgtctgttagaaaccttcccactaaacaccatcgatcgccaaaatccgatagctctgtttcttcagcctcataccgtagacccccatcgtcatcatctccttccaacagtatttcgaaacgtctaccattgtccacctccatattgtcgtgattgtccatcaacaaataaacagcccaccaaacagataacaaacaaaaaacaaatgcaaactgatactctgtttcgaagagaacagactcaggtcaaaataccagacgcagttacataaaaatctccacagtaaacccaataaaagaaccttaattgcaaaatacatttaaaaaaactaatataagaattccaaatttaataattgagatccgtatacttttatagaatattttttttattattaccattattaactttt

SEQ ID NO: 264073 - DNA, 1943 bp, Cannabis indica
tcaaaactatcgtgtattaaacacatctttaattgttgaatctggagatgtctcgacagaaacttgattatagtgatcccaatagcgagttggggctattctttcttccgaggtcgacgatgatgtcttgtgtctttcgcggttatttacaaagaattcttctgactccccaaggttgtaagcctcactcccgttagttggatgaagctataggaagtcttcccatagtgagatggtcacctcgcttacttgttctttgagccaatcctatttttacacttagtttgttcattgcacgctaaggactttcacgattgatacatgtctcattcttcggtgcctcggtattcgcatttagttgcatatggtttctcgctaatatattaagtgccagtttgtacattgattccttccctaatagcttacagtcaacaggttacaaatatactttgattcttatataattaatgagttattccataaaagcaatgacatcaattcacattccctttgtcctgacacgtgtccttcattgaggcgacagccgaattattggtataacaacacgaaatcaaaaaaggttacaagatgaacattatcaaaattttagtccatggttaaaaaaataaggtactactaacattacggttttgttgtgcatcatatgttgatttaccttggctcactaatcaacttgtatgttcataggtgtatgtaaaaatgtgtgaatctctaggtaatgtatccacgacactactttccatatcacgaggtccttcgtgtgatgtactcaagtacccatcgtactatataaatagtactcaatttcacacccaagcccgtgataaatctagaaaaacacaaaatagcggtgatatgattgttgctaagactttccaaatagttcaaaagataaaaatcctattgaatgtgacatgtctttttacggtgtaattaaagaaatttggggattagaatacagtagtttttgaatccttatttttctttgtgattagattaggagtgataatggggtcaaaaaattcagattcaagttggtggacttgaatcgaatcggacacaagttcaatacgtttataatggtgtcctaagctagtaaagtgttttacttgagcaatccattagatgcacgctagtcaattgtcttgacaatgcaactaaaagattatgataattgagagtctaatggcaatgatttcatgcttagtgaccaatttcatcaaatagccccccacctgttgatgtcaccgttagggatgatatcatatcatctcatgatgatggtgaaggattatggtagaacgaatctatcaatccatgagtcatatcaaacacgtattggtatttagtctcttttgatatatttacatttagctattaatttgcatatttttgtatattctaatgtatgattttaaatttgtgtaggattttatatcatggaactaggtggggatgatgagtggagtgcttggctagaatatgatggtgatgatggtccatccgtgccagaaggacctagtgttgatcatgaacaatcatccatggaggaagaaggtagtggtgatcctgaacaaccaacacaaaaaatactctcgagagaagcaaacaaaacgatataacaaaaattgttagcgggggaaaaaatttggaggttgagtacaacaactacggacaaaactggggaaagggagcaatgacaaaagttagccaaattagagcatgggtgcaagctaatattccacttcgagatatttcatggcctagagtgagtcaggaccttaaaaataaattatgggattacataaaatgtaaaattaattatattattcgagttctttactattgattataatctttacttataattatgattgttaatgggacaggttgcgtttgatgtaccagacacaaataaaaaa

SEQ ID NO: 264074 - DNA, 1071 bp, Cannabis indica
tatattatttatattacattagtgtaaattaatattaattactatactaaatttaagaaaaattttaaaagtatagttaaccatacataaagtactaacataaaaaaatactaactactatttatatttatttttattattattgttactaattatattttattatagtttagtactttaattattttaataatatttttagaatttaaatttaccaaatataaattaattttatataattattaaaaaaaatagtattttaattaaaatattattaaaaaatttagtaaaataatagctagttctctatctattctctattatagagaaccatcatttatatttatatgattcaacttattttatggagatgctcttaagaacatcttcaacgggattcgtccattagagtggtcttgctattttgatttaattttcaaaattaatttgatgtaaaatgttgtttaatttgaactatgaccatgtgacattttctttttcttttcgaaaaaaaattattaatttaatgtaacgtgagaacatagtagataagagaaaataaataaatcaaataggctcatctcagggatcttgcttctcttctttctctctctccatgttatattttagtattcttttaatataaataatattaattaataatatatttatatatataaggtacagaaatcagttggtgtagtctcataggcctattcattacagtttcagaggaagaagaaagaagggaaagagagaaaggcatatatatatatatatatggcatcttggaaaaaaacgattgcatccccattcaagaaagcttgcactttcttcaataatcaaccacaacagtccagggatcctaatcataagaagtctcatcatcatgatcagctccaaggtacatataatatattcctattatatatacattgatattaattatagatatatatatatatgatataatatcggttattggttgaatttgcagaaaacgaaaacagtgcaaggaatctacatggagaagtaatggcatgtggttatgaagatgttcaagtgatgtgg

SEQ ID NO: 264075 - DNA, 619 bp, Cannabis indica
tgtttattggtatttttgttacactaattgatattttgattttttttttcaagtgtaactctatttagttataacctctcaattagaatattattttcttggtcccaagtgtattcttgaatagaggttttactgtaattggaattgagtaattacaccttaattattaattagaggtaattataatatattattttttaaaaataattaagcaatgtatttagtttattaaattatgtaattattaacttatttaccaaacatcaaatttagaattgatatacaattattacttaacatttaaatacaatgtattgtaagttgcttaataataacacagttattttcaaacgcactctaaaaaaaataataattatatattgtaattgataattaaaataaaaaatttcggtacttaatatttaaaaacaaaaaatgatttttaatagttaatatttaaaataaatttttaattattacacttaattttgatggggtcttaagaattagtgaatataattagaactcctcaattacttctagctatacatatgttatatttttcaattcttacgactctagatgtaattacataatattaatatttttacataattaa

SEQ ID NO: 264076 - DNA, 5206 bp, Cannabis indica
gataatactcgacatataatgagtacttatcgatatggttcatatgtttattatgtaatcaggaatgtttggtttaaaagataaatctatatgtttaccaagtgagagaatattaaaatattttatattttaagaataaaatcaatgaattaatttaagataaatgaatattttatattcaatgaatttagtcacaattaattggttgatattttatatatggtcaaattacgatttaccaaatatttgatttcccaatttaattttttgaattaattgtcaaaatattctaataattaattgtggcagagaccctgatgaaatgtttcacctatataaatataaagtcattccgtcaaacacaataaatttatctaaaaagagtaaagagaacttgaaagccaaattacccacactttccttttctcttacaaatctaaaactcgtgtaggaattaagctcaagtggtattttgatcatttgttcatagtgcatatatgttcaatttattctgcatttatatgatcgttcatgcttcatatcattaatataaatttctaacactaagagctcattgatacatattgaaaatagaagatggtgagaaagtaatgtttggacgaggttaaatcagtgatacgacaagaaaaagagaaacaaaaatagaaagaacatgtcaaacaccattaacatcatttacaattatttattatcatcttccatctgcagaagtgaatgagtcggcaaatccatatggacgtgttggaatgctagtttgggtattgtctaagctaggaaggagtgatgaagaagatgaatccaagtggctgcgaccttcataagcctgccatttcttcagtgcctggggcaacgacatttccaggtcaatgccatatatgtcctccgagttatgctcagatggtttccaaaactctacaagagaggataagacattgacagtatgacccatgtcaggcctttgatatggttcccttgcacagcagtatcctgctaactcagcaacagtgctgatactggcaagtgtttcctcattaagatcaagtgtagggtcaatggccttgcgaaaagagtcttgttaatgttcattctcctgaaccaagttacaaggtgcatgctctcctccgcctgagtctcatcaagtgcttttctgccagtgatcaactccatcaatatcaccccaaaactgaagacatcaactttggttgtcactcggccagtaactgcaattacacggatagagagtttcatcttagaaaggtatgctcttattgaataacagatagcacaggaggccaattagattagaaattcaatgatgaaagcaaacttctatttaaattagtctcaacacttattgccacttacaaagtctgaagaaaaaacaaaacaagcaaaactacattttagttttaccagtacactataaagtaatttatacaggcagctatcggtatagttgcgtgtggttcggtccataactttcctataagatatttaggcagtagcttaactaaaagagatcaactatctgcgatttcaatctataataaaatgtaaataaaataattaattattgctgtttaaatttcaatggaaataattcaatatagttggcaattggcatggcacctttcatacagatttctaaagaacttttctgcaaaattgtaactattatctatccgactcacttaatgcaaaatgtatcaacaaaattaaccaaaacatgataaacgaaagcaaagtacctgcatactccggggctaggtacccgaaagttccggctattctagtttctattgaagctttcccctccggggcaagccgaaccaggccaaaatcagcaaccttggccctcatatcatccccaagaaggatgtttgaaggcttcaagtctctgtggatgaaactttgatgagccaaaccatggagatactcaacacccctagctacgtccaaggcaattgttagtctttgtttccattcaagaggcttcagtccttcctctggccaattgaagatgtgcctactgagtgtcccttgaggcatgtattcatatacaagaagcctctcaaatccatccaaacaataccccagaagagcaactagatgtcggtgtcgaaccttggtcaaaacagcaatctcagacttaaattccggaagtcccttcccggctattaccccagactccatcctctttacggcaattttcgttccatcatgcagttcgcctctatatactgtcccaaaaccaccttgtcccaaaatattttcttgactaaaattgtttgtcacgttcctgagaacttgaatagaaattaccatgtttcctgcttcaaccatttggatgtcaccagcagcttcactggttggaagtgtatgcgtgacttcattaacagcgccaacacaaacacttgagcctgcaacggtgatcttcacactctcattatcagaaccagagtggtgaggatgaatgaccattgtgttagggctctgcaccctacttaaacgcttttgctttgttttgtacagacagaaaaccaacaagccaatcaggaatgtcacaaacacaccaccaatcagcgaaaacacaattactccaactaaattcgacgatttcctaccatgacttccagaatcgctgccattaccggaccctacattagtagcagtagtagaatcgggagacattcccccaacagatgaactaggcttctccttgccaatatcagggttaccattggtattgacaatcacattgctcctaaaagaagggactttcccatacatctgattgtttgaaacgtctagttcagtaagagcaggcaaagtagcaagctcctcaggaagagtcccagtgagattattatcagcaagaacaagcttttttagagatttaagtgaagcgaaatcaggagaaatggtacctgtcaggctcattttctgaaaattaatgattgtgatgttgtgattgttacaagtgactcccatccattcagcacaagggtcattccccttccaattatctgcaaatctttgagggtatcccatagatcccgcaattgaaagcaaagtattcacctggaaatcgcattcccctgggctgggcaaacaaaatctattggaattctcagacaaatctaccgaaaccccacccttaaacaccggcatgggtccttgaaacaagttattggtcaggttaactatctttaacgattttaaattcactaaagacgaagggactggaccggtaaacatattatccctcaaactcaagctctgcaaatctctcagactcgaaaagtccggtaatggacccgaaaaggcattcgaatgtaaccaaacctctttgagaagtgtcatgttctgaataacatcaatgtttccactgagcttaccagtgctctgctgcccattaacccaaagagactggattgccgaatcagaaaagctctctggcaacccgccttctagatagttgaaagccaagtgaagaagactcagacccggaaacgcattgtcgccaaagaagtcgggtattggacctgaaacattggcagaattggcagagaagttctgcaaagccgatgcgttttgaagcgtttccgggattcgccaagccgtaaacgggttgttatcaatctcgacagattgcagtgaagacattccggcgaagaaatcgtctgggatggagctgaactggttgttactaagcatcaagacttgtaaattgcttaacccacttagagaaggaagaggacccgaaatattgttccactgaagctccaagcgttccagctcagtgagtccctggaggtcccggggaagcgtaccttgaaggttctggtggccgatttggatccgcgtgacccgttttccattagagcagaacacgtggtcccattggcaagggtccgggtcggaccacttgagaatgttagacgacgggctgaggctcttctttagagctaacatgagggaagcgtcatcgacattgttggtgctggtttgagacaatgcatgggggaagagcgaagagaaggaaaagaggttgaggaagaagaagaacaacccaagatgggctttcttcttcatattcggtggaacagcttgacttgtttttgtgtaaggtttgactatggaagtcgagagcagaagagagaagataagagagggaaatgagttgagagaacataatagaaaagaatagagcgaaagtgatgggtgcactgtaagcgaggcatgcacatgggtgtggttcccaccaaaaggcgtagatacaaggaggtgaaggctgtcatgtaacataacaaattacagtcttgaaaaggctggatcttgattcctgtctctcacacacatgagtgaatgaggggttttgattccatacgaaaaggggccaacaagccttacataaaaaattcaattcgctgtataaagggccaataacaattatcatttacttttcagacatgtttatgaaaaagttgtgtaggccccggtttgttgattggactattagtattgggtgggattgaaattttgattagattagacgggattatattagattatttcagggttatttccaatacaaacacacatatatgtatacgaaaaaatgtaaaatatatttggcttactaattatttaggtacagcaaaatataaactagaagtaaggagaagaatcagctatcatgccccctcgagatggatttggtgaaactagtccaatctgagtcaaaatgaaggaagaatggatgtgagagagccagaacatcagctagttgttccctgataaaataaaatcaataacataactgagttgctcctacattattgcaatagattactggcgatcaggcactttgatatgaacatattcatgtatgctctgctacggtaccagtaacgaaatgatactgagctttggtgcaagattgagctactgtatgttgtttcttcgagcttcaggcactaagttgagaccgacataccggttgacgaaaaatcatcttcggcgtcagaaaatgcgtctttgctagtggaagagttatgatagagctgaataccctcataaacagtgcctaccgaatatcgaagtaatctttttaacttgtaaattttaaaatgaagattttttatcaatcacctataaagttactttaaataagctctacaca

SEQ ID NO: 264077 - DNA, 693 bp, Cannabis indica
gtacgggttcgggtccacttttgggtttgggactgggttcatgttcgggggtgggtttgggtcctggtcagcgttcgagtcaagggctgggtcccaaatccaaacaccgcctacgggttttgtccaagccgtgggtcaagatctggatcccaacctcgggtcccaatctgtttccatttctggtgtcgggtcacgagctgggtcctaggttcaagttcgggtctgggtcgagtactaggtcccggtcccagttctgtttctcaggtccctatcctgattcttggtccagctcttggttattttgtgggtttcggtcgctgtctaggttcggattcgagtcctagtctcggttcgggtttaggtttctgtcagggttttaatctgggataggggttgggtttagttccatttgggattctgagttcgagtttgggttttagttcgagtcggagttcaatccaggtctgagtttgggtttgggtccggatttcagtctaggtccagaacaggctccgggtgtgggttcccgtcctgggtcttgttctaggttgtgtccgagtccaaagttccaataccgatctgagtctggattcagttcttggtctatgtccttggttgtgatcctggtctgggttcgagtttgggtccgggtccgagtctatctttcggtctgattctaggtgtgggtgtttg

SEQ ID NO: 264078 - DNA, 864 bp, Cannabis indica
aatttttggtatgtattcatattttaatagtggtatatataattttgtcagcatgatatatatttttttgagtattaatttagtattgttataatttctttgtggtatataattttattactacggtatattaattttctgtactacgatatatctaatactgctgtatatatttaaatgatctaatatatttgtttatttttattacaattttataatatacaatactaaaaaaaattatgtaacttaattttgttattatatatatttttttaaaaaaattatatgataaatctatttttataatttttattatctaatttattagatttggccattttcttaatttttttaaaaagtggacatttactaacttagttaccaaattaagggccattttgcatctcaacccatataaagcagccttctaacctaattttttaaacaatttttttttataaagcaaccactttttttaacccaaaaaaaaaaaatcacaagtgtactacacactactatactatgtaatctttatttgacttaatcttactggccaaaaaaactacattatgccatgagatacaaactaagcgtcttatagtagaattacccattatatattcttttatttgttaattttacgtgcttgcagttgcagtagtgtagatattattggacctatgtttgtatgtgtacgtactttataattttttatgatattttttttgcagcaatgtaaaaataattttgattcaaaacttttgtaaaatgataataataaaactttgaatgtatttgtaacgcctttatttacgtaaaataagatgccataaataaactggcgttaagatactaatgttgcct

SEQ ID NO: 264079 - DNA, 1347 bp, Cannabis indica
tattatttaacaaaacaaaaaaatttaattagtaacttttacgaacacataatttaaaataatatttaccataataataataataatatgtgatcttcaattatattcgttacacgtgcaacgcacgttcaaaaactagtatttatatatatatataacatcatcaagaatgaaaattgacaaatcgtttttatctttttgtgggttttttaattctatttttttggtaaataacttttttgtatgtaacaccctactagattagacgtattacagtgctttttaaatactgtgcacgtctttgcgaatcaaaatgtttaataaaaacgtaaataattaaaacttaattaaataacttcactttaatatttaaaacataataaattacataattcggaatctcatttaaaaagttacaaaagtttataaactgtttatatttcaaaagtcgttgtctagcgaccaacaaaagtgagccaacattgtcccgaagaccctgaacgctccaggtctaaccgtcttgatatgtacaatcttcatccttagctttagactcttaatggttcggtcctagttcatacctgcacatacacgtaatagctgtgagtcgacagactcagtaagaaaagtctaatcattagggctgagcatcggtcggtttggtcggtttttttttctatataaaaatccagaattcagtttttggtctagattggtgcaatccaaaaaccgaccgaccgatccagaacttatattaaaaccgactagttttgaacctcggattggtcggtttaaaccgcccaaactgaattttttttaaaaaaattatgatcttttattctataaacacaatattctacattttataactacaaacatacaaattgattgttcaaaaactaattctcttattattttaactttaatattaattaaataataatatattattatatataataaattaatatatatatgtataacagtcagtttcagttttttcggtcggttcattaccaaaaaaaaattgaccgttcaatggcggtttaaccgttagtatttttttagttttcggttccatctgtttcagttccaacggtgttcggtaggttgatttgaacggttatttttttcttttcaattttctagattttatgctcagccctaataatcataaacataaacatatattcaaatcgtaaccaagcgcccatacacctaattacaatctgctaactaggtcaggaatgttctcgacaaaatatgactaactgcgaatccaacctatactcagtactctagtcgtactgatatggaagcagttaattcatactatctaatagccta

SEQ ID NO: 264080 - DNA, 601 bp, Cannabis indica
tgcaggtaagaagattagcggttctgtttggccacaagtcagaggtttcccagcaatgtacatatcacttgtgttgtcttggcttccaagaagcatgatcacccctttttctatgattggatgtataacctactcttgtattaatggttttataattggttgtaaaagaattttattagcaggggatccccatattacgacagtattttgaactaaagtttctattttaaatttaattaaagataatatatttttttgaattaaaccacacttttcctagactaatagattattgataataagattataaaagcacacacgtggcgttcctgaggttcagggcgttacagatatagtctcgaagagtcgtatattcttcttgatgatccacaattattacaatatcaggtaaccccgtcatatatttaatccttcccaaatatgtttgcaaatgagatagttgtctcttcaacacaaccgcatctcttttcagaagacggttgactctgcacgtcttttgttccgttctcaagtctctaaacttatgaagccttgtttctgtagtataccaattcgttaacataccaccaagccatttttt

SEQ ID NO: 264081 - DNA, 3365 bp, Cannabis indica
tttctttaaaaaaaaaaaacaaattcacaagataccaccctatacggtattacttactagtagtatttggctgtagtggtagtgggctccttttaattttttcactctatttgttttacctttgttcttcttgctgttgttgttggtgtggtgtggtggtgtatgtgggtctggattagtctgaaactgtggttaggtgagcatatgggtctatacccttgtagctttttcttcattctgcttctctctttctctctctccctctctctcttctctttttctttctctctctaccctctttttcccctgcctttctggcggataaaccggtgagtcttttacataatccaaatcgcaaaagcaactatctcccttgctttcggtgtatgtttattgtttactattctatttttggttatgtaatatccatttatcgatttttcccatttgtgttaagtagcagaaaataaaaaaagaatattatatttgtatagttttagtgacccttatttttgttctttcagtttctgagtttactccaagattgaaaatttaaaacgtaaattcattttctttgactgattttttcccagaaaccaatcgaagattttctaacatgcaataataacttgggacggagtaagttcaccttgttattatgaacttttgagttcttcatttttgctagatctgtaaaagatgcatcttgctaattaatgatttgttaagtctgttgtcatttcacaaattgcaaaatctcctctttatatttgcccttttgcagtttatgttttttgctttgttattatcgaagaaaaagagattaaagttttcttcttttttcatttttcttcattaatattctctgatgctcctccactgtctactgtgtctactgttttttatcttttatatttttttctctttctttgtgttgcatattctttctttcaattttgttccttttttctaatatagatcttgtataccttatcttgccgacacaagagtaaagagtgtttagtaattatttcgattttcgtaatttcttaataccctttttatcatttcttgaatttcttgcaggcagaggagttagatggaaaagggtagtgattttagacagtgggacgagctaataccggacgctttgggactcattttcagcaacctccctctcaaagaggtactaacagttatcccaagagtatgcaaatcatggagcaaagctgtaatggggccttactgctggcaagagatagacattgaagaatggagtagtttgtctcagcctgacaacctcgatcgaatgcttcgaatgctcattgccagaagttctggatctctaagaaagctctcagtttctggcctcaacaacgacttgatcttctccttcattgcagaacagtaagcataaaaagaaataataatacaaatttactttcctaaattcttttgatatggagaatagattcataagcttttcataaccaaaccccacttgagttggtgaagtacttgtcttgctataattcttgttttgtcaattgggttttgtgttttgtgccttaatggaggttttggtaggttattatagtgttaaattaattggttgaaaatctatgtgatgtcccattttctttgtttttttatgaacttggttttgcaagtgctggttccctacagagcttacggctgccaagaagcgagatgaatgatttaatagtggaacagattgctggacggttttccaccatcactttcttggatgtgagttactgtgtcaaaattggggctcgggcactggaagccattggaaagaactgtaaaatgctggtggggctttgccggaacatgcatcccttggacacagcaggcaagcctccagaggacgatgagggtcttgccatagctgccacgatgccaaaactcaagcatctcgaaatggcctaccatctgattagcacggccagcattctccagatcctttcaagctgccctgatcttgagtttctggatttgagagggtgttggagtgtgatactagatgacaagcttaccaaagagaagaatccaaaccttaaagtcttggggcctcttgttgtggactattacgagaggaatgattgggacgactgctcggatttctctgatgcttcttctgagtacttagcctgggaattcatgactggtggagtggtagactactttgatgatgatgatgacagttttgatgggatgtgggatgatgaagcaagcttggaggagcttgaactgaggttctatgaaggagtaggtcaaaatgtaggagacaattatggttggcctccctctccttgagagaaaaaaaactaagcctaatgtttctctcttttcgaactgttgaactttgcttcttcgtttgcttttgtttctgagtactactactgagttacctgatgcttttagtttggaactcttccctaatatgtggtatgactgaatatgtatatgtttcaactggaatgaaagcttgttgttgttgttgttgtttttgtttaagattacatatatatttggtattttggaaagtttggaaaatgcacaacagatctacaaatttaaaatggaaaatgcaatattgttttttcaacattgttgttgagctaacaatgcatttttaacaagattagaaaagtattgatgacattttatgtgtgaattagtcataaagtttgtggttttgatcggtctccattttcaccaaggaataaggccatgccttttagtaatggcaaactggcctgttgaataggaagatgccctcattgattaccgtggctttctttgcaaagaaggaaatttttgaaattttttgagttacaaaaataaagttatagtatttcactttaccaagcttatttaaaaaatttcaaatctattttcagtattataaattatttgaaatttcgcgtaaaaaaaataaaaattatttgaaattttttaaaaatttacaaaaatgatgttgtgagtataacgaacaccattataaaaaaaatattctagtatgtgtttttgggtatagaagttgattaagaaattgtaataagaggtttacagtggcactcattttattatataattatatattggcaaattatttagtagcaaattttaaaggattatttcataaaatactcaaaattcaaaaataagttaatatttttacatctttatgattattatttttgataaaaatacggagtgttatttttcattaatttcaaaggggaaatttcattagttgcccttaataaaataccccatatcaaaatttataccctccactaatttgtacaaattaatttcattgattacatgaactt

SEQ ID NO: 264082 - DNA, 1324 bp, Cannabis indica
aagatgatgaaatttcttgccttaaagaaaattgagccatctattctatatcgatagtcgaaccaccttcttctctttttctcttcaaattttctaaccttgagtgatggagtgagtgcccacacatatcaagtggtatctcaatcatagtgtggaagactgtgaagaatcgagaatcaagaaaaggacattcaggctcagaagttggtgatactctgcgacagacaggatacaagggttagagatctgagcggaaggacacattatatttcgctgcacccaatgtaaggttttttgaaactttatatatgtttactttcatggttttagaaattcatattaggatgttaatgaaacatacttgttagtaaatctagatcctggtaaaacatattccaacaccagctccagaagaggggccttctgaagatatcaaaatcaaatagcaacaaaaagataagggtagaggcaaagcccaggccatatcattgtcccctcttgtactcaacagttctatttggcaaatagatcagaggccaaatttgctgagaaattatgggctaatggaggcatattccactgatggtggtgttcgaaacattccaggaattatgtggcactcttcattgtctagaggttttgacaagataagaggttgagccaattgttttttcagctcttggaatgcttttctacactcttttgtccactgactttcttgttgcctctaagaatgttgaagaagttacacactttccatagacttaaacacaaatctacttattgcagcaatgtgtcctttcaagctttgtacttccttgatggttgtgggtgaattcatgtccaaaagggcttatatcttttatgggtatgcttctattttcctggcattgactatgaagctaaggaatttgcctgagcttactccaaagaataattgatagggatgagcttcatgttgtacttttgaatgatcttaaagcattcgtctagatcttccacatgccccttaacctatttggacttaactagcatgccatccaaatacacctcaatattgcggccaatgagatctatgaaaattttgttcacaagcctccagtaagtggccactacatttttcatcccaaagggcatgactttgtagcaatataggcctatgtttatcatgaagcttgtgtgctcttaataaggcgtaggcatcttcatctagttataactagagtgcaagtctatgaaacttagtactccatggccaactacggcatccaccagttagtcgatccttggaagcgggaagaaatcatttggacatgctttgttt

SEQ ID NO: 264083 - DNA, 553 bp, Cannabis indica
gctggagattttagtcaactatacataggtatcttcaatgccgtcttatattcatatttttattttctctatatcagggtcaaaagtctttggctttggatactgcaattgggatgtggcagttattatttgctgaaaagcactggccgctggtcgaacattggtgccagttcctccaggtgactaagaatttataattctgtttgtgattagatagtttaaagttgtgagaaagtagtacataatctatgttatttacagttaaaaatgtgcatctgcctatcattatgcattttatttatctttatcataggaaatttcgaaaatcgccctttgctcaaatattctcagatgagcacctggtgcttaataatatggcagggtatttctttttcaaggaaatgctttataatttctcaagacatcacacagtatatgttaaaattaagggatggtgtgttcctcagttccccatagtgataattctgtgaaggttaaattactaaattgtttccttttttctttctttctgctcccacaaggtctgaggttt

SEQ ID NO: 264084 - DNA, 1479 bp, Cannabis indica
catattgagtataggctgatattatggtcgatagtattgtcgtgtgaacgttctagattgtatgttatgtgttatgcttttcttactgagtctgtcgactcacagtgttattgctatgtgtaggtaagggcaaagctaaagttgaggagccgtgagagcgagcagatgaagattgtacatgtcggggcggttaggcctggagcgtacgatcctcgggacaacagggcttttgttgatctgtcgctaggtgacaagtattttgtaaatgagtagtaaacttttgtaactgtattttggaaacgggatcccgaaattttataaaagttatatgttatatgttaattaaataagcaaaattttaattattcatgattttcaataacctcgttgattagcaacgagctgcacagtacgttcaaaatcatgctaacaggcctataatagttaggttgttacagataaagcaaacgaaaagtaagaaatatatctacggttttaagcgagtaattactaattcacagtaacggtagtgaccatattttcaataacggtaatgaccgtatctttatctcgatcataatcgagccacacacaatagtattcgttatcttgattataatcgagtcataaatgataataatcgtcctcacttaacatgcttagaagtgcaattagctttcttacctcaatctaatattaggtgtgcgggccgacctgggtggaactatgctcgacgatcccggtcctatgtcacaataacaaagcttgataaacaacttattcaaaattctgggataaccctaacttcgtaatcggacaaatctaacttcccactggttcaaaataactcaaatatcactaaaataccctattctaagctttgaaaaaaaaaaactcaaacaaaacttgttttgaagccaaaaactagagttttccccatgttggcaaaaccggtcaaccagttcactatgcctgtgaaactggttaactggtttccctgctgcagaaacgggaaccctggtttttgctccaaaacccaaccgattctcctccaaacctgtctaaaccttccagaactgtctcataccataaaaacaatgtattcaagtcatcaattcacaacaattcattagtttaagcaaattaccatagttgagtagaaatttagctcaaaaacccttaattcctctaacacaaaactaacagctctatttctaatcaaatcaagcttaaacaaactttaaatcaaacttaaaaatacattctaacttgactttaatatttcggtcaatctctaaaagctgagagaatatacaaaatcggggaagaattcccaaatcaggggacggtcaatctctgaaagctgagagaatatacaaaatattatatcatttgtactctataaactcatcaaatcctgataataagatggactcgtaggcggtgaagaattaaatttaaaaccatgtataaaccttt

SEQ ID NO: 264085 - DNA, 535 bp, Cannabis indica
tttatgcatatggaatatatattcatatatagttaacattattattatttttattatttttataaaataaaaactccgcctcaacaattgacacataatatctctaatgttttcatatatatatatatattgattatataataataataatattataactattactttttattaatcacacatttaataattatcacaaatttatagtaactttctttttgtttggaaagatttagagtggtttttatttttagtaatttaaattatataatttatatctatttatattatattcatataactgtaaaatattaaaaggtggagtgacattctctatatctaatttttttaaatagctacatctatttttctattttctttacgttattagtttttttttttctactttattcatattatttcaatttaatgtaatcaatcaactaattaaattatactttataatattaaggatacaaacgttcgtgttttataaacttctcaacataattttgttcataaattatgaaacatt

SEQ ID NO: 264086 - DNA, 776 bp, Cannabis indica
tgcagaatgttgaaggaatattgcaaaatttcgaccgtctgggacccattcgatatggcacacttctaacactaaatcccacagaattagggagtttgtcccctgtgtcaggccttggaaagaggcacaacaaaaaagacaaccacatttttgtctaacgtccactactcttacattcattgtgcactatcgatggcgcatgcccacctatcactatcacgtggtatggtctcgtacggacaatggttatcttttaaattgggcatcacctacttggcccaagtcaatattataatgtattttacccctatcaatgggcttattttaacaagcgaactgtaacgagtttaggtttacctgaaaaacctgactctagcctataaatagggttctcacccctcatgcaaagggttacagttttttgttgtaaaacactggttaaaaatttagcaaaaacactcttgtgtaaagtacaacatagcaaaagagctcaataacattgagagcttaaaggaagtcttcaccatggttgctactaaaatcgcgaccaaaaactatctgttcgcaatgacaatcataatgatgatgccgatgatttgaactggcctccttcgacggacaatcaagcaggagttgtgggaggaggcgagacgtcggaagtgactcaccgcccacctcagattggaaaaaaaaaagagaattatgttgatgaaacccccatcaatgaagatgaccaaaaaggtcatggtgaggaccaactaggtgattacgacaaa

SEQ ID NO: 264087 - DNA, 1164 bp, Cannabis indica
tttgttaaacatatgttaattaatataattagaaaatataattagaagctatatatcattaattttatgagaaaatttgaaacattgagtgagtaatgcttgtatatatatatacatatatacctgtctccgacgagcttgtacattctaaaaatgagatcttcctcttgctctgacatgtgtatgaactcccactcaatgctgctcacctccactacacatacattttacatttctcagatcatatatatttatacaaatgatatataaaactaatagtgaaagaaaaccagagcacagctgaattaattagcttaattaattaccttgggagcaggggctgatacagttgttgggttcttcattatttcctcggcgtttctccattattactttcacttccacaaatagtataactgatatatacatataattcaagactgaagaggcatttatataatggagagttataatagtaaaacttattatattaattggataaatttaatgtggtctcagagagatctaattaataaagctaggcgtagacccaacgcaagggaaaagcatgtcctatagcctcctaccaaacagacaaataattaattattattactaataatttttttgtttaatattgactttctgttgtctctcctccaattccaattaatcagaaattccatatactaggtaaaatccaatttacgggttgtgattgtgtgaatggtatattccttggggtggagtggagagatgttatagaatggtgtatttgatggagtttgaagaagttgggtcaagtgggctgctagcttagctgcactatcaatgttgttgcaggggttcacatagctagctaagtgtgctagtcatggtattcatgtggtagcagggaattaatgtgttgtttgcatcagcaacatttcttaatgtcgatttatcacctttctttagttgctgaaatgagggcaattacagagggtttaagggttggtagtgtagagatattgatcgacaagagccttgtgttactggtttacagtttgtgtatggtgaggccaatcaggtggctctcgctttagattggtttccgaatctagtgctaatgatttggggttgttttgtaagacttccatttcgaaaagaaaaaaaaaatacaca

SEQ ID NO: 264088 - DNA, 487 bp, Cannabis indica
gggacaacagttttaaaaaatttctttcatcttgaatccgtggatcacgatcttcatccttcttctcaccttctttagtcaagactgccattagttggtgaccagccttcctgtgctgcagctctatgcgatagcattcgcgagctagcatttgatcaccctgcactactcccacacccattggcatttcaaattttagagataagtgctaaattgaactaactacccctagtccaattaaggctggtcgagccagcagtattttgtaagctgatggcaggtcgacaacgaaaaagtcttgcattatcgtggtggataaaggttcttcgcccaatgttaatgggagctcgattattccttcactaacgatactgtcgcctacaaatccgcaaatatttaccatgcaaggccttaatttagctttttcaagccccatatttttttttagtgtttccctataaaggatgttcactgaacttccgttgtc

SEQ ID NO: 264089 - DNA, 574 bp, Cannabis indica
aactctggatattgagctctcatatctgattctaactcccaggtggcttcctctaccttgttgtttctctagagtactttgaccaaagctatggtcttatttcgaaggactttatcctttctgtcaaggatctgtactggctgttcttcgtatgacctatccggctgcagctctaggttctcataactaagtatatgagcaaggtctgaaacgtattttctcaacatagagacatggaatacgttgtgaactgctgaaagagctggaggcaaagctaatcgatacgccacttgtccaaccttctcgagaatctcaaaaggtcctgtaaatatacggaataacttgcctcttttcccgaaacatttgatccccttcattggagatactcgtaaaaacacgtgatcccctacttggaactaagcatttctgcgtttcggatctgcataactcctttgcctactctgtgacacaagcattctagctttaatcttctcaattgcctcattggtccgttgtactgactctggacctaggtgtttcttctcccatatctcatcccagtggatgggagatc

SEQ ID NO: 264090 - DNA, 709 bp, Cannabis indica
tagttttagtcacaacaagtattgtaactaaaaatacatttagtcacaacaaattgtgattcttgtgactaatacttttagccacgaactttttagtcacaacgtagaaataacaatttataattagtcacaacttttttacttttagtcacaagttttgttgtgaccaaaagtatgattttttgttgtaataataattttataattaattaaagagcaaataataatatctagaagaaatcttcaaaatagttgttatactagaacataacaattacttattttagttattgtcaatttctctattttctcaaaatcatgttttatacacactattctattttcctggtccatatacaattagagagcatgaactaatggagtaaagaaataatacacatctcgatcttcttctctctcaacaagcaaacaagtaaatatagtacaaaagtttatgtaaaatttgtagaaataaatattgaagaaaacattttccaatttaattttttttactaatcacccgtttacttaccagcaccaaacaagaaattcaagcactaaatgtaacaaaataattcttagaataagaacaaagagcagaaaaacaaagctactcatttttttctttgtccaaccataaaatcaaaacaacttaatttttctttaactttgaaaaaaaaaactcatcaaagagtgttagagtgaaata

SEQ ID NO: 264091 - DNA, 3970 bp, Cannabis indica
ataagttcagtttacagtttcttttcatagaggatgatgctattaacatgttttgccaactgcagagtgaaatccgtacacaaaatggagatgcttatcgttttgaacaggtaacttttctgttactatcccctctcttcattctttgttggtgttgttatcttttctttcatctgttattatttttatttcatttccatttgagattagtgaaaaggggttattgtttattaagagtttgttcccagtcaagctttgtgacctgtagtttacgacaatgtttcgggatgtttgtgcattggcgcaaatgctgtatatgttacttttattttcttttgattgtctctctcacacacactcatgcaggtattaagatatgtagcgtgtaagctaaattataagcactttattctctctctctcacacacacaacatgcaagggtaagatcagttgtagacactgaaagcagattagagataagcttctgaatcacttagcaaactcaagagtcatgtttgaaactgtagtccactgttaatttgttttacatggctttgtacttaggcaaagaaatttttcagataactatttgtcatttggacaagaatgactgatgtaaattattcattacccccccaaccccatttgtctagtccaggcagatcttatatccctttaccattctctgttaatgcaggcaaaatttcacataattcaagaactcctcggtaaattgcattcaactgttgctagtaatcatcaaagcaaagcttataaattgctgttggaggaactaaatgtggagcgagtgaaggcccgtcaaatgatgaagaaaatgttcaataggtcctttggagccaccttcctcacagacacaggtcaagaatccgcttttgcctatcatattcatcagtatgcagatgtttataccagtaaaccagaaaatttttcgctctatccttctgatgcatggctacatgtaccctacgacatcaagattatgccacaccatcttaaggtagtctttctcctcaaattcttttcatctctaccctttatttgataatacatgagctttgattttgccgaaaatttttaaccgattttgtcttccattcccttttgaatccaatcagggaagggacgttctacactattgttttttattctattttttttttttttggaaaagagtacacttttctctctccactacagcaaaaattagcttagctattttctgtgaaatttctagtttttctttctaacatgttccatgttacttctttcaggtcccatcgagtttgttcagaaattgttgaatataattcttttgaagaaagggttagtacaagtagagtcctacagctttctaaattctttcttgccaaacgtagctagtaaattttgagccacacttagaggtttagtcctattagtattacttaccatgctcccccagtttggctggccaaataataaaagcatacatcttgattcttgaagtagacatgtagattgcatgtcgctacactcttcattcttttaactgtatattgaattttaatttttttccgaaaaaaaaaatattaccttaaatccaattctcctgaatctccatcccattcatttacagatatttacacaagagtacttcacacacatcaaaatcaccttttatttaatccaaagattttggactaataatgcagcagtgtcacaaaattatatgtaactaaacatttgtaccttttccttattatctcgtgcaaaatgaatttgtttagtaattgtgaatcaatagcctaactcgttgaggagtactaccatttattttattttattttattggtatcagctgagccaactaaaccgggttggtactaggctctggttttggcagaggtcagctcttattcttgtataatttatatctggtatttaactacttatgcaattaatatactagttcaggtcctaaattttctacgctaaatatgccatcaagtaattaggtgattaaactatctaagctttaaggtgcattgttttcgcagttgataatattgtttcttaatattttccttacagccacgctctatgaaaattagctgcaagtgtagttaacctttacttttaacatgtttttcttttaggtttgtaaactgtatgaagtagccctataatcatcttctagatatctgttatgaagaacagggcatctatgtaattatcacgtatgggtctagtaagctacctcgacatgtgatacatttatatattgacacaattccatatttgacaaaaatacaattgaaaaacaaccacaattcaagtttaaaaagaaaaaaataccgaaacatgtatcgtattgaaaacagcctcatgttatacatattctaccaaacgaaaatatagaaataaatataattaggcatgagagtacaatagttatgtcaggtcaacttagattttagtgtatccgtattaattaacaatcaaattaccaatggtagacaaaatagcttacaataagcaaataatgaagacatgaattgtagattgccaactcaagtgggcatccgttaaaaaccatacagaactacaaacagttggcaaccaaatctaaaactcatgaatatgttgggacagaactgaataaaattatatgattaataatattaggtaattatacccctaaaatattcaatgagtatttgtcctaaatattgggtagttatctctcaattacctttaattatattgggtagtatttgacaaagcatgatttttgaatagacgatgagttatcttgattcgagaagaaggaagaagcgtcctactaatatgtgaaattttttccatcgtaaatttataagtgattctaatcatatgtcaaaaaaaaaatccaaatctataattagttttcatatttatggacaaagtaataaatgataaacttaaaaaagaaaaggctttaaattaaatcaaagatttcttttaatatatttatttggtttaatcatgaataaaaactatattaacgaggttacagaaatagtctaatgatacatactacacttcaagaggttttgaatttgaatctccattttcctaataccaaaaaataaaataaattttgtattaatttgttagttggcatattttgttatttctaaaaattagtgaatatatttcccctaaacaaaattggattagttaggtaacaacttcatccatccctagtgtactctttccacctagcaattagacttttgagtatctttatcatcacaacatcacatcttatagttcgtttgttactagatcatgaccattcattaggattgtaatacttaatttgatgaatgatcaacatcagtatagtagatttactcgacatgtcccattaataacaatacaatgcataaaaaaaatgtactttttgccatgtgaaagaatcttttacccgcacccaatacaaacacattattctcttttttttaaaaaaaaaaaaaaacaaatgcaaatattattataaagatatttgagacagaagggtataaaattttgagtttataattggtataaatttaatatttttttagtaaaatataaatacgcaatattaataaaattgaaactttcctaagtataactccattagtatattattagtatattgaacaagacacttataagattcaaatttaaaattattaagtctagatagaaacatatagtatatattattttttaaaaaaaaattcaacaaattcgaaaactaaatataaatttagaggagtgctaattacaacttcttattacaacatcttagtcaacctaagtccgaaatcacatgtcgaaatattttttttcaaatttttttcatagcgttattcgttatagttacagtatcgtcccggtaaatttttgaaaaattccgaatagtttacaataccgaaaata

SEQ ID NO: 264092 - DNA, 545 bp, Cannabis indica
tacaatagtcatatgtctgtttccaatttcttgtattctctttggcacagtaggcttggccaccctactgctagaattgtaaaacaggcccttacttcttgtaatataccatttcctaataaagatttttctgatgtgtttcaagcttgctgccttggcaaaacacacaagttgccttttcctaaatctcaaactgtctacaacactcctcttcaattattgcatagtgatttatggggtcctgcccctgttatctcatccaatggatattgttattacattagttttgtggatgcctactcaagatatacttggatttatttacttagaactaaggatgaagccttgcctacctttactaagtttaaaacccaagttgagcttcaattaggccacaaaattaaagctatccaatctgattggggaggagagtttagatcatttactactcttcttgaacacagtggtatcattcacaaacttgcatgcccacacactcatgaacagaatggagttgtggagagaaaacataggcatatagtgga

SEQ ID NO: 264093 - DNA, 601 bp, Cannabis indica
actagaactaggacttggacttggaatcataacttatattggacctagatcaaaaaccgtaatcggaccaggacccgtactccaaataagagctagacccgaattgggagccggacaaggatcccaacccaaacttggactcaggacccgaacccgaacctgaacttagacccaaacatggaaccagactagggacacagaaccaggctcgggacctagaaccgtagccccgtctcgatcccgaacccaaaatcagaaatgggacctgggacctaaaacagaaccagatcgagacccgtgacagtgatctagatcatgactcaggattcgggtaatggggcctgaaacaaaacggagacccagacctggacctaaattttggacccgatcccaaacatacacttggacatagatagggatccgaatacgaacctggactcggaccaagacccaaactctgatcgaaatactggacctagctctggactgagatcctgacccaaacccaaacttggacccgcactggggacccgaactgggaactggaccagaacctagacacagatcggggtccagacctggacacaaacccggacacaga

SEQ ID NO: 264094 - DNA, 2723 bp, Cannabis indica
caatcagtaaccaaaggaacatagttgggccacttgtggacgcaaattaccaaatacttcatgtccacagtttttgcatataaatgaggtttgaatattaaaattgatgataaaataacaacaccatttttcaaataaaataaagatgttcttcacagcataactgctgcaaaagctttaaaatatacgtatacaaatcaagtgactgtttaattccctagaaaatttccagcaagtgcttctctacattccagaatgtgaactttcaggtacagtaatgaacattaaacacaaacctccattttgtgcttcccgttgatagcctccagggctgcaagagcttgctctttcgtttcatattttagaaaggcacaacctgccatggaaacatatttggacaacccaattgatttctttacaaaaccaattttaagcacagcaaagctacaacaaaaataagagataaaataagtacctttactagtttgctgagaacctcttaatatttgcaagtcctttatggttccatatgtagagaaaagagcagaaacttcagcttcagaaacattctttggaagcataccaacaaaaagtttgtgttctggtttgtagtaaagtcaaataataaatgttaaaaattgataaaataattcagcataacgaaaaaaatgaaataaatacaactcatgacttgaaaatagaaacaaactcaaaatcatcttaggaacagaaactgtcatgtgaaattatattacactacaacctagcctttccaactcgccatcagcatacttcacttgcaacggagtagatgcctgaattgaacagaaagaacaggacacctttcaatcagactaagagaatacaaacacacagcacacaataaaactataagttccacaaattaacactagcctaaggcaataatgtgagtgactaaaaatttatattctacggtgactatagttttcatcaaggctttttacaagtgaataaagtatgtcttgcattgaccaaatcacaatcctccgtgcagtcataggcaagaacccaactgagaagcttgcctgggaaattacttgaagatccaaaaggcctaaaatgggctccacaaatcactctaacacctagaccaggaaaatgccaaactccataagcacatatcttgtataagatttgtctaaacatgatgctgcttgatacaatacagagtgaaataccaattccagaccaagttaactcgaaaaaatcccaaaacgctaaagatattggaatcattaaaaaatgaacaccaagaagttgggttcattcacacctccccctgtaacaccattttaagaaaagtgcgtacatattttattccagcttgcctctaaagcgtagtgcagaaacattgaaattggtaatgtcagtgactccaactatttgactaatccaaaattagtaaagtggcaaaatacttatcagtagtaaatatgaagctaaccaaagtcaacgacagaagttgcaataagtttttagtcacatatatccaatgtgcatgatttagttagtgtcccaattgcaagatcatgaaaactacagttgattgcgatcacaaaattatatcacattcttcacaattatcaacaaaacaccaagaaataatgtagcaaaccaaacataaaatcagagatcgtagttcaactaaccccaggtagcgttttcttattatgacacgcattgacggctttatctgcctcctgtctcgacggacatatgacaaaacaacaccctgcaaacaaatacacgagaaccaaaagcacagaatcaaaaccatgtagaaggtcggactctagggttgccccaaaagaaaaccccaaatctcaagaacaatcttccgaatcacgcaaatcataggcattatgaagcgaatatgaattcaacgacgaagacagaggaaaacaaaacaggaaagtcaatggtgaagcgggagaatgattcagaaacctcgagaggcacgggtgaccttgtctttgatgatgttgacctcgtcgaccagagaaaactcttgaaacattgtgagaagctgagcttcggtcatgtgcttcggcacctgaccaacgaacagcttcacgctctcctcactgctcgatttctctctttcttcccctccgccattaatgcctgaacacacacacacactctctctctctctatctctctttctctctctctctttctctttctttctctcctaaaaggattttcctcgtggagtcgtcgcaggggaaaatttggggatttctggatggcaaagttggatcttcatctttcgttttagacttttgtttatttatttatatttattattatataattaattatgttttctacccagatttcctatttatttacgatattgccactacagctgtctctgtcgtacgcctcgttgtggatagttgtaaatgtacagctcgacttctggccgagatttgtaattctgtaggaatttcataacggaattacctttttaccctctcgttgttaacggcgatgctggtgtggactgtggaccccctcctagagtagaatccttgcaagttacaactatggtgctaaccatattttcaattttcaattgttatatctattttgtcaattttcaatatttcctatttcggctatttaaagtttgatataagtttctttttattggaaaaatatataaaaaaaataca

SEQ ID NO: 264095 - DNA, 522 bp, Cannabis indica
tcattttttttattacgtcatcccccctttctttggtactacttgcaccggactcacacatttactatctgaaatttggtaggccactccagcatctaaccacttgaccacctcctttttgacaacttccttcataggtggattaagtcttcgttgggcatcaattgttggtttagcgttttcttccatccaaattcgatgcatcacagttgagggactgattccctttacatcacccaatgtccatgcaatggccttgttgtgtgcccaagtactctaagcaacctatcagtctccacatcagacagtgaagctgacactatcactggaagcttcttatcttctcccaagaactcatatcgtagatgattagggagcaccttcaactcaagctctggaggtttctcagtagatggcacaagctcttttggtactactcccagctcttcataatactttctattcaatggcccataggaatcaagtcatttaacatactccattacctcctttccctcttgc

SEQ ID NO: 264096 - DNA, 805 bp, Cannabis indica
acctagcatcattggcacggaatagattgaaatgattgatacttccccaaactggacgatgccaatagcaacctacgtcaacactggggaactcctagataatcaaaatgaggcacaaaagatgagaaggaaggctgcacaaaatatcatagtagagggaattatgtacagacgaggattctccattccatttctcagatgtgtgacccaagaagaagctccacgacttttgtctaaggtacatgatggattttgtggaaaccaagctgccgggcagagtttatctaagaaaattctaaggcaaggttatttcaggcaaacaatgattgaagattctaaagcctatgttaaaagatatgataaatggcagagattttcgaaggtacctcgagcaccgctcaacgagttaactcagatgcaaaggccttggcctttcgccatttcgggaattgaccgaatcagacaattccccaagggcaaaggaggcgtggagtatgcagtggtcgcagttgattacttcaccaagtggacagaagctgagccgctagcaaccattacgtccaaaaaactgcaagactttgttataaagaacataatctgtcggttaggattgccatacaaaatagtttcggacaatggcaaaaaatttgacagctagtcctttactgatttttgtatgaaccatagtatcatcaaaagtttctccgcagtggcgcatccccaagcaaatggtcaagttgaagtagtcaacaagacattgaaggatacactaaagaaaagacttgaggatgctaaaggaaactgg

SEQ ID NO: 264097 - DNA, 593 bp, Cannabis indica
aatcgtatcacaataaaattcacgcgccttctctttctttcttttgtttggttaattactcagaaaacgcaatgaaaaaacgtgatcatcatcagattcaggaacaagcgtaacgaatcaatttcgcaataaatttcaatcgattcgaatctaattcattaattaatttaatcgatttaaaaaaaaattgatagtacccgtcgagtcccatggagatagcgccggcggcaactttagcgataccggcagtgaggacgatggatgaggtggcattggcactggataaaccagcagccaaggcgaatggaacagtgacaccgtcagagacgccaatgattatattgcaaacgattttgccggcggtgaagtgtttctccttgtgttgactgatgagaagcttctgcttcttagggtctatggttcttccttctttgttggccattagagaaccaaattatggagtctgtgtagtgtttctccttgatgttaatatgtaagaaatcgttcttggaaagatatgggcaaaaaatctgacttcgatgataaaaagggaaaaggctccagcattgacaccagtctttgcgccaatattt

SEQ ID NO: 264098 - DNA, 533 bp, Cannabis indica
atattaattgtatatatataattttttaaatatatatatatatataaatatgtgaagattatattggattgattctgtggacctttaccctctaacatatatgtaatctaccttaaccattacaccaagtgtattattatttctataaatatcatcttttaatacaaatatatattgtaactaactaaaatacgtatatatttttttcccgattttttttgagggggagactgcactctctcgctacgatgtgggtctacctcggttacctttatatatcaattatcattcaatccgtacaaatataaattttgaatttttcaatttaatcaaatccatactttgcagattaaattggataaaattatactaattaaattcgatcggatattttatgaaaaattttaatttctactttataattgattagccctttaattcatatattaagatgcatgcatcaatatcagtgtgttatctcttaatgtttagcatattataaggtgacctttttagtatttctcaaaagaaaa

SEQ ID NO: 264099 - DNA, 3964 bp, Cannabis indica
tgtggatgttgaaaataggaagagggtgcaccctccaaactttcttttaggggtgcaatgtgcaagcactaccaaaatttagtttataaattatattttgtttcaagatagaattttcaagatgtggtcattataatagggtttaaaatggtattgctcttagtatcactaaagttattttggtgatattttaaaatatttcgatcttagagtcctaattgtaatcttttacaaaaatacagattctagaatagaatttttttaaaaaatataagatccaaactaataatttgtcaaaacatggaattcaaaatgcaataaacccttcaaaatttctatattttcaaaaagttcacttaaatttacatccaataaactttccaagatgagaattgctaaattccaaataataataatacatttcaggaaaatggatcaatttgataaaaatgtaccaattggatttggatttttaaaaagctatcatgcacgactaaataacacatgaaagaaaatcctaaacatttaccactaaaagtctaactgcaaaaaaagtatccctcaaattagagaggtacacagcaaattcaatttgatgtgatggagctgaatacttacatccatggctgagaaaaatatgaacaagaactatacaaaagaaaacaaatccaaaaagaactttattagtttgccttgcatgtggctttgttgtgccctgtttccttgcaccttgtgcaagtaactggtctaaccctcttcactgctcctgtttcactctcttttttcttgttttgggttggtgagcgtgaggttacaggaggaagaacaagggtagtctctaacttagtcttatcatcattattcatcgactgcatattggaatttacagagtttatggtttcagaatatgttaacctgaagctatcagctgtgaagtatcttgagcagtaatcataaatgtttcgaccggtgcaagagaagactgcaacggcatgtgagcaaggcaaaccagatcgtttccaaccaagacagctacagctccatgtctcaacgttcacaacattagtggaatcaccatgaacctcaaaaagggtgtcagaagaaaacagtactttatgaccataagctttattcctttgctctcggagtttttgctccttcaatggtgtaagttttgtacaccacttacttgaatctgttctaccagtatttattaattccatagtcttacattgcagcagttcgatcttctgtactatcggtgcttcacgcacttcctccatccacttggtgtaggtttctgcaacattcaaagtaacatggttataaggttcgcccttgaatgatgtgcttgtccagtattcctgctcaacatccattaaccaatcataggcttgggaagacacctttttaatttgctcagtatgtagtttgaaagtgtcaagtcggattgcgtgggcagcagccaaaaaatttattggtaatgagttcttgccttccccattgaatggaccttttgagcttcttttgaagctttctagaaggtggtatatagagtaagcatggtgagcattctcaaatagattaagcactgtactctttaattccttctctctgtcagagacaaaagttatggattgtgaaattaaaagtacagatttcaattgctccaagaaccactgccaattatcattgttctcgttgtcaactacaccaaatgcaactggaaagacactgtcatctccgtccaatgcacttgctgtcagcagaacctcgtgaaactttgatttcattgatgtagcttcaagaaacaagatcgggcgacagccaatctgaaagccatgtatggaagcatgaaacgataaaaagaggcgctcaaatcttttttcatcactaatgaaaagcttaattaagctaccgggattagcctctgtcatcttctcacaaagccaaggtagctgattatatgcctccttgtatgaaccatgcagttgctgcctcgcatctccaatgccacgccatacttgggtatagtttagctctaccccaaaatcttgaagaatgcttttcgctagttgctttggtttgtgatgtgggctatcttgtaatctatcttttatgatacttacgacccaattcttagctggatgagcagactcccaggatttacctccacatgtatgtgtttcattcatattttttattttaaatgattgtgttgatgagtcccaagatgcataaatcttccaagaacaatcttctgctatacatctgccactcgcacgatttgtgtcgttcttttttagcctgtacataaaacggtgtgcaatggcatacctctgcagtgcctcacgaaattcatagacacttttgaattcctgacctacaccagtgatgccatctttccacaattccattaatctctctgggggaacatcagcagaactaacaagagcagcattaccactagaattatcttgtttctgctccacatcatcttcaactgcatcagtattacgctttgagatactctttctccgaggtgtagtcttccttttcttcccgccatcattagtgtttgcaacaatagtaggaccattggcatcacctttccgagatgcagcacgtcttctttttttaacagtttcagcaggggtagaatccatatcaactgaaggtgaatttttagcattggcatcagatgtggaatcaggaggagtggaactagcagcacctgcatcagtcatatggtaaaataagtggtcaaaaggtataagtttaatttactggaaattttaacaacatcttcgacaaatataataatcacctggtgttgatgtagtgtgagagaacgaggaaactggagtgacaggggtgagattagcaacagaaggcactgaaattgaatgcttcacaactaaaggagtaacaacaatatcagaattggtaggagctgctgccacacaggcagcaacgggcattatggcttcagcttcttttaatccagcagtcctacaaataataaacaatacgattcaatgcatattatttgcgatacaccaaaaatcgtgattcaaattacagtatgaagggtgctgaaatcattccattaaaaccagaaaatagtatcaaatgaatgtatgaaactttcaatttcagatgcaatacaaacagtataagctgaaaagtgagattctcaatgaaacatttagtaaatagaaaacagcagtatgtggtcctaaaaaaagcacaacgacctgacaaaatgaaatcaaatataccttccaggaaagctcaaagcttcacgatcaaaacctgcttttccttggatgtaaacatcagcggttactgaattcccatgaaactcatacatccttttcagatctttatcgttagccaaagtgatcagagttcgcctatttcctggaagaaagtacttgatggacaaggactcgtaggctaagttccacatttcagctagtttcaacttgagatcattgaataaagtttcaggggtaatgtctactgcatgggcctctccaccagcatataataacgttccgtcctcatttgtgacgaatttaccaagagactggcagattaaaataagctttggccttgccatcaagaccttcacccatttcattttcaagtaaagaaattaaaactataatcttaaagaaaaacgtgaaatatgaatgcagttattcttcatcacggtttcaaaatcatgaaccaatatcatctctagactgttatcattccaaaatcaataataactttatgtgatcaacacaaaatgttccaatagcattgaacctctttacagggaagcattaaaaatatgaccctcataccagtccatgatctaatgacaacactttagcatagccgaataacagagcaaaaaacactttctctgtcaccttgagacaataaaatcatatttatttacaaaacacaa

SEQ ID NO: 264100 - DNA, 703 bp, Cannabis indica
ttatacgctgattaattagtgcatgctttttgaacttctttcctctatgaataattccacaatttaaatattaacattaacattaaaatttagacttaattgattaattaaaacaattacatataatttttaaagaaaaatagactattgcactttataataagtacaattttttttaataaacacgtattaattattattattattattattattattattattattattattattagaataatatgaaaaattagattaaaccacaatttttttaaaaaaaaataaataaatattaaaatgagaagataacttgcaacaaatgatctattaaaaaattacacatatatataaatatatattaaaaaaattaaactacatgtatgataacttattacttggtctttaactaaaagtttatcaatttactttgatagactttttttttgaagatattttgatggacttagaacacgaacattggaaaattttagcaagtggctcatttactgatccaaatttactgcatgagaaattttgaattacataatttgttaatccacatgaaaaagtaactctatacattcaaaattgttttttccattttgtaatctttttagtgcactgtaggaattagggaaggccaaaacatctaatacataatataatagcactaatttattaccaaataccaaaatctttc

SEQ ID NO: 264101 - DNA, 608 bp, Cannabis indica
actgcacacacttatgtctgacaagtgtgttcaaatttgtaagtctcctctattaaattaaattgataatcctggttcacaatttttagtaacatgcatatctttttcctcaacatcaattaagtatgatttgttcctgagatactaattagttattttccttaaaagcataacatgtattttattttgtcaattttcaatgatatttgattacattgcttgtttagaatctcatatatttattgtacacattgtattttattttcggtttctaaaaaataaaaaaaaaagagagggaggcgtgtgacttgtttcatgggttaaggaaatcttgtgcttaaatggtaagtatcaacatttattcttctttgatttattttgatatgtttccaattaaagattaatctttatatggtaatgtgtctttaatcttgaaagattgacttatttttggaaatattgttggtaattctagtttccttttattttttttttttaaaaaaaaaggggaaagaagttgaggagtgggcgattttcttttatttattcatgggctggcggttacaatttaaattttcaaatttggtttcctttttcttgtcttgctt

SEQ ID NO: 264102 - DNA, 830 bp, Cannabis indica
tcttccttcttcttcttcttccttcattcgaaatactatagcttctcttcacaaataatttcaagccttagtgattgagggcatgcccacacatattaagcaagtcctcaatcatagtgtgtaagaccgtgtctagatcctggtaaaatgtattccaacaataccttccctttggttaaagccttttgccactaatttggccttgtatctcacttcttcccctagtaatccttttttctctttgaagatccatttacatccaatcaacttttgtcgtggtggccttgtgactctcttcaatgctttgttcttttctaaggaagtcatctcttcatcaattgcagcaaaccaattcttcctattcttagaattaatagcttcttggtaagtacttggtatagagctttcaatttcgtctgctgatgcaagtgcaaaggctgtgtagtcatcaaatccaaatctttctggtggttttatctatcttctttctctgtctcttactagttgatagtcttgtgagtctgttggagatgtttcttcttcaatttattctatatcagtctcttaatgtgtaggttccaatgtatccacctgaactaatctctcttcttcttccttgtcatcgtgtatttccatgcttgtcacactttcattattttcactgctattggttgctgcaattttcatagccatttcatgttccttaaacactacatccctgctaataatgcttctcttatgtcttcttccaaacaccatagcttgtatccttttacccctttagggtatccaaggaacagacactcaagagcccttggctctagtttatc

SEQ ID NO: 264103 - DNA, 2142 bp, Cannabis indica
tatattgtagtcacaagtaacattttgttgtgactaaaaatcacatttaatcgcaaaaaaatatattagtgactaaaatattgttactaaaagtagtcgttttttttagtagtgtcttactgtgtaactaaaatcttcaattaatgatcaaattaaactttaccatatcctaacaataaaataaataaaacacgtaacaaatgttacatcaatatgaatgataatgaaaactaaatgaatatataaataataagacattattatagataaataataaacaaatctatatatattatttaattatatactatatatatatattattaatttcatttattaagagcccttttccatcaaaaatcagtttacaaaaatactttagtttaactttttagtatccacctgagcaattaatataccaaaggtgaactagcataagcatgccaattcaaccatcttttgatactttaagggaggagttaattttggtgacaaggtcaatgctattgataagggaataaccattattttagagacaaaaaaaagggatatggctcacgtgggggctattggtgataggtcaaaaaccttaagcaaggtgggtggctcaaaggtccaccaaccattatgagtatcatttctttgaattgccatgggcttgagaatctatgggccttttaattcatcaaggacctttgtggttcaaaggaaagccaactttatctttttgtgcaaaactctgtcaaggaaagatgttgttgaaatgcttgggtgtctactggttttgagggtactttcggggttgatgtacaaggacataagagtgggggtgtagcattgctttggcggtgtagtgaagaggttcatttgcttggctatgagttgaattacattgatgtctccattgaagcaaatgattgtgggaagtggagactcactagactttatggagaaccaaataagagcttgcagagaagaacttgagatttaattcgtaatttgcgagaggagtatgatctgtcgtggtgtactatatgtgatcttaacaatgttacttctcaacaagataagagagggggtaattagtacccaaagtggttgattaatagtttttgttatgtattggaagagtgtggtctctatgatttagagctgaatgggtatccttttacttgggagcgtactcgaggtttgattgactgggttgaagttatgattgatagagctcttgtttctcaacaacggctcgatatttttcctacttgtaagattttcaatgttgaggcgtctacttctaatcattgcccctttccgttgatcccagtaagttcgattactataggtaaacgacaagtctttcgttttgagaattcttggcttcaagaacccctttgtttcaaggtttttgaggacacatggaatttttctactggtagctccattattaagaagattagaaattgtgccaaaatgttattggagtggagaaaagactattatggtaatttaaaacaaatcaagattgcaaagcggaagtgcatcggtggaagaggggtcaagacccggtgtcaattgaaagatatagagaagtagaggcaaatcttagtaatgttttacttcaacggatgatattttggaagcaaagaagtaagcagctgtggcttcgtgaaggggatcaaaattccaagtattttcatgctaaggctacctatagaagaagaaataattcgattcaaaggttaaaaaatttggaggggtcttaggttggttgggatgataagcttccttcggttgtgacaagctattttcatcaactcttccaggtgaccaatgttgatttcagtagtgtggtagagctcattccttcggttatctctgaggagcaaaatgctaagttgctccatgatgttactactgaagaagtaagacatgctctgctttaaatacatcctgagaagtcccctggacctgacggtatgacaccaggattttaccaaaaatgctggagtgttgtaggcgatgacgtggtgtcactggtaaggtcatttttctctactgtggtgagtttcccgtctctttaaatgcaattaatattgtgttaattttcaagaaaaaactaccagaatatatgggtgatcttcg

SEQ ID NO: 264104 - DNA, 765 bp, Cannabis indica
ttaattacttgttgtaaaacatataaaataatagagacaaatataatttcatttcattctttacgttaaaatgttccaaacttagctacttttattttattagtttaatcgacgatcgagaatttaaaatctcaatatgcacaatcttgtacagcatttttgtctaaaatattatatcggttaatagattgaataatataatattattataaactatgggagagacaacaaataataataataattattaacagtggtatttaagaatttgatgaaccaaattaaaacattaacataattttgtgatctaacaaatagggggattttatcaaaacaatgatgtaatgaagatgataataatatataataagattaaatatttgggtctcatatcatatcatatccaccgacctcattttaatacaacccaactgggaattagaggtagatagagtactagtagtcggttatctcaaattaatatattatagattaattaataacttaattagcttagatgaccaaatactaaattggaaattgctttttcaaatatatatatatggataacaatttctaataattctctaacttgtaacagttttcaatttagtttataatattattcacataattaattaaaagaaattgtattattgtaattgtttccacattttctaaatttagtattttatttttaaaatacttggtcaattttttcaaattcccctattattaaaaataaaaaagtaaatatctattttt

SEQ ID NO: 264105 - DNA, 667 bp, Cannabis indica
aactcttcctcctctagtttcctagcactataaatagtgaggtatgttcactgggcaaagggacagtgagattgaaagtcgatacgcagctaagctaagactatattattatctaagaattatatattcagagatactattgtaagagctataagaaaaggagtcttcttccttgttcttgagtcaatacaaataacgaggattaggctattaccgaactgcacggggcgaaacctctataaaattcatgtgtcttattatttctttattatatattcgttacgacatatcgtttatcgcttataaaaaggactcattatcgttggctaaaagcaaagtcaacagtttcataccttgtaagtcctactcttagcagccactattcgaatggacgttactaagaataaaacacttacagtaatacttatctttcgaaatgctacggcgttaaatggccaatgaacgtccatctattagggatgaatctcactaaaacaagaactgtatagaaccaacaatggagatcgaatgccattataattaaagctcattcttttaaagagtatattttcatttgatacttattttaatctatttattttaatatatatatttatttaattaaaattactaatttagataactctaattataaattttaatttaa

SEQ ID NO: 264106 - DNA, 1160 bp, Cannabis indica
taaacctcgttgattagaaacgagctgcacaatatgtttaaaaatcacgtaatacgcctatgccagttagggtgttacaaatcactaaaggctagccaagcctattcaagggctggccgtcaacatcaaatgagcccaatgggctgttggagataacaatccaggccttgtactgtctcctccaaacaggtacagtctcttcaacctcgaacttgctctctatcatggttggccacaagcacctctgactgaccaacctcctgatctctaccatctagaggatctgtggcctcctctactataccgaccctgccaatggtagccagcttggtaatgtgagggtgaaggtggtgccctgtggtaagattttttggttctggccataatgtatcagtatcaacctcgagatcacgcaaaaagctgctagagaacggactagatactagttcacaaaggcaagactgattgaacctgtgatgacacgattgtcaccgccccaaacccattctcgaaatcacctgcatattagagacaagggaaggtgagcaacttgacaaagcgataaggtacaaacaaaactctgcccaattgtacccaaaggtatttgctagataaattgcattgtacaaggctaggtatcagcaaagtaccgtctcaagtataccaactttgacaaatggtgagtttaaagttgtacattcgactataacagactcaccattaagtctcatatagcgtttctaagggaaccatgtatgagattaaggttttacatgttggaattttataccctaaataaaacctatttcaatatagtctcatttacaatcaatagaagattagaagtcatttaagtttacatgtagttttcatgattatattgttaatatgcaatttcctgttaaattcagaacatatagttattcacaattacagtgatgtcatcacagtagaaagtaattatgatttataagtgtactgaatttaccctgacgtgataatcagcgataaagtttaattacacaatgatatgtggactgttctttctagggcattagcaaagtatactagtatcaaatgcattgggtatacatcagactgttggaatttattttaccaggatttagatttactaacatgtatgtttcattaacatccta

SEQ ID NO: 264107 - DNA, 705 bp, Cannabis indica
agtttgaggggcatgatttggtagatatcaaagtctgcgaagcatggtttagtacataaacaataactgaaaacagtaaaattgaatgaaattattaaatgctacagcagggagtgcagcacctgctgcgaattcagaaaaactgagtcatgtcaagctttggcatctcagattagggcatgttagtcaaagaggatttgaggagttgaataaacaaggtctgttcaaggagaaattgaaagaagaacttgagttttgtgatgaatgtgtattaggaaaagcctgcagactgaagtttcctaaggttgagcacaacaccactgaaaggcttgcctatgtgcactcagacctttggggaccctctagaattcaaaccaaaggaggagctcattatttcataagcatggttgatgatttcagtagagtagtgtggatacatctattgaaaagcaaggatgaggcaatgcctacttttgacacttggaaaaggctgctggaaaatcaaacaggatgcaaactcaaggtattgaggacagataatggccttgagtttcgctcaaatgagtttaatgaattgtgtaacaagttggggatccaaagacatagaatagtgatcaaaacacctcagcaaaatggagttgctgagagaatgaacagaactctgcttgaaagggtaagatgcatgttactgagtgctggaatgga

SEQ ID NO: 264108 - DNA, 933 bp, Cannabis indica
aaaattataaagtgaaaacaaatatttactttttaattaaaaacaaattaatttaaaaattacaaaatatacgctaagtatataaaactcgatacttaatcactttaataattctactatttgttaataattttggaaaggttgtaatggtcattctcttacttcaattatgaaaattttgtgttgttttctatcatagttacttctacatgaatcaaattctggtcagaaaggcacctaagtagattacaagaatcatattgactttctgagcttttttttcttccttataaataagaatcattgactttcatgcctgttttcatgtgacactactactaaactgagatactttttatttttattaaatatagtttaactatatagaaaacagaaacattttcagctagttctaaaagttaaaaaccaggctcttattaaatttgagtttttctttttctttgaaaattagaaataccatcttttctttttttgaaaattaccaaacttaactatcctttattaaataaaatgaaaatttatataatggattaaaaatttgaaaaaaaaaattatagaaacacgtcaacatagaaaaaaatttattttttgtctttgaacctttttatttacaaaaatacatttttttgtaaaaataataaactattttttgattgttttatagtttatttatagttgtattatagtcaggggtgttcacggattggtttggtccggatttttatagtttttgaaccaaaccagtataacgattttttgaatattagaaaccaaaccagaccaaaaaatttctcaaaccaaaccattaagaacggtttggtttggttcgaaaccacggtttaagtggaatttataattattcatatttttaagtatttgtatactattattactaagtttttaattttattt

SEQ ID NO: 264109 - DNA, 691 bp, Cannabis indica
ttcagttatataggcacacttttatataaaatagatatgcctcaagtgatcttggaggttagttgtttgtgctctcctttattgatgtggtttgatgcaccttctttttaaattgatgcccaaagctatttaatttttggtgggttattatcgggtttaagatattaatgcaacttattagtataattaaaaaaaaagaataattaatattttcacccatgtagtttttaatataattatttctcttaaaatatatggttgttattgaaaatttctcttaaaatataagaggtacataatcatgcttacttttataatgttcatttttttttttttttgctgttaaaaaagttagtatttttacttcgtaaatttcatgaactttgattattactaaattatgccattttttaaaaaaattaattttaaaaattataattttctactaatttcttttttttaaaaaaaaattatttaaaaaacctaataaaattattaaaaattagtaaataaaatttaaaggaaaaaaattaagtttatttagaaaatctaaattatatttctaaaaatatatttttaaattttattttattttataaacatgtatcttaaaaatactcaaactaaaattatggaaggactaaatttcaataaatataaaaaatcggaaaaaaatattaataaattgtat

SEQ ID NO: 264110 - DNA, 742 bp, Cannabis indica
tgaattctatttttgtataactaaagtaaacatcatcatataaagtgcctcttttaattattatcattttataaatagcacacaagtcttaaataattaaaataaacatcatcatacaaaaaaaaattaagattataattattcacatattataaaaaaaagtcagctggtacacctaattttaagtgtggtgcattgtaaaagagcctattaatttatatgtacactgctttttggaaaaaaaaaaaaatcaaaatgaaggatagaacttctatttatgatttatttaaatagaataattagtgtttttatcattctatatggaagaataaaaatatccctttccattatcatagtcttttatgttaaattttacttatttttactattaaaatattgaataattagcgtttttatcttgaactttaactattatcatattatgtctttttatatatatatttaatttttttgtaattcttaaattatattttttattgaaaatgcaataaatcttaagaaaaaaaaaaaataaaattcttcctctaaaaaattaagttcatttaaacaaatcagattcaagttttttcatatttatcaactcatattcatattcgttacgatatttctttagttacaaacctaaattgatattatcctcaaaacataaaaaatgaaggtgcaaatttttttatctaaatcaacaataatatactttaggttggatttttttaattattag

SEQ ID NO: 264111 - DNA, 1672 bp, Cannabis indica
tttatgaagcactgaaattgtgtggatatactaatgtgtgaactagtgtgctttatgaagcattgaaactgaatgtatatgattaaggtattttatgaaatgttgagattgttgattatgcatagctataaatacccttaattttgtaatgagtttgctcgtatagacgttgaattgtaaatatacgttgaaagagtgcaatctaccggtatgaataaactgttgaaatgaaatctactatcactttctataattttcttttgtctaatggcttttcttgctgagtcactatgactcacgggtgcttcacgatgcaggtaagaagattaacggttctgtatggccacgagtcagaggtctcccagcaatgtacatatcaaccgtgttgtcttggcttccaggaagcaggatcacccctttttctatgattggatgtataacctactcttgtattaacggttttatgattggttgtaaaagaattttatttgcaggggagccccatattacgatagtattttgaactaaagtttctattttaaatttttttttgaattaaaccacacttttcctaaactaatagattattgataataagattataaaagcacacacgtggcgttcttgagggtcagggcgttacaatgatcttgcttagggtaattattgcgaatttactcaataaaataaatagcgtaatttattaattacagagattatatttggatatgtgggtaccgaggataccacctttgaaataaaatattttttttcaggctctgccattgtggaaatttagcgatgtggttaataatgtcacgacgttaatggaaaattattttgagtgtttttccgaactacgtagaaaattttaaagtatcggtttaacggattagtcaaattaccattaatgcccctaggttattttaaagtttttttttttcattggcggtagattagtcattttgcttttaggttttatcctccttttaattttagactgattatatatataaatatataaaaaaaaaagaaatgaagcaaaccctatttaaggttacttccaaggcaagaaaacaagaaaatttcataacacttcaagcttctttttcttctcctcctgccgaaccctagaagcagctgggaaccaaggaaaaattcactccattttatcaatttctgagctaatcttaaccctagaagttagctaagtggaggtatgatctttctactctttccttgattttttttcttgagtttagtttaggttttggtaaaagttttaatgaattctgagctggggtataaattgaggttaaggttgtttcttagggttgaattgaaacttgtttgagtgtaatttgattgaagttaggggctgtttgattggattggtgttgaaagtgattaattgggataaatttccattaagaaggtgtttttgagctaattggtgaattgtgattaaatgatgtgttggatatgttgtatttggtatattgaactgttctggaaatgcaatttaggtctgtgatggttttggttcgagctggggaagaaaacccagaatttttctggtctgccaacaaccggtcgaccggttggttctggtgtaccagaaccggtcgaccggttactagtaggggaaaatttctcgggttttctctgaacc

SEQ ID NO: 264112 - DNA, 651 bp, Cannabis indica
gatttgctggccggtttagttgggttaatatgtcttagcattttgctattaggcaccagtgcctagcatctttgcgacatgtcacgttgcgattagttagtgatactctataaaagctattatattaaattatatgggatccgatatttagttaaaccaataacgatattgacacataggagggtgctaggcactattggtgccgtttagcatttctcaatatatctttaccaaccatgctgaatagggtgttgatcaaatgcccaccccatccaaactacctgcatcacactacactgaaaatacggtttaaaatcttttgtagtatggtttcagtttgcatttcaccaaaccacacagtgtgatgaactttgtagttttgaatttaataatagtcgtcctaaccacaccgcattatatattacaaaaatacaaatttttacagtaagatatctaattttaagcaactcatatggattcgtttggtatggcatattacaccgtattatattgtatagtattatattaaattgtattttatgtaatatttttatgtaaaactatatatgatattaatttttatgaacacctaaatatataatattttaatataaattaaagtttaacatagtattatataaaaatataata

SEQ ID NO: 264113 - DNA, 547 bp, Cannabis indica
gaattgggagccgaacccagatccctacccaaacctggactcgggacccgaacccgaacctgaactcaaacccaaatatgaaactagactagggagacagaaccacggtcgggacctagaactgcacccgagtctcgaacttgaacacaaactcagaaatgggacttgagacctaaaccagaaccagaccgagacccgtgacagtgatccagatcttgactcgggattcgggtaacggggcctttaacaggccagtagtcggtgtctaggtctgggactcagactaggacaagaacccagacgaagaaccaaaccgaacctagacccagacgtgggacccaaaattagaacctaaacaagaatcaccgaaccaggacccaagaacaagactacgaccgtgaacaggacccggagccagacctagaaccgaatatagacctagcctcaaacccaaactgagactggaactttggcccagacacgatttagtacccagacaggaactgagacccagacctgtagctaaatctgggacccgatcccaaac

SEQ ID NO: 264114 - DNA, 1053 bp, Cannabis indica
ccttgggtaatgtccgatcagatcaatccccaaatggcgaaaggccaagaactttgcatttgacataactcgttgggctgagctcgaggtatctgtgaaaatctctagcatttgtcacattttttaacataggcctttgaatcctcgatcattgtcggccagaaataaaccttgctttagaaatttcttagataaactctgcctggcggtgtgatttccacaaaatccatcgtgtactttagacaaaagtcgtgcagcttcttcttgggtaacacatctgagcaatggcatggagaaccctcatttgcacataattccctctactatgatgtaccgtgcaaccttccttctcatctttcgagcttcatttcgattatctgggagttcccagtgttgaggtgggttgctattggcgtcatctagttttgggaagtatcaatcgtttcgatctcctctgtgccagtgatgctagattcttcgaggaactggataggaaccaagttcgctttatcactcacattactactcgcaagctgagctaacgcgtcagcagtcgtgttttcttcccttggaatttttctgagaccgtagcttttgaactgtcagagcaagtcgtgtattttgctcaaatatgctatcatcttttctcctcgagccacgtattctctagatacattatttaccaccggctgtgaatcattacaaatttcaatatgctcggctttcatctctcgggctagctttagaccgacgatcaatgcttcatattcagcctcattattggttggtttaaatccaaacttgactgcagcgtgtaggtgttgcccccaggtgtgacaagggtgattcctgcaccggatagttgatctgtagctgacccgtccacatgtagtctccaggtcagcttgtcttcattgttacttggctgaggtatttgtactagctcgggcttgcctttcgatatgctttcctccttgcatgtgcattctaccacaaagtctgctaagggctggactttgattgttgttcggtgtggaaagtaatttatactga

SEQ ID NO: 264115 - DNA, 636 bp, Cannabis indica
ggggaaactagatgcatatgtgctacgtcgtgtggttaacattttacctcccaatccttcaaggctcgagagttggaattctaaagtgaaatgtcacggaggcccatagacctttcattttccatgagtttgagtgcacgtgtcatcaatttcttagtttatgtgtgtcacacttcatagggatgcatgtgtgacctcgtttgcatactgatggttggacatgttagtgaggtttttgaggtagatttcattattaatgtgccttggtttcatgcatcgcatttaatggtaacttttggtatactcggatcattggatcctataaaatgtgtttctttaaagttgatatgagttgttagatcgataacacagggataacaatattaatatagtttaaaaataaaaatacaattaatttccacatatggtcttgaagatagttaaaatgaagcttttgattatttctttttaatttattttggagttatttaaaatttgtgttggtatccttacaaaaataaataactaaataaataatattttatgaaaataaatatattttttttctttttgctaaaaaataaataacatttgaggagtgatactgtcaatgtcctgttataatctcttagtcaa

SEQ ID NO: 264116 - DNA, 968 bp, Cannabis indica
actgtttggtctaggcttcttcactgcttcaatcttccctggatcaaccataatcatgtcttttccaacaatatgccccaaaaaggacacctgtgacagccaaaactcacactttttgaactttgcatagagtttatgatctctaagtcgctgcagaaccattcgaagatgccgttcatgttctgcttctgaccgagagtacaaaaggatgtcatcgataaatacaattacaaaattgtcgaggaaatccttgaatactctattcatgagatccataaaggctgtcggtgcatttgttaacccaaatgacataaccaggaactcataatgaccatacctagttcggaaagctattttcggaatatcctcttctcggattctcagctgatgatatccaaacctcaagtcaatcttaaagaataccgtcttgccctgaagttgatcaaatagatcatcaattctaggcaaaggatatttgtttttaacggttaacttattcaactctcgataatgaatacacatccgaagcgtgccatgcttcttctttacgaataaaaccgaggctccctaaggtgacacactaggtcgggtgaatcctagatccaacatcccttggagttgaattttcagttccttcaattcagcaggtgccattcggtagggtgcttttgaaataggttctgctcaggaattagatcaatgataaaatgtatctcctgctgaggtggtaacccaggtaattcctctggaaacacgtctagaaattccttaaccactttaacctctttgggtccatgtaacacaatttactggaatcaattacaactgtcaggaaccctatacatccactacataacaaatccctagccttcaacgctgaaattcttggaacacgagaaccttgaaccgaaccaacaaagacaaatggttcctcattctccggttgaaaaatgttggaatttatttta

SEQ ID NO: 264117 - DNA, 557 bp, Cannabis indica
aggttgggatccatgtgtcaagcttataaaaatttggacaacataattgattaattgaagtcatttaattgagtctacaagcagtattaactagtgtggggaccatgggcctatataatcaagcttctaataagtagagctagaatttaacaattaaattctgtaacttattaatttctcatggcaccactatagatttagaaatgcactcttaataatatagaacgctctatatgttcaaagatatagacatgctattaattatccatcgttctaatccaaataatcaaagatcctctatagatgatttacatcgagtatggacaagtttattgttctaccccttattatattttatccttaaaacacttagcttcctataaatgatatttcaataaactaatataattactgaaatcagagctcttctctttatctctatttagccaagctcgaaggaaatcatcatttcacttctatgtccagatagaaactatagattccatatctatgattaccgctcccactcaattatactatcgtgttcccaaaatgta

SEQ ID NO: 264118 - DNA, 590 bp, Cannabis indica
gattgtagcattgatctctttaagaagattacctgattccaaaaaagaagtcactgcctgaaatatgtcatctcccactatctcccagcaatcttggaagaaaaagctcgagaaaccatccggaccaggggccttgtttccaggaatgtcaaagagagcagctttaacttcatctttagtaaatttcaacatcaggtcttcaacttgctgtgtggaaaaaaccgcacccctgctaactattttcttgaggacaggccttctgttagccatgcttgttcccagcaactacttatagtaatcaacaaatgttgttgagatcagattggggtcaatgatcctggaacctagctggttttctatagagaaaatatgattatgtcttgctctttccttgatacttgcatgaaaaattgcagtattcaaatctccattttggatacaagtgaccttagccttctgttgcaggaatgttgagtagtcttgctgcacctggattagcttagttctcgcagccaattctctatcaagcatctcaatatcaagagggccttgctgtaattgttgttgcacattttctagatcaccttggg

SEQ ID NO: 264119 - DNA, 1025 bp, Cannabis indica
cattctagctttaatcttctctatagcttcattagtccgttgcactgattctggacccagatatttcttttctcctatttcatcccaatgaatgggagatctacactttctgccagacaacaactcatagggagccatccctattgtactctggtagttgttattatacgagaattctatcagtggcagatacttgctccaagagccctcaaaatccatcacacaagctcgtaacatgtcttctagtatctgaattgttctttcggactgtccattagtctgaggatggaaagcaataatgaattttagtttggtacgcatagtctgttgaagactctaccaaaacatggaagtaaactttagatctctaaccgatataactttggaacaccatgtaatctcactatctctttcacgtacaattatgtatattgatccactataaaggttgtttttaccagtagaaagtgtccagacttcgtgaatcgatctaccacaacccaaattgaatcgtgcaatcccgtggttttaggtaatccaactacaaagtccatggttatatcctcccacttccattcaagaagtgtcaatggctgcagtaaacctgccggtctctgatgatgacccttgatttgttgacaagttagacaccgggataaaaattctaccacattcttcttcatcccactccacacgaagtagggtttaagatcttggtacatcttggtagtgccaggatgcaatgaatatggaatggtatgagcttcttcgaggattttgtttctaaattccgtactacttggaacacaaacccttgtcttaaacacctgtatcccactatctcacattgtaaaatctttggcttgacaagctaaaaactcttttctaatcttcattaattctggatcaattacctgagcaactttaattcattccaacagatcagatggcagcgtcaagttataaagtttgcctacaattaactcgatgcttgatctgacgttgtcttctgctaactaacgtga

SEQ ID NO: 264120 - DNA, 968 bp, Cannabis indica
ataagcatttttataaagtaatttcaatagatatataagataatttagaaaagagatagtatcataaacattatataattaattaaaaattttaaacttgaacaaaatttgatatatcaaccaagtttatagaataccaaaaatatttcattattttatatttgaaaattagaaaattgtgttttaaataagcatattttataaagtaatttcaatagatatataagataatttaaaaaagagatagtatcataaacattatatgagttacattttaaaaaataataattacatatctaaaacaacaaaataatatctgacctaaaaatttaaaattaaaataataattttaaaagtaaataatcaaactaagtaacctaatgtgtgtgatataatattatcttgaaataagagtattatatatgtttatattatttatgaaaaagtaacccattgacattttatttgcatcaaaagtaataaaaattaatattacgttttaaaacttaaaaaaaatagaaaatataaagaagctaggtccaggtttggcacctgcatttggtacaggtccaggtactccgggttcaaattcggtggtccgagttcaaggtatagggttgggtttatgtcttgatatggtataaaatattgaagtatttttttttttttttaaaaaaaaaaaagaaacttaaaataatgtttagaaaacattagccaaacattattaaaattttaaaatgacaaaaatattttttttatgctctcacttttaaaaatacaattcggaaaacaaaaaatacaatcaaacaacctctagatttgtcaaattttttctattttccaaaggaattgttttggaatccaatatttctgctactgctaatgtggcattggtataaataaatttgtcgaaggtattaacgtaaataaattaattttagaaataagattgagaaaaaaaaataata

SEQ ID NO: 264121 - DNA, 1587 bp, Cannabis indica
gacgacactataatcatgaacaaatatacatatgtacatatttacatatgctatggacttaatataatttatacattaaacataatcatgaaataaatcatgtgaaccatgcaacataaaacgcgatttctaaatcttttattaattagttaaatctgattatattgagatgagttttatttagggcacaaacccaacatacccatcttagcacaagtggtctgtctcatcgctcttgaagtatagtactgaagaatactgatgacttatcaaaattcacttgctgccccaaagcagtagcaaacatatccagaagcttaagaatatttgtatcctcaccatctgtagccttacaataaaggaaactattatctgcaaatagcatatgagacacagtaggagctccatctgccactttacatccatgaatccatttcttatcctgagatcttcgaataagggccaagaagccttcagcacacacaaaaaatagataaggaaaaataggatcctcttgtctaagtcctttacttggcacaatcggttgtaaagtacgaccactactcacaatcttatattgcaccatagataagcagccataaataagtcgaacccatttatctccaaaatccaaccgagtaagcataacacacaaaaagtgccaatccaccctatcataagctttgcttatatctaatttcaatgccatataaccatccttgcctacttgtttcctctttagataatgcaatatttcaaaagagaccataatattatgtgtaataaaacgcccaggtatgaaagactttgattaattaaaataatctctgataacaatcctttcattctattagtaagaactttagtaatgacattagcaataacattccaaaaagagataggtctcaattcactcatttggtcaggcttctttttttgttttagaatcaacactatattggtatgattcatccccacaagcatctcctcagtcatgaaattttttttaacagtatttatcacatcagtaccaacaatagaccaatacttttggaaattttttggattcatactgtctggcccaagagacttgtcaggatgcatttgaaacacatcgtctttaacttcttaatcaagaacaggccgaagcaaatccacattatgctcatctcgaataacaggagtaacacaatccagaacttcatcccatcctactggttcaacattaaaaatctttctaaaataatctaacgtaatatcacctattccattatcccactatctcgagttcccctcagggtctttcaagctataaatctgattattgcgccttttagtagaggctttagaatgaaaaaacttattgttttgatctcccgtttgtaaccacaattgttttgatctttgcctctaaaaaatttctctttggttaagaacgacaaaaaactcccttttagctttaaaaaataatttcttcccatcttcatctcttcgccttttgaattatttaagatcacgattacattgcttaatctaaaaaaaaaattccaaaaacatcctttcccaatactgtaaagctaaaaaaaa

SEQ ID NO: 264122 - DNA, 954 bp, Cannabis indica
caataaacactgccttatttgtggtgtgtgtttatggtgggtgaggttttttttttttttagattcaatatttaatcttttggtgttgtttgataaagcacaattttggattttttatagtgtagtagtgacagtagtgtgagggttataatttatttttgaatataaccttttttcttggtcttataaatgaaggaaactaaatcgatgtttattttaaaatgtaaaagcaacctaatttgcatgattaaattgaggagcagaaaatataaaacttagcagaatttgagaatagcttatccttgcattttgccagatttcgacctaaaattcaatgctctcattcccatatgaatatagaagctcatttaaatgattgcatttcttcatttctttgtattccaaatatagtaattttatttgcaaaatatatgatttatatagtacaaaattatgataaggacatttgtaattttggtataggagagaaattatagttcatattttttatgtgatgatatatatataacacatcccaaccgtttgtcttaacttattacaatgaaaacaaggttaaaatagttcattatcatattgcgattgagagaaaactctctcagtgttcattgtcatattttatcattattattattattcatagtataataatgttttaagctctggtgtctttgtctatgactttgtatgaggctcgtgattggttgaaacaacgtcagataattctgccacgtcagctttggcaagccattccccattctcatttctttctttattattattttctgagattttaaagtattatttaccaacccacctcaccaatttctggctttgaatatcttttgtctctctttcaacgctaaaaagaaaatccactttgattattcataagattcgaatcatattatccgaacattttctcatctcttctcc

SEQ ID NO: 264123 - DNA, 1782 bp, Cannabis indica
cccccagctcctgattcttgtgtgaagactccataatatattgatgatgatagatggcagaatctggagtcccgttggggtgttaatggctatggaggagacttgtgtgaaggacatattaggtaatgcacttgtaaaattgggtatatttcaattaaatataatgtagaggtatttttggttaattgataaaaaaagagggcattcctcaacttatcccaataatttttgtgtatttatagtattatttttcctataatattaaataaataatatgtattttttgtattttgatacaattattaaatttacatccgtacaaataaataaaaatcttgcatggaattgcctgtgtaaaagcacatgatattaattgttatgtatattggttttgataaaaaaaaaaaatggtataaagatataaaattaaatatgattgtatatagatatttcgtcttgtttgaatactgtcgtttaatgaaagcacaataacttctgcaaaagttgaattattgaggaattcctattccctttgtgtgcactgtgcgcagtgtcacactttttctttttaaaatataaataaataaataaatatcatccatttttttcagtgtgtattatatcatcttatttttaattaatgtataaatatctttatttttgttttctgagaagaaaaagccccatagaacacaacctttaaaaaacagtatatgctcaaatgaaggggccaaagacaatcatatatagattcattgataataattggtatcatatctaacataatgttctgaatacaagtaggataatccgccaccaaattactactatggcaaaaaagtgatatgatattaagttattaaaatttaaggacaatgtataaaacaaatattttgaaaagaagaacaaggcgctataataagaagaatcaaggggagcccgacattgtaacttgagcaccatgctttggcagtcggactcaaaatacacctagtgaagcccaaatatatgacactgacccttagcctttcgaagagccataacctccgccatctccgaatcataacacccagggccggtcttgaaaatatataatattatacacctcaaccaactaagttatgactatttattgtttataatacacttaattttattttaataaaagcctaatattttttttttattttgggcctccaaaaaaggaccctaggcacggcctagctcgcctatgcctaaagtcggtcctgataacactccaaaattgttaaacttattttaccaagatattaatttattaacatttatgtttaattatctcataaacaatcaaatattctaaaaaataaaagccataaaacgatcaaataacacataaaagattagacatcctcacattggttgtagcgaaattaaatatcttcttccgttcaatttctctaatctctaacccttgaatcttgttctctaggagagtattattaaataatgaacctggacccatgaccgaaacagactaatggcccaatatatttgattttttcatttatttttaaaagaaataattatatctttctccaaatatacaatttgtttaattttatttaataattataaataattatcaaacatatttataatttaaatatatttattaattagacccataaaatgtattaattaacaataaacccctatctttcttttcttctcaaatttttccaaacttagtaaaaattgtcaaataagacatactcctattttagaattctaattaactta

SEQ ID NO: 264124 - DNA, 2204 bp, Cannabis indica
atctatgtttagcgctcccattcaattgaactaccatgttcccaagatgtaaatatctacctgaaccattacttagcttccacgaacatctctaagaacataaataatacaactaagatgaacctaaccatatcaggattaagatccatagacctaagatcaaccattgatattgacttagaaagatataacggtaagtttatgatatcttatccaagatcaatatcgatcactttcaatgtatacttcatacattcgatactggtaaactttgccaatgccttggaaaggacataacagttatccaaggtgtatgtataccttatcgtcaattatcatgtcagtctaaatccagtaaactgacaaattatgggaattaaacttttgaacatataatcatgattacattccaatgtgctaacgacaatataatcatgaacaaatatatatattctggacttaatagaatttatacattaaacataattatgaaataaatcatgtgaaccatgcaacataaaagcgatttctgatcttatattaattagtaaatctgattatattaaaatgagttttatttagggcacaaaaccccacatcttctattgcatttttactggaagaattagattccacctgaacaaaaacacaaaaaataaatgaaaaccagtttcatcatacaacaacaatgaacattatgaaaccaaacaaaaactagttttctcacacaacaacagtgaagactatgaacaaaacataaatgataatacaatgaaaataattaaaaccagtttcatcagtcaatcaaatagaaaaaaaaaatactcacaaatataataaaaaaactcgcaatgcaaaataataatctaaaaataaaatataagtgtaaaaatctgattcgaacctagaaataaaataataaaaagaaacttaaaataaaaaatagacaataacatcataaaatggagcaaccccatcacagaacccacctgtgaaacttgtttcgaacttgtgtaccctgtgaaatcagtttccagaaataacaaaaaaattcaaaactcagttacataaaataataaaccaactattaaacacataaatgagttacctaaagacacttaaataataaaaattagttattcaataaaataaagaataaataaaattgagacataaaaacgagttatcccataatatatataataagttattaaattaaattaaaaaaaattaattacttaaaaacaattaaaattctgaaacataaaaaccagttatttttttccacaaaataaacaaccaattaaacatctaacatggaaaaatcagttacgcaaagcaattttgaattgattaattatgtcgacaaaaattaattacttaaaaaagaatacatatactacacatgaattcttaacaaatgacttataaaattaaattgcagaaactaattacattaaaaaactaattaaaaatcaaacaagaagaaactatttttataaaataaacaaattaaaaactaacaaataataactagttacttgaaataatataaagatttttatcatgtagtttcaaatcatcaaacccacacttaaattaattgagttgtcaaaaaattttatggaaaaaataataaaaaattataataagcaagcgttctaaagtaccaccttaactttgaaagaaagacataacacattaaaataataaatgaaaataaagcattgaaactagtttcatcaaacaccataaatgtaattgatcaaaaagaaaacattaaaactagtttctataaaaatacaatacatgctctagttcatcatgctcatttctgaatgcatactataataattttagctgattaacattatccccaatgtctacatgtttagtaagaaccagtttctatatgactaaacaaatagaaaacaaaataaaaataaatgaaataatgttttattattattattattattattattattattattattattattattattattattattattatttcctaaacatatttaatagtagtgatttagtcccccaacttctttttttggacttaaaatttgttgacttaaactcttaggtctccttaatttgatgattaataaatatttgattattatttgtcactaataatttgttaactttgtagcaaattaaagataaaataaatttttctaagg

SEQ ID NO: 264125 - DNA, 847 bp, Cannabis indica
aattaaataaaatcaatgcaaaataaaaaaaaaagaaaaaaaaaagaaaagcgtaagaagaactcccgtaagtttactttgtttaacatcgttagctcgactgcatgttgtgctcatgtggtcttcaagtcaagttttctaagaaagactcattcattatgtatttattaatgaaatctaacacattatacttaattactgcaccattaaattctattataggtatccatgctttcatatctaacttcttagtagtgagtaagaagagtctctcgaatagagttgatgtagaaatcacctggaatgacaagtctataaccctgcacataaacatcttcaactatccctgagggataaggattagtttgattagttaattgaattaaaacatgagtttctcttaatggaccaagatttaaataaacaaaattggaataaaatatattattaataattgctcataaatctaccatgcaatgatcaaacctagtgttactaattgtgcattgaatgtacttgttttaggcaacaactttttttggagaacaacaaaaacattcccccccacacttattttctcatctccattcatttttctcatttggacacaactcattaaaaatgttagtacaacaaggctctcttttgattacctcaagacatggaatttttatctcaatttttgaaagagtttcaggaatctccttaatgggctctactttcttagattttttcaatctacttggaaaaggtggaggattgacataagttggtacaattggtttgtatgactctttcaacgatagtggaccaactaaagtagaagattcaacctttggtggagatg

SEQ ID NO: 264126 - DNA, 525 bp, Cannabis indica
aacttcaattgacataattttttctattctagtatttattttactttaaaaaaacaacacacacacacacacacaattttaaagttttttatggtatttcttcatatataatgatttttcccatatttttaagtttttttttataaaaaaatgaaatattttgtacacttaagtttttatgccatatttataaaaatttacatttgttctcacatttttgtaaataactctttcttttattatgtttataggttggttttatgtaatttgaattataaatgggaaatttcaatttttgcccttaataatataccccatatcaaattttatacccttactaatttatacaaaacaattcctattttcaaattctacccaaaataccccttacatttaattttcccactctctctttcccactctttctttccctctctctctatctttcccactctctctccgacttttgctcttcgtccctgcccaaaaacaaaacagttgaacgacgacgacgaccacgcattt

SEQ ID NO: 264127 - DNA, 430 bp, Cannabis indica
gataactaatcagattgtaaagagttttatttagggcataaaacctaacagaagcagctgggaaccgagtggatttaattttatttcaaccattcttgagctaatcttagcactagaagctagctaagtgaaggtatgatctttctacactattcttgatttgttttcttgagtttagattaggttttggtggaagtttcaatgaattctgagctggggtataaactgagggtaaggtaggttcttagggttgaattggaacttgtttgaatgaaaattaagtgaagttaagggctgtttaattgaattggtgttgaaagtgatgtttagtgcaaattttcatgtgagatggtgattttgagttaaatggtgaattgtgattaaatgatgtgttgaatatgttgtacttggtatattgaactattctgga

SEQ ID NO: 264128 - DNA, 1651 bp, Cannabis indica
gcgcgcgcacctaggctgcacgcaaccttcatgggcagccaccaattttcaacccaaaagtctatttttgggtgattttttcaccctaaccataacattttcaaattcataaattggttattttgttaaatattttattgtttataaatcataagttagaaaaattatattttatatcattttacttattaaaaatttataaatagtattttaaatatttaaatagcttaaatatttttggagaaattaaaaaaaagacttaatttgagatattgataattattatttgtttattattttattcttaaaataataattgcctaaccatatttattttaaaattgatttattttgttattttaattttattaaattataagattagaaaatgattttaaaaatatctaattaaatatttttaaatcatttatcttattagatatttaatttaatttgacaaaaataattcaaataaaacctagatattttaaaattagtttcaattttaaattttggaaaaaatattttaagttgttttcaacaacactaaattattaaaatttagttggttacataaataataatttaattatatataaatatcttatttcacatttgttacatggtattgtttattcaaaaaaaaaaaaaattaacaaacctattatttatttaatctaaattgctatgattaacttgttgacagatcaaataatctgattttaatcatagtccaatttttaatagatcttataaataatttgtaacaggtaaattttatatttctttcatctatgtaaacctaaaaatatgatagggtcaatctaaatcaatttgacatgtgtgagcctatatgtttacttttgggcttagatgcatatagaaagcccatttatttttagatatttaaatagactaggttgttaagataaaatatcaaccatgatagtttatttaggcccaattagtattaaacttattcaatgaataacaattatctaatgaaaggtcaaattcctctcttttgggtcttgtgtgagaattaggaggccattagtagaggatacgacatactagaccccaccctccctcaaatgaacaaccccaattgtgaaggcgcatttgccttatttaaataattgtattaggcgaattatactagtttaacctaattaaaatataattcgcaacataattaattttgaaataaatgaaattaatttttaattagattattttaaaattaatttagaaaaaaaaaacttagtttaaagaaagcttctagatagtaatttctagtattttctaatatttgagtggaagaatattttaagttgaaaattaattttagaccaacttaaattaggatatttttcttagactttaaataagaattaataattaaattaacttaattatttatttctacttcaagaaattgaattaaattagagaatataattaacttgtaaattaatttgttaattaattttggaccaatttaaattatattatttttcttacatattaaattagaattaataattaagttgattttattctagatacttaattatttctattttaatgaatttaattaaataaaaaattatatttaagtcggaaatttattaatttcagatcaacttaa

SEQ ID NO: 264129 - DNA, 584 bp, Cannabis indica
gcaaaggggaaatgaggagtatatgctatatcctgcaggctttgagattgttttccctatcttctggtctatacccgaatgctgataaaactgcaatttattgtagcaatatgcaccaggaggatataaacctgatcttgcatctatctagtttacaagacaggaccttccttttacctacatggggatcccaattttttcaaagaaaatatcttggaaggaatgtgaactcttggcaggaaagatgactgctaaaattaaaagttggagctcgtggaatttttcctttgcagggagaatcactctaatcaattctgtgcttatttctatccaagcttattggagccaaatgatgattatgccaaggaaagtactaaaaagtatagagtcaatatgtagagtatttctttggaaaggccaagcagtttctcaaggggatggagcagttgcttgggaagatgtgtgtcaaccaaaaataactgagggattaggcattaaaaagctggaagagtggaacaaggcagccatgtttaagtacatttaggccattacaaatagacagaaagtttatggatgagatgggt

SEQ ID NO: 264130 - DNA, 502 bp, Cannabis indica
tgaagcaagaaccggcaatacttagcaagagctccatgatctgctactaagctttgacaacaagatcgaaaggctacaaacataataaatgtattttaaaaatatataaatataattggatgaccattagatgataattgaatcagttcgattcgattatctattggataggatttcccatctaataaccgatccgatccgattagattttcaaaatatacattcgattcgatccaattataatcagatatccaattctattagattgattggttctaattgaattggatgactttctgcaaactcataattcaaaataatattaggataattaataacttcgtgttaattgaaatactaagagaaaataagaagaaaaaaaagttaatattaaaatatacctaatatattagtatttatttatattatagagtgccctcatgtaaatttctaaaatctattctatgtatgtacactaaaaaaatgttttgctacatattag

SEQ ID NO: 264131 - DNA, 685 bp, Cannabis indica
tcttcgtttttttttttggaaaatgccgacataacatgacttataggtttggtacgctttattgtaatgtattgtattgtgtaaaactgtattgtattatattgtattgtattaattagtattatttaatacaatacaatatttggtattgacttgtactaattgattgtgtaaatttataatatatttttaatatactcgatcccaacaccatctacggttccgggtctcaggtctcgggtctgggttcgggtccggggtcgggatcgggtccgggtccagttctaggtctgtgttcgtgtccaggtcatgattcgggcccgggtccaggtccgggatcgggtttgggtccggatccaggtttgggtccggggatggggtcggggtttggtccgggtccaggttcgggttccaggtccgtgtccgggtcatggttcgggctcgggtccgggtccgtgatcgggtccgagtccgggtccgggactgggtccgaattcggggtccaaggtccccggaccgggtccagggtccggggtcccaggatcaggtccagggttcgggtctgggtcggaaattggtgttgtacccccaaatcctttataaatattataatacaagctaatacggactatttattatgtattaaataatacaacataagttgtattaaaaaatttggtgtaat

SEQ ID NO: 264132 - DNA, 696 bp, Cannabis indica
aaaatcgttgactaatagcttgtcaacttcctgttatagtgccccttgcctctcggaatccaagggcctcctttgtctctttgccgggtagtttggatcaacatttaagtgatgatagataatcttagggttgatccctatcatatccccatgactctaggcgaattgatcctggtttgccttcaaaaagctcactaattgctatttgagctgctcgtccaggttcttcccaatgtatacacatttggtcggattttctaggtcgagaataacctcctccaattcttctattggttttagcaggtttctttcatcttgaactcgaggatcaagatcttcatctttcttctcgttttctcctgccaagatcgtcatcagctgatgatcgacctttctatgctgcagctctatgcgatagcaatcgcgagccaacatctggtcgccacacaccactcctacaccatctggtgtttggagctttaaagataggtgcttgatcgaaatgactgcccttagtccgatcagtgctggacgacccaacaatatgttgtaagccgagggcaggtcgacaaccaagaagtcttgcataacagtagcagttaaaggtgcctcacctatggttaatacgagcacgattatgcgaaggctagcaatgctatcccggtgaacctgtaaagattcactataaaaggcctt

SEQ ID NO: 264133 - DNA, 978 bp, Cannabis indica
tgcccaggctgcccaagccactcaggaagcccagaactgggaaaataggtttgcagaaatgcaatctagaattgaggaacaagataacgagatgcagcggataagacaacaaggtgctcctgcagtgcctagtccagaagttcaagtggcacctgcccctgttgtccaggccgaaccagtagtagcggtgaatagaatggaacctctgtatgaaaggttctgcaagcaggcacctccgatttttctgggaggtccggacgtcatgaaagccgagcagtggctaacagtgattacgaagatattgaacttcatgggcgtcaccgggaatgacatagtggtgtgtgccacatttcagtttcaagaggatgcgttggtatggtgggacatggtttccatgatacacgatgtcaccacgatgacctgggaaaagttccagcaacatttcaacgcgaagtattacaatgaggccgttagaagtgccaagaggaaagagttcactcacctgacccagaaagaaaatatgagattgacagagtatatgacgtagtttgatcagttggcgaggttggcctcgggaattatgccaaccaatttcagcaagaaggaaaaaaaccttgatggactgaatgtgaagatcaagcatgacttgatgattactacagatgacaagaccacctatgctgaaatggtggagaaagcactgcgagctgagggcgcagttgggtgtaggactgagtcaactaggactctagtaagtggcggggctcttacccctcctgcatcaggctttagtaggggaggtagtggttaggccatggaccagaaaaggaaagcttccactgcaaccggtggctcgggacagaataagaggttctgtgggaaccagaacggaggcagtcgtcatggtggttctgagaaccgtttttggtacccagagtgccccagttgtaaaaggcaccatctgggtgagtgtagagg

SEQ ID NO: 264134 - DNA, 941 bp, Cannabis indica
agatggtcacccccgtgaaggcttcttccagtgcccctcccgacactattgacttagtggatgaggaggaggtacttcctgaggaagctaaagaaggtcaagaagagcaatgggctcttcctggggaagttgaagaaagtgaagaagagcaagaggttgctctggtgcgcaagcgcaaaggcaagatggtagctgaggagacacctaaacggccgcggagggtggacactccggccccgagccatgatttcgggatccctcctgaggcggaggaatttacagtgcctcccagcattgtgctgactccgattcccggagatgaggcgaggcaggagcttcggatagccaagtacaattatgcccttgacgagtactcccgggggcatgctgaggtggaggccttgaggagggttctgcgagaggaggtggtaaactcccttaacgaggagaacttccagaatccgtgggatctaaacctggaccccctgacggactggttcaaccgcttcctcgggcctaccttggctccttttgccgcggagatgaccggcgagtatgtcgcccagctaacccggtgcgcgcctaagcggtacgctgcttgtgcatccttgaactccgtctttcaagttcaggatctcagccacgccctagccgcggtaagcactttgcgacttacttcttttctcattattttacttaaggcctttactcactcttgcttccttttccagcttgctgcagaggccggccgcctttccaagaccgtaattaatcacgacttcatcttgtccgaatttgggggcatagacaaagtcgtgaagatcctacaggacctgtctgctgaaaggcgggcgttccgggaggaggctgcgcgtcaggaggctcttgctaaggccaagttcgaggaagaggctaagcaaaaggaagcccaggcggaggcg

SEQ ID NO: 264135 - DNA, 773 bp, Cannabis indica
cttcaccagcccaactacctcaggcccaaatgtttcaggtctgctggagtcaaataccaccgctagaaatcctacacaaccattgcatagtaaatccctagccctcaacacagaaataaccgggatccgagacccctgaactgatccaacataaacaaatggatcttcaccttccggctgaaaagtcaccattttacgcctacaatctatactggccgaatacttggatagaaaatccattcccagtataatatcaaactcagttaatttcaattctatgaggtcagtactcaattccctatcttcgatcctaatcggcatagacctaatgcgcctattagagataaccaattccccgctaggcattagggttccaaaccctctttctaaaatatcacaaggcctacccaaaagatcaatcactcttgtagccacatatgaacgtgtagctcccgagtcaaataatactgtaaataacaagttgttgacgggaagctgacctgtcacaacagaaggactggctgcagcatcagcttgggtaatggcaaacacacgagcaggaaccggtttcacctcagctttcggctcctctttctttgcctgggggcaatctttcttgaaatgccccaccatgccacacaggaagcatgtcttccggttacactctcccggatgatgtttcttgcaccttggacactcaggataagagtaaccctggcgtcctcctctgccttggttcccacggaaccgcttgctttgccccgagccaccag

SEQ ID NO: 264136 - DNA, 1888 bp, Cannabis indica
attacgatttactaatgtgctgtccaacacattgcagttaattgaagccgttagaatatacattaacatgccatgaattagaagttgataagtaatatcttatgttactcaacaaaatgtctgaggcttaacctgtttcgtccaataaattgaaatggggctcttctaatcacgattcttaaatggcggaataaataataacagtaacacaatttgcaattttaaagcatgaaatgagtgggatgattattaaagaaaaaaatctcaagagggaatataatagaatacaaaaaagaaagaaaaaaaattaatttgatacagctgtagaagggaaaatcttcttgatgaattctaagaagcgctgggaatagaatgtggggtcaacagcagagattgacaaggaatcaaactgaagagatttgtatgcatgctcaatcttcttagtcatgttgtattcttgcaatatgtcaatgacaccaagatatagcacaacatcatacacctcatgaaacatctgttcttctttccctcgaatctgctccgcccttgctggcatgttcacacctagctgaatctggagtctgaattaaacaagttacaataaagggggaaaaaaatcagtctctgttagcattatttgaagagcaaatcatctagtattgtccaacatttccttttcaatggtggctattgacaaaacatatgttcttttcatccattgtctaatgctccaaaagagatttatgcaaacaccaaatattactagggaatgagtgactaatctctggcattgtgaggtttactatacccgttagatatagcagagaatcataccttgctgtaccgggtaggaggaggtccacttcctcatcaccagcagctgatgctcgcaatctactacctcggatgtgtggacccacaaccacactgttatcatcttgtcctcgagggactaaaacaagcccttgtggacaattggcaatatcatcctctaaagtctctgtaatgggaacatcaccggcaagctcttcaagttagtgacaataagaaacaaagtatctaaacgagtttcagttttttttaacccttaaaacacaaattttattccgtgaagttttcattaagctgccttgatgcaatttagttatcaatgcaataaatcatgtattggaatacttattgggctaccttcctctgcaagcattcccaatccatctgcccttctgctatgattgaaagaagacagagaccataggtgccgaggtgcacgataatgtactcccaggagaaggctatagtccatgatgcactgagcttccaagaatttactatcagtttcaatctggctgcacaagttatgttgagcaagaaatcaattaaacagccaaaccaatgagctttggaactaaaaaatccgtatggacaagctcgcatgttgtaaaaggtattgtccacaccacactaatgttcttaaaagagacaaactttcactaactatgacattcattgagaaatcaaaacaaactgttattgtaaggccaattcttatatgccatagtagcataacaaagcttacaattctaccgtacaaaccaaaaaacaaacatctatgcaaataaacagtcctaacttttcacttacctcattaaagcatctctccaagatggttccaaatagaagcagtagttcaaatccaaatccttgagagttgtgttttcatcaatttcaaccttgtctgaagaacgccctaatgatgagccctttaaatcaaatcttctgtgtatccttaactctgtgcagaacatgtttcccatcactacaaaacgaaactgcagagtaaaaattggttatatcatcatcacattatcgaagaagaggtggagttcca

SEQ ID NO: 264137 - DNA, 537 bp, Cannabis indica
gtcagaattaggttttatgaaaaatattttcttaattatggggatatatttgaattttaagtgtattacatgtgttacatataaaaatttatgcttttcatattttatgcttgataaaagtgtaatgtgacgttttggctattagagtcacttagatatagtgaagtatcttagaattagcggggcaagatagttagacatttaattttttttttatataattttgtatgttgtaattatttaggaccacatgtaaatttttttaaaaaatgtgaacggtttacagtgtcaaaaataagattcaaaccaatacttaccacatttataagaaaaaatagtcccgagtataacaaaatatttaaattttattcttacaaatatattaatatttaaattttattttttaatattgtaaattattaaattttttaaaaatttataaataatctaaataactataaaatacatgattattacaagaattaattaaacaaatatcatatatactaaaacaaatacgattgtaacgaaacctct

SEQ ID NO: 264138 - DNA, 328 bp, Cannabis indica
tgaaccatgcaacatttaatgttatttctgacctatattaataagtaaaactgattatattgaaatgagttttatttagggcataaaacccaacagtatcttccttggataccttgaaggagttaagggttacaaactaatgagcattgaggaaggcaatcaccaaaagatgttcattagcagagatgttgtgtttgatgaaggaattttgtacaaggatctgttcaaaatccaaaacaccagaatattgaagcagtcagatcagagagttcagtttgaggtggagcctatggaacaagatcagattacaaaacaggtggaggtacag

SEQ ID NO: 264139 - DNA, 2021 bp, Cannabis indica
cacgagactactaactgtcacaaaatatttcgttaatatataacatttttttaaaaaaatgtttcgttaataaattgaggttgattatattttaggttagaggatcataattattaactgttaaatcaacacaatcataatttaataagagtaatttgtgatataaatatataagtttaactttcaatgattacaaataaatacttaagttaaatgttgagtcagccacatgacgattcctaattgatcacgatcattaaatttttatttattatttaaaaatttatttaaatatactaataaaaaaatatatataagtattgacttgacacttaataataagatttattttagaaatataacttaaatatttgtactgtaaaaaattaaacttaagtatttatctaaaactaaaaattaaatttaagtatttacaccacaaattactcacctaataattatgtataaaacaatgaatataaagatgcaaacacataattttattaagtcaaaaacataagataacttttgaagcaaaccaacttcataaattgaaatacaaaaattaccaatttcaagaaatacattcaactctctaaataattattcaaataatattggtatacacacctcgtagaaaatcacaaacacacatacatatatatatatatatatgaaattattcaaattataatttttcaaaacattatgggaatcaaaacactccacatgtgtgtttttcttccccccaaaaaataaatataaaaaccctaacaagatagaattactattaatataatattataattgttttctttttcttataatttttatttttaggtatcaaactcaatcttgatgctaccaattgagacttttccaacaccaagcttaggaatcaaagtaacaacaacatgttcatcatcttcagcatccaaatcttccaacaagtcattgagtcccaacataagacaagtcttgagcttatggcccttgtgcttatgtggcacgctgacgtagctacccgcgaactcactcttgtcgggtccacttggcaagtcatcttcatcgttgatgtaaacatcgaacttgattgctacatctctatcgaactcaatcccatcaatcaccaaaatttcattagcctcatccttctccttcttgctccttttcgcctttttaggcctcgccactaaaattttaaccggcttgtccaaagtcaagggaaaacttaacgtggtttgaaacatgttattgtctgtggctgcctgggccataggcacaccaactcgtcccaacgctcgtttgactcgacttagtctagatctgcgtggcgttgggcgagtgttcaaccatggaatgtccactttttgataattgtacccgagttttctactgtccaaacaatctctcacctatttaaataaaaaaaattaaaatatattagccttctcttaattacatgcaatttcatttttgcttgtgttattttttctttcttcataatcataaaatattgaaatttaaacttcaaacaaaaccaaatataaaccatagctagtgtgaaattaaacaagaatatttttttttatttaaaaaggaatgtagggtttattgtatatattttattttgaaaatctaagagattaaaataattaattatttttttattattactttattatatatttaatagaatacttctgaaaatcagccattattcttctaataatttacttatttaataattgaagtcaaaccattggttaatttggagaaaagtgtaatctttattcaactattcattttgaaaacaatgcaagttattaccaagaccttcaattttaaaaaactaacataagtagtacaaaaataatggtaggtacatgtgatagagttttaataattgaataaaaggattatttcacaaatatacgaaaataataaaaaaaaattacaaaaatacagttaaaaagaattttaaatatttttatgattttatttatagaaaatacggtctt

SEQ ID NO: 264140 - DNA, 592 bp, Cannabis indica
agcgtttatatattacacaatgtttaatttggaactcgaacacaggacctgcaacacacacgcaccttcttttttagaatggcttcttggggacaaggttgagagcagttttcttacagatagtaagagaatgaccagcaatctcgtccatgttgaaatcttggtccttcattccatcagccaatttccaatcaaagctgtataagagatttgcaagtccaacctctattattgtggttcccatgtgaattgcaggacacatccttcgccccgaaccaaatggcaacagctcgaactgttgacctttgaaatcaatggggctatccgaaaacctctcagggatgaactcttcaggatccttccagctgttggggtctcttccaattgcccaaacattcacttggagtagtgtttttggcataatctgatatccattgatggtgaagtgtgatatggtctctcttagaagcataggagatggagggtgcaatctaagagtttctttgactatcattttgaggtattgaagctgatcagtgtcagtttctgagacttttcctttgtttccaatgcaagttctaacttcatcttg

SEQ ID NO: 264141 - DNA, 1038 bp, Cannabis indica
aaactaagcggtctttacactctgccttcatcttctcccggtgcttcacctctgcctgagcttccctctgttgggcctcatcccagaatgccctcctctcagctgacaagtcccgcaaaatcttcacggcctcgtccatgcccccaaatttggacatgacgaacctgtgatcaatcaaggtcttggagaggcggccggtctctgcagtgatctgaaaaaggaaaataagaatgaaatcagatgccttaagacaaaatataagtgaaaagaaaggaatgaatcgcaagaactcaccgcagccagggcagcgctgatgtcctgaacctggtaaacagagttcattgaggcacaagccgcgtatctcttggctgggaattgagtcagatggaagacatactagctggtcatctcagaggcaaagggggcgagggtaggaccgacaaagcggttaaaccagttcgtcaggggatccatgttcaggtcccagggatttctgaaggcatcctcgcacaaggtattctgttgctcctcccgcaagaccttcgtctgcggggactggggtgagaatgatgccatgcagcacggtgtacccctccactttggacgggatccctgagtcgttgcttgcagccggagtgtccctcctcctgggcctcttagaagactcggtctcaaccatcttacccttctgcttgcgctcgagggcagccgcaatctcgccctcatcctcctcgacttccccttcctcgtctatcaagactattgtgcctaaaggggcactagacgaggacctcccaggggtcaccagttgggatgaggtcggaggtagagaagcgtccggactataggcctcagcgagggtcgccaggagatcttccattggcttggctgctgcaacaaagaaataaataaagtgttaaaataactatgagaaggcatgcgcccaacaacaaagcgataaagctaatcctaccctgactctctaattcaaccctaacaaagtcttgaactacagtgctggcttcgtcatccccaaga

SEQ ID NO: 264142 - DNA, 1963 bp, Cannabis indica
aaatctagtacactgatgaatcatgggacattaacttttgaagcatacaatcacaattaccttctattgtgttgacatcactataattgtgaataactatatgttcaggatctaacagatattgtatattaatccataaacataaataatacatgtaaacataaatgacttctaatcttctattgataataaataagattatattgaaatgagttttatttaaggcataaaatctcaacataatctagtttattagagcttagaattataggcccatggtccctgaatcgtcaccttgaaacactattcagggaagggacaaaaagttgtataatattgttcaaaaaaatctattttgaattggcaaaatagtaattatttatttttgtaataaataaataattttttcaaatagggaaaagataaaagttgttaagacaaaatttgtcaagacagtatttattgagataaagttctcaggacaaaagacaccatccttttcctaaatgatacaaggtagacgcctagagtgtcctattaattttgtctttttggtttaattacttatttaattaattcaattagataaatatttaaatttaaaaagtggttaaagatatttcaaagtagttgagagattccctcataaataatagtaaccgaactcagtatggatatttatttaaatagttaagtgtgatttaattaataagctttaactactataaatagaagcttgatttgagaaattatgagatgcttttcacgtagtaatttttgaaattcactgtgagaaaacaaaaacaattttttctctcaaataattcttgctcatgtgttaagaatgtccacactattctttgtgtgcggtggttcaatttggaagactacggtgtgagtttctaaacaaccaaaaggatacaacatacgagaagtttggagggtaccctgatagtcatcaagaggtacatattcttatcttgtaattgatttaatttattgtatacacatctagagatccattaagttatggtacaatgataatcagataatacaaaatcttctattgcgtacttgatttagtaccataaaaactaacatgtacactctttaaagtgttgtatgggcgtgacctgccatccttggtttgctattcaacatgatctaccttggtattggctgttgatcactggctgaaagagtaggattccttgatgacttgaagatgcatttcttgcgtgctcagcaaaatatgaaggaggtggctgagagttctcacaggcaggtggagtttattgtcggggattaaggtctttgcaaattgagaccttacggccaaaaatctttagctgctcgaaagaatgagaagttggcagcaaggtactacgatacttttttgattctaaagcatattggtaatgtggcttatcatttggacacttcttctttggctgccatacatctcgtgtttcatgtgtcacaactctgcgttgccattggtagtgctcactcttccaccaccctcccctactttgactgccgatttaaagctcattgtggagccatatgagctattgaatgttcgctgaattccaacttctccagatcgagtgtagaggtattgattcattggaaggatctgtcattgtttgaggctacttgggagaagtttgatgtcatccaagagaaattcctagccttcaaccttgaggacaaggttaatttttcgtttggaggggggggggggttgtaaagcccgcttagttaatttggaaattagcagttaattatgattaatatgaaaattattatagccatttaaataatttattatactgttatttatggaattcagaaatgcatggttatgtcattcaatagttttcatatttgcatttccggtgcccggtattttggaactcggcgtttggctcagtagaaatcacaacttagtatgttagtg

SEQ ID NO: 264143 - DNA, 1172 bp, Cannabis indica
attaataaaatttttacctagagatgttgattggcatgacataagactgaaaaaaaaaattaagctatgaaattaaagtgatgtttatggtatatatttatagattagttattacataaatattttaattttaaaataaaatagccaaaaatgtatgagatctttttttaaaaaaagtcaaaaattaaaaacgtgatcttaaataatactaataaaaaattaaatactcaataatgttaattaaatactcatttttaaatatagattttagaattattattataaaattaataaaaagtaaaaaaaaaataagagaacaaatccttagagtatcatatgattgtctcgtatctttttatagattttataaaaaagatgaaaacctaataatatatttaattaaaatgctattataaatatttagcaaaaaaggaaggagccatatttaagctttttcaagtcttttagtctattttagttagggaaatttgtggcataaatacctattttattgaatttattgctactaaatacccaaaatctaaaaattgtggcaaaagtactcaaaacctcatttagtgttatttccgttggtacccatttaaatagttctgttaagtgctcaagaatgcaacgtgtgaatgagaaatgttagtaaatagccctatttttaactttagtgatagttaatgtcccttttttaaaataattaaacaaacgtccctttttactttttgtacctaaaatatccttcattatataaaaggtattataaaaataccttagagtaatataaatataacatacaaatactataccttagagtaatatgactattatgtccttttttatttttttactgatatgtattcatttaattttattttcatttctttccttcatgatatataatataacatacatatattataacttatagtaatatgaatataccacaacaattctatagtcaaataaatacacataaaagaaaacttaaataaacttccacaagttttttttctctttctttcatgatataccatagcaaataaaaataatataccactctatttatttattaatatatcatagcacataataaagatataccgtacaaaataaaaaaaatactaaaaacttaaattaatatttgttgcccctgaattcgc

SEQ ID NO: 264144 - DNA, 1218 bp, Cannabis indica
gtcgtgtcatcgtgtctgacccattttcccggccctaacccggacccgtagttggtgttgggatcaagtgtattaaaaatatattataactttacacaatcaattaatacaagtcaatactaaacattgtattgtattaaataatactaatacaatacaatacaatacaatacaacactatccaacagaatacaatacaattcattacaatacagcgtaccaaacgagcccataatgtatataataatcggaataaaaacatatggataacataactaataaagaatgtgactttctcaatcaatttactacttttgattggggaggtttcattaatcaattcactacattttataataaataatgtagatgaattaatgtattaaattgatttaatagaatcggatgtctaattataattggattagatcggatgtaaattttaaaaattcaatcggatcgaatcggttgttggataagacatccgattaaatggataaccgaccaaaccgatctaattatcatctaatgaccatccaattatatttatatttttaaaatatatattaattaatttaatatacatttaacacatgagattaatgaaaaaataccttaaaaaattaaatctaaaatattaattctcatcttcctaaacgctataaaattgtcaatgcatattgaataaattttatttttagcgattttattatgagattatgagaattaggttggactaaactaatgtttattatatatgtttaattattaagttttaaattatatttttttatatatatttttataatgaaatcaatttaatattgggattattttaacaagatgtaaatttactaccatatatattgtttaacattttaaatatgaatttataaaataatagaatttaaacacatataaagttcaagaaaccttacattgattgcagcgaaattaaatgactcattccactcaaatttctaattcttgttcctttctgctgcagagcattatcaagatcttagcccaattctccttcaggtgttggatttttcacaatcttatatgattgagtgctagattagttatgtgtgggcatgtactcattcacatagctcgaaaaattgaaaagaaagagagagaaggattcgaaaattgagagagggctcaagtttgactgaaagacttatgttgcatcaacttctgtaaaatttgagt

SEQ ID NO: 264145 - DNA, 1279 bp, Cannabis indica
tttaatagctatgaaacgtaaaaaggaatgataaggaaaaaatattacctccatggaaggatacacagcaagatctgttttaggtgtgcatgaccaataatatcaacgatttgaagaattaaaccgtcgtaatcaataagcaagcctccagatctagaagatacatagaaaactatttacaacaataaaagaaaaatagaacaaacaacaaatacgaaagcagatctatatataatatacaaagatcggctaataatctaaacaagaatcttacaagaaaaggaagccttgaaatcgaatcaagtagagacctcgtgcaaatcttcataacctcaaatcaaatctatccaacgtcgtgagatctttgattcgataagaaacaacatccaaaacgtagatcgaaacgagatctgatcgaattagacgaagaaaagcaagaaaggccagccatgcttaacagatctgagatttgaagagaaagaaagcgatgagaagaaatatataaagaagaggctaagaatgaatgattatcttttcagagccctcgtcttcttttataatgggctttgagaatcgggtggtcacgattaatgatttttgtgagatgaacggctatgatttgttttggtagttagttgagaatattaaggcggtggcaaaatcgtgaagcacgttggatgcgaggactttgtcaaacacgacagctgtgcttttgtttggcggtgggcccaatatgtgtttggttacgcgtattcgtatttccttagcctggaataggtttcccgtgcgaatcgggttctagattattcgatgaataataagtatcatgatatttaattaattggaccggtaatttatttattttataataatattaatttaaggataagtaagatatttttctcaaaaaaaattaaaaaaaaaagataagtaaggtatttttttcctaaactttaatttttaagatttaataatgagaatgatataatttagtttattataatcataaattaatataaaaaattatgttatataaaatttttatttttatatatttttaattattttttttataaatttatatataaaaattatttaaaataatataaattataattttttttttaacttataatttataagaaactttaagttgatgtgatttgttaataataaaaataaaattataaatatgaaatactttttaaaataaaataaaaaaataagatatttaaatattatttattttaaatattttttcttctaaaaaaattatttt

SEQ ID NO: 264146 - DNA, 602 bp, Cannabis indica
tgtatcaccccgggaaggccaaagttgtggtcgatgctttgagtagattgtggctcgggcaagtttgcaccacggtgatgatagcccctcaactagcctctgaaatggttagtgtagggattgagttcgtagttgaaaacttgcataacttatcactccagtcttagagagaatcaaaaaggcacaagtagaagatctccagtcttaaaaataggatctcgacacttgtaaatattttagtacattataaagtttattaattaatataaaaattttaatttgacacgtttttcaagaaaattctttgattagcaaagattgcattgtgattgagaaagcattgtagcgtgccttagcattagggcatttcacttgtgatgaaaagccattgttagtttaaacaagtaatggactatcaaaataaggaactaagaaggaaagcctagggaagtatggttaaaaccattcatatggaacaaccaaaagttctctattacaaagacaagaaaggaaattttgttagtaagtctattcaatggacttaacaaaacttcctgttccgagtattaaaggtttgagtttatctaaacctatggcttgtg

SEQ ID NO: 264147 - DNA, 486 bp, Cannabis indica
cgttgaaagctcgttccgagctctatctgaatatctggaatttaaatgcccagtttttaatttgtggaaatggattttgggattaaccctatacttgtgtatcccggaattgtgactaggattaccggcacttggtcaggagcacccggggatttggaatctccatatttgtgggacatcaggtaagacagtagttagcacgtagagatatgcgcaatggcgcttatatggaatgtgatttatatgagaaactagaaaccgggattagagttattactctaaagtgagcggtttattggcttagggttattacccaagtgaattgttaatatgtattgttatgccatgatgtatatagatgtatattgaagtaaagggttatgtgttcaaggcataatcgggttggactcggtaactagaaccgagatgaaccgttctaaggccttattgtaattagacgtgtgagcgtaacacgtaggtctatgc

SEQ ID NO: 264148 - DNA, 468 bp, Cannabis indica
ttgttgttgttgttgtttattttttatatatataaagtttttatatatatatatacttattggtaagcattaaaaaagaagcaaacccttacttctccttctctttctctcaagcaagaaaaagccagccaagagaccaagtaccattagcattttctatccaatttcatcatttttcatcataagttgcagctaggagaagactcttgttggaagggaacatcaaggtaatgaccttagcttctcctcctttccttttccatggaaactataggttttggagggtgagtttttgtgttgtaattgttgtgggtttagcaggattttgttatgattccaggataaaatagatgtgttcttgatgttcaaaccagtaggtttgcagcaatagtgaaggtgagagtcaagcttgagtttgttgaactcaaagcttgaactctaatggtattttttgttggaaatatttta

SEQ ID NO: 264149 - DNA, 1898 bp, Cannabis indica
ataaaattcgatgtggtgacctcaatcaggcacctttgcatcaagttccctactgaagcaggagtcgaattatctcaaggagacaagaacagttgccaaccagtagagacatatagattgagtgatatttaatataaccaaaaaagctaattacaagctattggagcccttagaccccaatgatgcagataaaagacttgcatacccttcctcttcccatactcacttatttatactatatcttattcccaattaaaaattatccttgaacacaatgactcaactcatgttctaacagatttttcagtatgatccttttatatatgtaaatagatcagtctatatacattgcatacaattgtttagtgtaggcgatattcataagtatatgttggaactatgtaaaattttataaaaattgagaattaaaatgcgtgagtgaataaagtctcacataggatggaaacactttattagaaatatatataatgtgcaaatttaaaatatgagttggggctctaagaggtattcaattttgtgtgcatggatgagaattaacacgcatcgtcgtcgccgttcgtgctgagttagcaagtgtggtgtcactttatatttttgtagaaaatttatttattaattattatttttacttaattaattaaacagtaaaaattaattaattagtaagcaaagactcactttgtattttcagcaacgttcacttgatccgttacacgatccccgtgatcaaaaaaccgactttcttcccgttactttattttgtgcgttcctatataatgcatcagaatcaacgagagaaaaatattccttttttacaagaaaaaatctgttgggctccgttcttccaccttgttggggcgctacctcaccttgactcccattagaatgatattgtccgctttgggcctaagccctcacggttttgtttttgggcaccttcccgaaaggcctcatactaatggagtagtgtccatccttatatacccataattcttcccattcctaaccaatgtggaactttggttgcattcccaacaatcctctcctcaaatatctgaccacatactcgtagtctcccctccagcaaaactaccttatgccgccgctatcactaagggaactcgctgcatgaccatcacctttgtcagaaagactttcgacacaggttctaacaccgatctccatcttgtaccaccgtaatcatcaacgggacacgccacctgactacctcaatattagataaactttcgatcccgcgaggtcattacattgagggtatcttccacacatcgcaaatgcagcccactatcccaacgcttgaacctttggctctgataccacttgttggactccgttcttccaccttgttgggcgctcctcaccttgacttccacattagtatgatattgtccacttcaagcctaagccctcacggtttaattttaggcaccttcccaaaaggcctcatactaatagagtagtgtccatccttatatacccataattcttcctattcctagccaatgtgggactctcattgcatactccaataattctccccacaaactaaggaccacatactcatggtctcttctccaacgaaactaccttatgctgcgctatcaccaaaggaactcgctgcctgaccatcacctttgtcaggaagactttcgacatatgtaaagaccgcttagtttaatttggaaattagcagttaattatgtttaattatagaaaattatttatagatatttaaataattatttatgctgttattattgaattctgaaatgcattttgtgtcatttagtgattttcataattttgcatttccggtgcccggtaacatggaactcggtgtttagctcagtaaaatc

SEQ ID NO: 264150 - DNA, 516 bp, Cannabis indica
gccacaacgttgtcgatattgtcagagatatactagctgattaaaggccatctgttcatcgaaattgtacatgagaggtggctcatttagggaaacaaactcctgagcataattttgtggtcgaccctcatcctcgtgagcgtattattgtggaacatacgcctgatgagccacctctccttctaactcatcctcgtccttattctactcttgttgggcaatattttttttttatttttttttctatttaagggatttgatttcagcttttaaattctcaatctccctttgtttctaagccacaacatcagaaacttcccttttttcttgccaaacaatttagatgcattggcaaggaacctacaaataaataaataaaattaactatagtttattttgtataactaaggaaataatatttttcaagtactgctagcatacccaacagccctgacacgtccacaacatcagaaacttcctttttcttgccaacagtttagatgcattggcaaggaa

SEQ ID NO: 264151 - DNA, 3255 bp, Cannabis indica
aaaaaaaaaacgtaaaataaaagaggacaatataaaaagagtatatagtataatttcctcgaaaaataaaagtaggagtccaattttttaataaaatgggtcaaacatacttcaaagcccaccaacaccaagaaaataaaggaaggagtccaatttttttttttttttaatatttgtaaaagaaataataaatccacaagaaatagttgtggctgaggttgatcagcccagaaaatgcttggtttgttttagtgtatggtggttctgtgttactaaatttgattttaaattttttcatccccaattttctagcaaagcaaattattgaatattgatgcattgttgagaggtaaatgtaaaaaatggttggtgttgttgttgagtactgattcattcaagtcttctctatcttgtttctcgctctaaaaagttttggtgagtatcctgaattaggaatttactcttactttcttgggagaagtaatctcgctcaccgtctaattctattttgtactaatatcattattagtaacttcactgctgcccaaaatcaaaatgcttaatcaaaatgctcaactcactccaatggcaaattcttacctgacaatatctatggcaccgtcgccggtactcccaaggtcgccacttttctccttgtctcccttaacgacatgtcgtttcgtaaagcctctgcgttgtgcgtcggtccaacaacaacaggtagattttgactgtttaagtttttctttaatgatgtaatttttattacatgaattacatatatttaatattaagtcttacatattttgatttaataattaaataagaatttactacccacttacaacgcgccacatatatatagaaatgctcgtgtttattgggttagattggtttttttgatatagtacagttgttatattctgacaatggtccagttattttaaaggttgaaggtgggattttgtgtgagccttgcaatggtagaggatggttagtttgtgagttttgtaaagggcaaaaaaccaatgtgaaggctgaaaacaatcgaatctaccgtcgatgcccaacttgtagagctgtaagtaatttgtttcttgaatatgtagtagtgaaaatagtagtttagagatttttaatgtttatttggtttgaagtttttgaaaattttagctttgcagtaggtgcaaaattgaatctgtaagagctactcttaaaacacacacattatgctagatagtgtagctttgagtgtccatgctactccaaattgaaaggagaagaactagttagaattttttttagtcatttttcattacattatagtcttgagtaaaactagaacaataatattcaaatctgcttagtaggattttgaaaactagttaaatgaaggttgtttaataattgaccgaaaactcttgattttgatctacagttggtttagggtaaacctttgcaatgttttcattagtgcaggttggatatgtcctgtgtacaagttgcaaagtttacaaatgtgtaacattcccaaattacaccgatggtgatgaattatccttttgagtgagcctctcactgatacaagggttaaggcttattataagctttatcccatttgtattactttccatatctgatttatgtgattctttgtttcagccaacatcttgcaaattgcatttaaagtaatatattaatttgttctcatatcttatatatttgtttatctatgtgttaagtaaacggaaacttgccttccacattaaaggaatgaaagagattatttcatatgtgtgcatgtcaattgacaagctttgtaactctattgaataatttgggacttttcgtgcaaaagatttgagtgatagcggttaaacttaactatcgtttcatttgcacttaactctccaagtttaaattttaacggactactgaactgttagcaaatttaaggtgtcatccaattaactttcaccatagacttattacactattatgtgtatattcttgtgtacgtggtacgttatattagtacaactaataatattattctaaattcattttaaaattaaatgaaattataaaaataaaaaataaaacaaaaatcgaaatgttactgtatttatacaacaaagatggtgatttacgtgctctcagatcaatggctaaaatatccaagaaaacaccaaatacaaccaacaatctagaaagatgtcagtttgcatccaatgcattacttagaatcgaaatattcaaatgatgatatttttcttgggacactcgctgatatgatcaactgtcgtttcgtaaatctatgttgtacgcgctctattaatgaacgcaatttgtatgaaccaaagaaataatgccacatgtcacttcatttcaaaaagagagaagttgtcacccacaaattttctacttggaattcaaaaagtattttcaccttttttaagtagccacctaccctcacgccatctagaaagaagaatgaaagcctctgaaatcctttgagttttgaaaatttagggggtaaatgttatgtatgttttcggttaaagaacacatttaatttcaatatgattaaatttagctacaataggcccgactgaaggtccaatcaagataatggactggatccattaacaaagtgtaactctactagattaggcacgctgtagtacttttttaattactgtgcaagcctttgctaactaaagggttcattgaaaaacatgattaacaaaaaaatttataataaacacaactttacttatacatataactaaaatacaagatttacaaatttcgggatctcgtactaatttaaatacaacaaaataccctataacaaaaagtgtcacccatcgattaacaaaattgagcacatactgtcttgaagatctaaacacttagatctaaccatctagatatgtataatattcactaagctccaatactcataactgttcagtcctggcctttacctatgttgtgagatttatgagctacgcaagtatatgtaatcacttttgtagtttaattcggtaagaccgatatcgttcacacaaagattgattatcaagtaccaatagcctattttattttctatttgacaatcaaaattggaattgttataaaaataataaataacaaaatttaatgaagattaagaacaataaacttaattcaaatatataaatgagaaattagagattctaatctcctttactatccactttattattcatt

SEQ ID NO: 264152 - DNA, 724 bp, Cannabis indica
tctttttctgaaaaggacattgctcaagctttgcaactgcccgagaatgtctccaatgcagtgatgtctatggatcgtgaattgatgctctctgaagtcacgggtgcacgatctgaattgaaaccaggagagagtcttcgaatcacccatctcacatttgctcatgcatctcttatgcggtttgctctaagaaattgggttcctaactccaacaagaccgtagtgtctcaagatgtggcatcattcttataccgcatcacctctgtagcttcaattgatttggcctcacacattctgaaccagattgtttcattccgaagaggtaaaaagccaacctttaaacttgtttttccaaatctaatctttaaggttttatcttctcagaagaatgcggcccaatcacatgaaacacttgagccccctatcactggtccgacattccaacattcgaaatactttgatggtgtgtttcaaaaacagcccaaggctggagctgctgctgcaagtcgaagttctgatgcagcagaattccaggaagtcaagaatgaagttcagaacgtgaacaatcgacttgctgcaatggaagaacttcagcacgagatgtccaagcagttgacctctttgtttactttggcactccgataaacaaaaagggggagaaatatttgatttttaatctgtttcttttgcctaactcttgaccctttttccagggggagttgtg

SEQ ID NO: 264153 - DNA, 651 bp, Cannabis indica
ggcatgatttccgcgcgcgtgggaagggtgttcaccaccctgattttttaacgaaaattcaattatttttcccagaatttcacaaacatcaatcaatcatcaatacaacacacaaaacaacatgataccatccaaatcacaaacaaatcgttttaagtcaaaatttcttacaagaaaatcaattcccatggctctagtgccagttgttggaattattttaccaggatcttagatctactcacaagtatgttgattaacaacctaaatatgaacctctaaaacgaatataagtaaacacatataaagtatgagaaaccttacattggatgcagcggaataatatgtctccttccactcagatctctaacccttgtatcctttctgaggcagagtattatctagatctgagcccgaatgtccttctttgttgaatctgaattcttcacagtcttcctcactatgattgatgtactacttgctctgtgtgggcactactctatcaattagagatttcgaaacagagaagaagaaagagagagagaggtggcagctcacgaaaatttctgtgaaaggaatgatatgcaattgtgttgtgtgtgttttctgaagcctttaccttctatttatagaataccacacagggttagggtt

SEQ ID NO: 264154 - DNA, 1758 bp, Cannabis indica
atattttattttaaagtaatgtatgtttttattacaaattattattttaattaagtgaaatttattttaaatcacttggcttatagaccccagttaacaagattagcatattttaatcatggcacgtggcgttcctctagacgttactgttgggttttgtgccctaaataaaacctattttaatataatcaaatttactaattaataaagattagaaatcattttatgttgcgtgattcacatgatttatttcgtgattatatttaatgtataaattctattaagtctagaacatatataaatatatatatatttgttcatgattgcttggacgaggtagtcttcccaaagaaaggtgtcttcgtgacaaccaagcatcaaaaccttcctccacaatctgagagggaggccaggcaggtgaggcttgctttggaatggaaccgttctctaggaggggaaggacaccttcacggatttattactcctgcgtgaccaactctagagattacactattagcatcatcacctacattgccacaactacaacttcaacaacaaccagaccaacaacaaactccaccaccatcagaacaaccaccacttgaaggacaacaacaacaacaacaacaacaacaacaataataacaaaaacaaacaacaactgccaaagtctgagcctcgtaatcaacccaatgctacccattcgactcaaaaaaagactatttaaacacaccagtcccatccacaaagggaaaccaaacccaaccaaccagcaataaaggacacaggctcttactaccttgcttaggatcccccgtctaaacttcaggctacctctaaagcctactactcttggctctgaaatctgaaagaaattttacgaggcagagcattccttgagacaatgccatgagaaagaaagggtggtgcttcaaagaaaggatgacaccttattttccatgaagagggtagagatcactgatggattttaggctttctctcttggaccaatgattgacactataactcttgggaagcacctggtgccaagggttggaagaggcccaacaccttttttctgtggagattttggaataggtggctaacagcgtgtgccaatcgatttcaaaaaagtgggttgtatgcagcagtaacaacacttccaccttggctcaagctactaaacaataggcaacaggggtaagctttgatttctcctgtctttatttttttgttgtgtattgtcatcttatgttgtcttgttgtgcaaaatgactttcatcacggagaggacctttaaggaggtgggagccttagttgtagagctcgatcaagttcaagccatgaaccaatccttaataacaaagaaaaaagagctctacttgctgaactcgagagagttgaggcccagactactgttaaagtgaataaaatcaagagaggcgtagaggcttggatggcctaggtcaaaataaatttctaggatgaggctgaccatgttagaaatgaagcaacgatctatcgagacagtgtagcacaagaagccaacgataaatttctcaagaaatacaatgagtacaaggctaagactgattaggagcataaggacgagtgtgaccatcaaatgtcaaaaataagatctctcacctaggagctcctccaatccagcgaagacaaagacaaagatgaagccggaaaaatgcttaagggtaccacctgttcggttttatgccctaaataaaactctgtttcaatgta

SEQ ID NO: 264155 - DNA, 663 bp, Cannabis indica
tatagatattgtaagcaaaaaaggaaacatgcttcatgcatttagccctataaatagtgatctagtcttcactgtaaaagggatagaaagaattgctttagagagagatctaagagaaaatactcagagatttcattgtgagagctttgagagaggaaacattgtgttctttgttctcaagtcattacaatgtaaggagagtaggctattaccaaactaaaggggccgaacctctttaaaatcttgtgttctttattgtttactgatttttgctctgtcttaattacatttataatcgcttattaattgactcactgtcgttagctaaaagcgagatcaacaatatttttagttgcaattaagttgcacgttagttgaataatagttttgctaatacaatatcatagtattataaaaacagggctcaaaattgtcaatacgcaacatgaacatataaaatacgattgttgtaatatttgtttgtattaaatatgtacaattattagttattttatggttttatgttagttggctcgcaacaaatataattgttgcattataatttcatcacagttgccttgaagttgacttcttctttctattatggtcctcaaagttgaaattttttcaggcgaagacaccttcgacttcttcttcactaga

SEQ ID NO: 264156 - DNA, 882 bp, Cannabis indica
tgattctccaatatttaatatcagtttaaatattaataggatttgttttattattattttattaaataaaaattaaaagtgacccataaatttctcataaaccaagaatttcagttatataggcacactttatgtagaatagatagttacgcatatagtaaaaatatttaaatcttctttttagtattataaattatttaaattttttttaaaatattgcaaataatcataaataattacattatttttttatttctaataaacaagtaaaaataatttatgaaaaagaaaaataaaaatgttatcataaagtgaaatttttacttactcatggattacgcgctcactctttggaactctttagagtaataagattgggagaaaacaaaatcctccctgtatgttttggaaatttaagtagtacaataaaaaaaagggtcttctgataaactttttatttatttcggtatactaaaaggttttttatagttcaattattttataattgtgtatgttgtagctatataagattatttttgaaaattctgaatagtttatagtgcaaaaattaaaatttaaacaattgcttatcatacgtgttagaaaaaataatcgcatgtaaagtaaaatatttttttcaactttattttggataatgtaaactatttgaaattttatgaaaattttcaggcaatctttaataactacaaatatacatgattacaaaaaataataaaaaaaatcaaactaaaaaattttagatactttaaaaaccgtatttttacaaatgtcaattatatatacgaaaatataaaactgtatacgtctgcagaaggagaatgtaattctgatacggcagaaaccagttttgcagcgacaaaa

SEQ ID NO: 264157 - DNA, 1119 bp, Cannabis indica
  modified_base (52)..(52): a, c, t, g, unknown or other
gaatgtggtagttgagaccgatttgcatcgtagtttgtgcaagcaatttttntagctctgtttcgctgccttcaatctttggtttgtttgttcaaggttgtcagttgcttctttctatttttaataatgttacgattttttcatgttaaacgatctgctaacaaagccacatattgtatagctcgcgatgcttatattggtctaatcgtcttattactgagagcaatgtctctcctgctcttcagtcaattataatagcgaatttagctatttaatgaattatccattttcattcaaaaaaaatatagtgaatgtgaaatatttaccaaaaatgaatttttaatattattaaaatgacaatgaatgcgaaaaactatcctttatactaaaactgacaacattgctaaaaaaaaacgataccatatgcgtaaaatgccaatactttcaaaaaacgaacaagaaataaaaaaaatacttatggctgaatctttagctaggtctccaattcagatggagtaattcgaatctcttcttcttacaatgattatctgctcaattgttccatgaggagtagaaacatgtcttaacaaacttaaacaaattaattaacaaaatcatttaagtaggtttaataactctttacaaaaaaaaatgactcataaataattataaattatccttcttcttttgatttttttttttactttcttttgataaagtatcaaaaattatttatgtcggtacattaagcagggcaacaacgttattaatatatttattttgaagagaaatattttgttgattaaaccctgaagtcaacagtcttttataattcatttgttaatgttgagagccactccaagataattatcaatactttcaatggttctgtacttttgttttagtttgaagtattagtaattatgtgactcaatgcatttaggtctcaaactttttaattaagtgtaacttttcatttattttaaaaactgtaattttgtgtcccatgtaattaaatagacttttgctattaaagttattggactagttgatccttcatccatcccaaacatttttatatacatatatatcctcccattgtaaaaaaaaaaaaaaaaa

SEQ ID NO: 264158 - DNA, 592 bp, Cannabis indica
gctagtaaatttaaggtgtaatttattttttacatttaagttctaaatacgggtgttcattgaattacatttaatttttaaatagcagtattcattggatcacatccaatagatttcaatcccatcagaggtaacaaaattggtgtcaacttcactaacagaccttaactactaaactgctagtaaatttaaggtgtaatttattttttacatttaagttctaaataggggtattagtgatgaagaacagagcaaaacagagaagaataaagtgtttctttatttctgtaaaaatatgagaacaggttgaattaaatcaatacaacaggaggctatatatatagcaatacaaccgactttggctaactatagaaataacagaaataacaagaaagtaaaaataacaacctaactaactcactaactctaatagtccccttcaaggtggaatgtaaaaatcttttacacccatcttggatacaatatctttgaaatgagttgggaagagtggtttagttagtatgtcggccaggttgttttgagacttggcatggtttgtttgaagagttccattggcaatcttttcacggac

SEQ ID NO: 264159 - DNA, 1339 bp, Cannabis indica
ttcttcaacggtaaaagcacggcagacccagtgctcgggtaagatctcgggtccccacccggtatttgcgggtaagttttcacaacttggtttttaaggtagtccaacaaaatagctctgttgttagcgaaaacaaataagtttccatccacattgacaaaaacaaaagggtaaagattgttctctattcccttatcgtttgtttgagctaagaatggtaaatcatggacatttgggtcagtagtttttggataaaactcgtagttgaattgttttcttccaccaatgattatctgcctgccatctggcaagacatgattggttgagtaccatctactcttggccagtccaagattgacctcttgccaatcacagttattattaacacaaggcttaaagagtctgactcttctttctccttcaaaggagccacctgtttgggctagagttccatcaggcataacagagccagaggagcaccagacgttggtctggaccgtgagtggtctgaatttgttggtggctacgttgtactcgacagagtgtgcggagcagtctttggctccagctgggcatttcccgggagctaaagagatgttggaggtgccgaagtcggtgcggtcgaacatgatgactctgtcgttgttgagaagctgcatgtgcatggcggaaatgcctatgcttggtgtcaagaattgccaacgcccaccggctccggtggtcggacatggtagtagggtggcaacaatgaaaacaatagcacttatcatatgagtagttgtagtacttggcgtcattatattgataatttggtttttgtgatatgatttatcgatctaaatgtataataaatctttgagtttatgatagtttttgggtgattagccacagctaatttcacaagtatttataggccatgcatgtgtgttttaattaaggattattattattaatttggtggtgggtgaagtcagatacgttgacaattcattataggagaatttcaaatatgatttttttattttattttaaaataagataggctaaggatatatatggtttgaattattttatgtttttgtttgttgttataaattctattttttttttttgttgtagacaggtctggttgatgatatgattatataattgctaagtatatatgctgctctgttttgatatgtttgataaaaatttgtttaatttatgtattattgcatggttttttttaatatatataataattaattattcttttttttttttttgtagtagaatgattaattattctttgtgcgtgtgtagacgttgttaataaagaatttgttggtttaaattc

SEQ ID NO: 264160 - DNA, 772 bp, Cannabis indica
tttaaacctggctccgcccctgcctacattttaaaaatattagcacaacacgagatgactcatattttttatagcacgacatgacttatattttaaaaaaatcataaaaaaatataggtgagtccagtccaacacatgtatttacaacactatattgcataactcttatatggaactttttatcaaggtcgataatgttaaaagattgaattttattaaacagcaaaaagtctaaaaaagagtcactcacaaaaagcttaggagatccgaccaccaaactatagtatgatccaaagttaaaaagcaattttggcaagaacatgaaccatactattatccaaacgattacaatagttaaaaccaattacatgaacaatattacaaatacaaaaaatatcaattgaaacgataccaaactcagccataagcttttccttagaagtttaagtatagtaaaatttttgacaatctgattccactatattagaaatataatttataatttggttttggcacgattaattaattagccttttggcactttttctcttcaggtttttctctaaaaaaataataattttttttaaacgtatttcttttctaaccaactaacccttaaatcatgcataatattattttaaaatcttatattatataaagatcaatatttatttatatatatatttaaatagttatagatattttatcaataattaaacaatacaccagtgacctcaaacattatttatttaatttaattaaatattaaatc

SEQ ID NO: 264161 - DNA, 564 bp, Cannabis indica
ttacgttctgcaacaccattctgaggtgccgtatcaacacaagaagtttcatgaagcatgccattagaggtcatataagattgaaattgagcagacatgtactctttggcattatcacttctcaaagtacgaatagatacattaaattgagtttgaatctcagcacaaaaagcacagaatatagaaaacaactcagaacgatttttcattaaatataaccaagttaaacgagaatgatcatccacaaaagtaacaaaatacctgaatccaggttgagacaaaataggagaaggaccccaaacatcagaatgaactaactcaaaaggaacactagcacgtttattgacacgtggactcaaactaacacgatgatgtttggcaaactgacatgctcacattctaacgaagataaactactatattggggacacagtttcttgagcaaaggaagggatggatgacctaaacgacaatgagcctcaaaagcggaagcaacactcgaacaagcaatagaggttggcggaagtgggtcaagaacatacaagccaccagattcatgtcctt

SEQ ID NO: 264162 - DNA, 1025 bp, Cannabis indica
ggttggttctagtgcaacagaacgggtcaaccggtttgcttggaaagggaatttctcagtttcctcagggccagttttagggctcggggtgatttccatatttggtatagattgtttagaagttgtaaaacctattttgttgctaatgaaagttagggttactggttatggaaattagggttattcccggaatgattcatttaagttatttattgaatgttgttgtcgtgacataggacccaagatcgtcaagctttgattccacttaggtcagcatgcacgctaaatttctagactgaggtaagaaaacttaaatgcactgttaagtagctaaatacgaattgattataatcgttagtacctcgaataagatcaagattaatgatatgtatttgtagtgactcgatcttgatcgagattaataatatgtatttgttgtgactcgatggtaatggagtggtaatgatgaaaatgattattgttgtttgtgaattgtttatgattgaaggaagaacacagttatcaccattgttgtgaatgaattgagatacagtcattaccgttatgagtaattactcctaaaactgcagatatgtttcttacttatcgtttgctttaccgggtaacgatattgacatacggtgctcgtggataacgagtggtaaggttagaaacagtcattaccgttatgagtaattactcattggaaccgcgattaggtttcttacggatcgttcgctttatcaggcaacgatagtgacatacgcaactcatggataacgagtggtgaggtttgcaaatggtcattaccattatcagtaattactcctgaaactgcggataggtttcttacttattgttggctgtatcgggcaatgatagtgacatatgtagctcgtggtttacgagtggtaagggtactttattatgaagtatcgggattgtgtgattacgatgatgtgaaatgaattaagcatgtttttatgacatgagctgtaatcagatacgtctttgttataatgtga

SEQ ID NO: 264163 - DNA, 1018 bp, Cannabis indica
gatcaatgtttgattcaggatccgtccctaactttaattggggcaagaaagttggacaactgtttttctttgaacatgatcatcatcttcttactacagatatttctgtttttgcaaacaatacatgtaatttgaagaatccctagcatttccgccttggacatccttctataaacatttctactatcttaaataatagtttgcaattttgtggaaaacctatcaattttatgtgctccatatgtcattttgccaaacaaaagcgacttctactttcatctatcaataattttgctagttctgcttttaatttaatacatcttgatatatagggtccttttcatgttactagtattgaaggttaccgatattttttaactattgttgatgatttttctcgctatacttgggtatacatgctcacttgtaaatctgatgtttctttcattattcctcaacttttttctctcatcgccactcaattttcagtcaatattaaagttgttcgttgtgacaatgttaaagagctcaatctaacaaccttctacgccaccaagggaatctcaatcaataattcttgtgttggtcgtcctcaacaaaattctgtggttgagcacaaacatcaacacatattaaatgttggtagagcattattatttcaatctcgtttatccttaatggagtcatgtcattaatactgctgtttatcttataaatcgcactccatcaaaattacttaacaagaaaacttcatttgagatactttataacaaagctcccaacaatgctcacctcaaagtctttggttgtcttgcttttgcttcgacattaggaaccaaacggcacaagttcttcctgagatctcaaccttacatttttataggttaccccctggtatgaaagcttataatcttttaaatattgaaaatcaagaaatcattcaatctagagatgtttactttcatgaagatatttttccactttctgaaactacatctcccacatctataaatgaatt

SEQ ID NO: 264164 - DNA, 595 bp, Cannabis indica
tactctttatatgaattaattgatacaataatggtgtatatggaatcaatattattatctcatgagaaagttcatcttacaaaattgaaaaatttcagctccatcctttacacttacttaataagatcccaaaatatctatttttcatgagttggttcccaaccataattttcaaaccatattaatctgatcccaaaatctgttttcttataagttggattcccactcttaatttctaaactgtaataggtgtccctaatatcattttgtcttaacacacacaaaaaaaaaggtaaattattaatttttagagcacttaatttatgcataaagatgaattaaggtaaaaatatatacactaatttgttacacctaagatgtaaaatttatgttaaatttgacataaaaatttaatttatattgtatttagctcactatttataattatattctaatacacaatgtataaaataaaggggccttttcatttttacacttcaaaataattttctttgcattttttacgaaattctatatagaaatcctgttgaaggtcgttcgagcttttcctgggagtatggcatgggttacttca

SEQ ID NO: 264165 - DNA, 895 bp, Cannabis indica
aatttaaaaatatcactacattcatcacttataaatggaatttttaaaaaagaagaagaaaaaaaaaaacacatataattaatgaactttgaatatacattgaactctaccattatttaaaaaaaaaagataataatttatgttatagtgagattttctcacttagaaactcgaggccggactcctattaaaaacgacacgcgtattcattctccttgaggaaagctgagacgtcgatgagagacccctcgaatatgaacctcacttgaaccatattcagtgagatgatgcgaacatgaccgggtctaatcacatttgtatagctcgcactatgtaggaccaaggaacagttttaagctcgcatgtaccaggctatatctgagtatccccctgatcctcctgcaaaaacatagagatcgattctctattctgcgagctggtcccgttgacccaatagctttgataaaccgatacagactcacatgtcttggttctatcaacttgttatatgatgtccatataagcaatcttaaaaggacgcagacatcctagactcgattagtctcgaatgcatattaaagcctgctagcttatgcagaaatatgaacagccaactcgcactatagaagtcgcataccttcctgtatttactgaattaagctagaaactgttcttcatttattgtgtttacgttttttagtttaattattgtaattcaatgtatgaacggattgataataaatttaatccatgtgtaaattataggacacttgctttgtatataaaggagtgatctatcgcgaaatggaacaagaaaagaaatccttgcaacagtggactaagcagactgtgatctgactgaaccactatattctctcgtgttctttgtatttcc

SEQ ID NO: 264166 - DNA, 1166 bp, Cannabis indica
atatgacttggaatggaaacaagatcaaggtttgagattcagacggcagaaaaggcgagtagtggaggagcatgggcattcataaagcatgaacatgtatacatacatacatacatacattacatacatatgtgatgtgatgatcaaactctcccaatacaaatcccaacaaagctgacaactttagttccaaaaacgttgcatttagtacgtcacactaccaaagtcgggtcgggcacgacaccgattcccacggccgctacaataataaaatcatattcatacctattccaactaccttatttattccttccttccttcactcctttccattttccttcctttcaatttaacctgcaaataccttcttttcttcacttcgacaaccagagtttagagagagagagagatagagaatcatgggtaccaatgcaaagggtcggactgtcatggaagtcggtgatgatggagtggctttgatcaccatcatcaatcctcctgtcaattcactatcctttgatggtaatttcttattcgagatcttattctagtttttctagttgatttttcacgtgcccttttcgtttttagcattaattttgtgtattttgcttgattttcggagagaatattgaaatttgttcatggtgttgccgaatcttttttgggtttctctacttgagttgaattccgtgcaatcttcaatcaataaaagaaaaagaaattttttttgagtgtttaaatttttgatatgattttcccaatgtggttttatgtgggaggtactagaattttttaaagcaaatgaaaaatatgtttgagaagaagaagaagaaagggacaaaatattgcagcgttagataaacttcttgattggacaacattttccttgttttgacttcctctgtgttccacttccacagtcaaaactagaattgaactaaccttagtttaactatgtgctgtagctgatttaataatttctgactattaagcttttatggtattaggttttgaaatgttttgatatggatcaatcgattccatttcaattactttcacttgtaattgatataattaagcaaatggcttacaaggaaaattggatgattaagttagttgttggggtattgcttccacgtttcttgttttagagttgagtgaac

SEQ ID NO: 264167 - DNA, 644 bp, Cannabis indica
gagatggatcatccttatattgaatctacacacccggggttaatcggaaaaacaatttctagccttatgaggatcgatgagcgtgcttgggatgttgagattcttgaagatctttttgagactcgtgataggttggctattctctctattcctctcagttcttccattcacgatgacgcatggtattggagctttgaaaagtcggggctgtacactgtcaagagtgcctatcggtacttggatgatttaaaaaatggcttttctaccgataattctgctggtttttggaagaaaatatgggctctaaacattccaccgaaggtgagaaactttatttggagagctgcttctaatgtattgcctacgtgtgctcagttggttacaaggcatgtcccgatcagtagcatcggtcagttgtgtaatagcagcaatgaaacaatttttcatgctcttgttggttgctcttttgcccgctcgtgttggcaccggtcttgtgtggatattggtagctggttggagatggagttctcggcctggtggtctaatttatcgcacagggtcagtgagcatgtgttggaagaagcggccatggttgcttggggcatttggcgagctagaaacgatgtagtttggaaccagaaatc

SEQ ID NO: 264168 - DNA, 1347 bp, Cannabis indica
gaaaatacagggttcattttgtcatttaacaaaatacatgatctaattggtataacttttgcaaaacacagggtctaaaatagtatttaccctattaaattattgtacttcatgtggcatgaaaaaatttcgatagttggacatttttcacttccatcaatgatagatatgatatatttttcatgttcatttcttactaaatatgaaaaatacttctttcatgtgcctggatatcatatccaatacaaaatggacaaatgtccaactttaatagatattagagttttttgtagtagtgtaatgtatttagcttattaatttcaattatcttatattagatgattcttcttaattaaagattatttcacgtattaaaaattataattacatcacattattattgcttctcaataatactatgttggataagatattacttgtaatttatgtgactatagaataagaacaaaaatacttattttagtgcaagatggaaaataatttaataattttttttcatcaatttttatatgtattttaaaatttatttcattctattaaaaagtaaaatgtaatgactcaaatttttcaagagcaaaatcatgatatcatgaatgtatgtataaattaaatagtgtgaagtataacttcctacaataatcaattgaacttgattccattaataatcattatgttttgtcacaattactagaacgttaacctaacattctcttcattccaagttttctttttattattgtctcataatatctatatctattatctatatatcatctattagatcacaaactcatcaagatctataccggcccccccatatcatcatcacaattatatctttttttctctctctctctcaccattaattaatatatttacataatgtgtactagattaaaagggtttaaaatttaagagtgtttcatgattttcgattttaattttcactgccaatatcacgttctcccaattaattctttttttttttatctgaaatataattcgtccaattcatatcaccttacttgtgacgattttatttttgaagtgatattaatattacgaacatggtaaaagtacgtaactagttaacgcactgtaaagcgtctgactagtaagaacgttctaaaaatcgaattaaaattgatgtatgattggtaaccttgatttcatgtgaaacaaatataagagcattggagtgctttaaagaatacttgatcacatcatgaatatattttttgacatattttaatagatacttattattatagtgaaaaaaaaatgtcattacgtcttttatatatattttctcttttttattttttt

SEQ ID NO: 264169 - DNA, 1182 bp, Cannabis indica
tcactttaagacctagacgggttatactggcctaaggttccatagaacaatttagggttaaatcaacaaagtctagttcttcagtaggtagtatccaaacaagctatgtacctcgcaatgttccgagcaggatacatgtatctagcaaagcatcactatctgtgctgaaggacgcgacatttagaaatttcttaagatattttctttaagtatcaccataattatagcataattagaatcactatatttgtgggattagttttatatagttgagagattggtaggaatttatatgtagtttctcgattatttttcaattatttttggtaataaactcttgtatcttccttataaagagtgaaactatttcattgtttagggatccaaatttaattttctagagaactattacgttgttaaaataattataaattttctcaagaatattaagaaactcacatggctagatcttgtgatcttgatcattcactaagtaacacaactaaaaagtatcactattattatgggactgaacctctataaattatttttctttttattgctttattatttatatagtaattgatcattcaatttcatcactttaaagactcaatgtttttggctaaaagcgaggtcaacattttagtgcttttattaagagcaaaggaacccagtctcatccttgacaattttttttttatttttaaatatatatttacgtggatcaatacaattgtgccaagtgtacactgtgtccacgtagacattccaccatggcagttaacagctaaaaatggatagaaatattaaactgctaacagaacacgagttcaggggttttaccaccaaaattttagaattgacagttagttacaaaaatctggtcacttaaggtgtttatgacgcaaattactcataaaaaaacatgttatattttctaagtaaagctcatgttcgtaaaattatattttaaataaaatgaaaattgaactaaacaaagtgcttcgtaacaaaagatattatgacaagttgttaatgaaaatatcataagcaacagaacaacctttaacaaatatgaaattgaaaaactgataaataatacctgaaacagcagggggtttgaattattgagtgtacagtctgtacagtacatagaatctttaagcatggttgcaatgt

SEQ ID NO: 264170 - DNA, 500 bp, Cannabis indica
tagtgtgtaagactgtgaataattcaaacaactgaaggagtgtcaggcttagatcttgattatactctgcgacaaaaatgaacaagggttagagatctaagcgaaatgagtcatttaattctactacaaccaatgtaagatttctcatactttatatgtgtttaatttttatcgttttagaagttcatatttaagatgttaaaaacatacttgttagtaaatctaggtcttgataaaatatattccaacacagggtgagtgatgggcttggagaccaagaccttatatttataggtgagatactcaatcagcatttgcgctacattaattgttagaatatttcatcaattaattttggaaatcaaataagaaaatgaataattcggtaaatcaaaactgaccatatttagaatattcatatttatcacatattgatttgtgatcaaatacagctagagatatgtataagtcaatttgcatgattttgtataaatatataa

SEQ ID NO: 264171 - DNA, 2213 bp, Cannabis indica
gtttttctttgccaatctcagaatacatattttcttcccttcttcttcattttattgttaataaattctgaatttgcagcacttctgtattcaaatgtagcaattaataatatatacttgttaagaaaatgctggtctgatgatgctcaaaacactttttgaggtagaaaaaggtaactatccacttggctaaatttttacaatatggtatgtagtagtagtcaaagaattactaaactaataagaatcaatgcatgtcaagactactgacaatttttgggtccaattgcctgatcatagttgtgtcatcttcttttgttctcatcttgttatgtttttccctttttctttaataaagttttttttactaaaaacaaaactgcaatggattaacattgttggatggatggccaatatttgtcaaatagaacgaataaaataaaactagtttagtatatacaaaaagatgatagatgagacaaaagtttatatggaagctatattgaattattgtacttcttgtcttaccaaaataataatgatattactgaataggaactgataatatatttcaaagctcaaatttttaaaatattacatttcatatggtcataccccttctaagttgatcattatgcatttttctgcagcattgaacatgtttctaagaaacgaagacctttaacatccataagatatttcctctttgctaagtatttataactacttgaaactgcattggcaatctagtgctcaaaaaaattctgcatttacttatttgcagatatccatatctatgatctttgaccgtctgtttgatttattctttccaacttcgtttgaagaattatctttggcagatgattcctcatcgttgttatcgtctgattctactggctgacgaccagcagcaattgcagattcagcagcagccacagcctctggtgtatgaagatcagcaacacccaacatcaagtcctataatttgagatgtgtcaagaaatttaactcaactcctaatttccttagcaataacagaagagaaagagaaaatgagtgataccatttcaatgatttgtgattcatttccactaagcacttcaatatcatagttttcaatgttttcctacaacaagtacaatagtaaataccaagtggtaatcataaaacataaaaataaaaacattgctttatatttgtattttagaaatctagcttcaatggtaagattatgatgccaacctttgcatcaacctgcaattttttattagcttctgatagcactcccagaaagtcttttacctttcccagaactgcacaaaaataaaacaaactaagcaacattgccagtccaagggcttgaatcataaatattatttaaaggatcaattattagctatttttttttggcagcttcacagttcaataaacttggtgattgtagagtaatagaacaccacacaaagctcttgattaccttaaggtggaagtacaactaacatatctcatagagcctaaaccaaacgagtatatcctacaaccaccagtattccatttacatttaattccttattatagacaattagacatgtcatctttcatgagaaatatgctttctttgcaaaacttcaaaaaggaagttctattcagaaaaacccaacacaacagagaatacataaagaccaagacctgactatggcacattcgaataagaacttatatacccaaatcaaaaatgaaaacaataaatgagtaccttggcttggaggaagaggtgcagtgatgggtttcccaggaggattggttttattaaattgagaagtgagttgggcttttttacaaataagtagagtggactctgtatagagtaaagaaaagaaactgaataggcatggtaatgaaatctacaaaagcagaggtagtagtggcactgtaagagagaaaagagagtggtaatagcttacttatgggtacatcaatggatgaattttcttcctctaagtggagaagctccttgcttgtcttttccatcgccctagaatgcaaattcgaaggtggtagccggtaggagaaggggtttaacttaaaaccctctcaaaaccctcctacggattttttttttcttaccctcaaacttcaatctctgccaatatcagtattttgtgtgctaataaaattttgtttagtagacttcatcaaaaaataaaaattaa

SEQ ID NO: 264172 - DNA, 1302 bp, Cannabis indica
cagggtatgagttgaggctcacataatcacatcttagatttgcttttctacagaagcaatgtgctgtatatgttcattcttgttactgcaggccctcgagcacggattgggtggagttattctcaaagttgaggatacaaaacctgtttttgagctaaaggtaacttgatttttctgcaagcaaatcttaattacgaaacatgaattcttatgtggttaatgtcatcaggaatatcttgacagaagaaatgacatgatcaacgtattgagcttgaccaaggcaactgtaacccgagttgaagcagcaggaatgggagatcgagtttgtgttgatctgtgtaccatcatgaggcccggtgaaggactcctcgtaagcttccgcacgtgttcatctgtgtccaatgctaatcattatttgcagtctttcattctcatgagcatatatacattataggttggatcatttgctagagggctgttccttgttcactcagaatgcttggagtcaaattacattgccagcagaccatttcgagtcaatgcggtgaattttcaagctatcatttgaaagtgctttaaagttgtaattttccatcaatcccttattttaactgatacatttttgaagtttgcagggaccagtacatgcctatgttgctattccgggcgaaaaaacatgttacctttcagaactaaaatcagggaaagaagtaattgtggttgaccagaagggccagcaacgaaatgcaattgttggaagagtaaaaatcgaaaccagacaactaattcttgtggaagcaaaggtctgtttcaagtaattataccatcattaaatttaatcttaaattattacataagtgttggtttaattttgtaggattactcttcaacaaatttgtttaatgtgagtgtgttttgtaacacttttttaatcagtttttatttttaatattagaaaagtgataatattttcagaaaacatgttctataaaacagtttttgctttttaattttaaagttgagaatcaaatttttaattaaaaaaattactttcaacaatttttaaatggttttttttttaattataatctattttattttctttcatcaatattttggatcctagactagacctgacttaaataaaagcaaaaataaaagtagttacagaatatattttatttttaaaaataaatttaaaagcaaaattttactttatttttgtgattataaaattaaaaccaaaagtgttaatcaaacaccacttatatttctgtctttgttccggttccaaaagcttaa

SEQ ID NO: 264173 - DNA, 831 bp, Cannabis indica
gttggaaacagagagagaatcttcgtcactgctccctctcctgagttgtcttaggaagcagagggagattcttcatcactactttcttgcttgagatcttattgagaaatagcaggggaatcgccatcactatctccatgctcgagttcatctatggaaacaaaagaggagtctatttcagtggaggcattagtagttgattctttttcaatttcctactcaatgtatgttcgagactcagaaaataaataagcagtgtaataagtttcttttggttgagcaactcccttgaccttcttgacgacttcttcgagcttgataaaatcgtgagctttatttagaaacttttgaatggtgtatactgatttgaccttcaagtttttctaaaaaagaatcattactgttagtccagctgtcattaccatgtgttgggttttgtgccctaaataaaactcatttcaatataattagatttacttattaataaagatcagaaataacattttatgttgcatggttcacatgatttatttcatgattatatatataatgtatgaattctatttaagtccagaacatatgaatttgttaatgattatagtgttgtcagcatagtggaatataatcttaattatatgttcgaaagtttattccctgatttgtcagaacactggatttagactgacatggtataatcaacgataggtattcttacaccttggaaaagtgttatgtcctttccaggacattggcaaagtttaccagtatcggatgtatggagtatacatcggaagggaccgatattgaactttgattagatatattaaaatt

SEQ ID NO: 264174 - DNA, 504 bp, Cannabis indica
caccctcctcaagttgggtctcgggtgtgttgtccccaagtgttggctttcatccccaaaggtcgtcaacgattgtgtcacgcccttaggagaccctcatcgttagtgactatttcaaatgttcaaatctcatgaaaggctcaaagatagttatcaacccacgaaaataacgagatattatcataaaaattagacttcaaccacctccgaaaattaaggaaggcggttgagatagctccgcgttggtcgtgcctcctgaagcaagaagcactgaccctttcccctatataaggggtcatccataacctgggaagaggatcgacgattttgagcaattagaaaaaaaataaacactttttcattctttgccatcaagagcatgttcttgacttttgcaaccttgatcaataaaacacaaggggagtaggctattactgatatttggggtcgaacctctttaaattttggtgtatttctttacatttattgcaatttacggtgtca

SEQ ID NO: 264175 - DNA, 625 bp, Cannabis indica
ttatttgctagttagaccattacaacttcacaatgttttccaaataattggtttaaaaaaaagtggaaaacttcttgattttattattttagcaaccgtttctgatttatttatgtcagtagttagcaaaaactaaaaaagaaaaaaaaaaattaaatttgtgtataaagtagtaactcttattctacacttccaattactacaaatcaatcttttttcgctatgaatatagtgaaaattacacttcgcaacaaaataaaagatatatttttaagtaattgtttgttagtgtatatagaaaaaaattgctaaaaaaattagcataaattcacttatatatgacttttatgatatttaagagagacgtattatattttcattttaattataatattaataatatattttgaattatctatcacttaatttataatatagtttggcccccgttgaatttcgacactggctccgcccctgctcagaacaaattttcagtgttgttatgttcattactatggttttgttttagtaaagttttatatattatcatggattttaataactaattaatctattttactaaactagtttacaaaactacacacgtggcgtccctatagattag

SEQ ID NO: 264176 - DNA, 2100 bp, Cannabis indica
attaaaaagaaaaaaaatgtataaaactttctttctggtttcagctctccatagaaaagggaaacattagcaatttacatgtgttgtcttttcgaagtccaataatatcaccatttcattaatgcttgtttgactgcaataagttaaatcaatttttagtaaaacactatcccaaaaacacacacacacacacacacacacacacacacacacacaccaaataaagattttgggcaaaacaactgacctcaaagttctttgataggtccttcatttgttcagcaagttcttgccttttcttttgagctacaagaacacatcgaggagaaatgacattagttcaacctaagcatatagtatagttatctaagaccagcagatattattcaattcaagactatacccaaacttgacacgtcttcaattctccttgatgtcctcacagcaaatctttggaatgcagggctgaaggaaaactaaaataagttcataaacaatttaacacttcggtagtgcatagagtatgcaagttatttgttttactgcttgtctgataagtgagatgtgactgtgagtatgagagtttctaagctataatatcacccaacaaccttcagaattcattaatactgtattaagaaaccaactcgatcaaacctcactttcttttttggcaaagtgatatagcgcgagtttatataaactatacagtgtacaccacaaatattcatgactaaaaatctcaaattgatcactaattactaattagggaacagattatcaagtcactaaacagagtggaaaatacagataataacttggttctatctacatgtaacaacccatacaagtcccgttataagttttctaaataaaaacataaaagcaaccggtgagtttcattcagcaataagggaaaactaccatgaaaaaaacgcatcaaaccagaaaaactcaaatatgatattgagatagctggaaaaaaaaaccatagataaataataataataatcataatacagggcacaaaaaagccaaattctcgaccttctgagctgcagcatatgacatttttaaactacagattaaacatatcagaagatttgaaaagagactattcctaaaggcctattcggtactatcatttcatgtttgaacttaaaatcaaatcaaaatgtgcgaatttataacacaaataacatccaaaatatatagaaatcccaaaactttttagctaataaacgcaagtaaagtaagcataataaatttctctatagaaatggaattgaaaaaaacaaatgcccaaaacatcttcaatgaataaatctcataaagtaagtacctgttggcaaggctgttaacaagaacctcattaacgaggtaagaaacaactctgtgcataaaatttccacccgccatgatacaatttgctgagtaatctaaaatagcatcaaataagaacgcccgattcgtcagaataacaataaaagacaaagttaactaaaaccctagtctaaattttgattatctacccagtacgaaacgaaatgcttacaatatttcacaaaacacctaattcgtgtataaattgaaaaacgataggataaaaatcgatatcgatataaaaaagttggtaaagaataggggatataaaaatcaaagaacgaaattccctagaaactgataggagaagaagtagaagaaggagaagacgatttcaaaacctgaggaaaggaaagacgaggaagaagaagagtatcaaagttgtagaatcacccagaattttaggttgttgagagtgaatctcgtatatatgtgaaagcccaaagcccttgtcttggggcccaaggatttctcctttttttgggcctgaggcccatattaggtgccttatgtgcacaaaagggaggtttttgttaaaagaacatgaaataattaggtgggattttaaaagtaatttacttattaaataaaatatgatactttcaatttatatagtattttttttttatttttaagtatttttatgatgtttaatattttatatatataaataaatagaatcattaagataccaattttttataaaaaaattatatt

SEQ ID NO: 264177 - DNA, 3294 bp, Cannabis indica
atttagtactatttagaggtaatatattgtgcttagttagtgatattagttaaaagagaaataattaaaaatactactagtgcctagtactcgtttcggttttatatagctattagtgtaaatcgtatatataaattagagagcctagtaaacaatatctttaaattgtttttgttttcttaataaataataaagtaaatactttttttctttaagtaaaattttatgtttagtagaaattattaattgaactctctattttataaatgacaaaatagattctatactttttaaaattgtacaaatagaactctgaactgattttttgtcaaaataaaacttaataaaatctaatctaaaaatgatataataaaactagttacattttttgtatttgtttgtgttagaaattattttaaaattgattatattaaaaaaaaataaaattattgaaaattgagttcaagatcttatttttactattttagaaattacagagtctactttttcatttaacaaaacaggaagtctaattggtaatttttacaaaacaataaatcaaaaataacatttactctaaataatataaaaaactattaattactcccattgatatgaatactttttaagttgcctaatagcataacatacaaacaatatttcaattctaaaatcacactcgaatgtgttataaataaatatttttattgcatatttagaaaagaaaaaaagaaaaaaaaaacatatttttgcatgagttaagatttacgagaaacaatttattacaggggaaattgccggaagccctaaataggattgaagatgaagaagcaaagcgattcgtggccaagtgtttagacaacgtttccaagagactcccagctcgagagctcttgcttgatccatttctagcttcttcccacgatgattataatgataatgatattgtcaatgaagaagaagaagaagaacaaaactcgagtattgaaaatggaactgatattcaggaagagcaattagtggaacctgatttacagaggactacgaatatgtcaatcactgggaccatgaatccagaagatgataccatttttctcaaagttcatatttctgatgatgaaaatggtacgtatatatgttatgctagcctacaacgtgtttgataatatgcctcaaagagttaagacattttaattatttcgtaagagcatctccttttgaaacttactccccatcttagctaacgagtgtgtttagataatatgattagagatactctaatgatttagattatttgttagagatagagacgggttcagtatgtttttatggagcctacaattcccactcaaaaaattccattttaaaaattaattattttgcttgtaagtagataattatacaccaaattagtgaaaaaactatataattttttttaaagtaggcataaatattttgtataacaattaagcctgctaaaattttgagtttcgtaaggcgttcttaattcatgttcgtaaggccaatcttgttattgttaaaaaaaagagcccatttgagagggagaagaacttttgcttaattgaatatgttaatgttattttttacagggaacaatgctaggaacatttacttccctttcgacattgtaaacgacactgccattgatgtggcgatggagatggttaaagaaatggagattagtgattgggaaccgtctgagattgctgtgatgatagaagaacagatatcttctttggtaccgaattggaaggattggatctcgacgccattagaaaagggtagttgttttcctaatagctatgatgaagtagaggaagaagaagaagaggaagtagttgaggaagaatatgatattgcaaatagacctttctatgcttcatcatgttcttcctctcataactctcttttggctcttaactcttccaattttcttcatgggaacaacatggcttcttttgatcgtagttggtctcaaggtacataatttgattgatcatagttactatgtcttataatctgagattcagtcctattttttggcacattcactctgtagaagtgtctcaacaattcaactttgcaccaaatcggtctacttttagctttaatatttaatatgagtgcacatatcattactcttttagaaatacccgagttagatattttataacattggagagatttagcaagaaacataactttgtggtaggttttttttgagtgaattgaagtactttatggctcgaatctttagttattctcttatttagaataccgtcacccatagttactaagaaactgaaattaattttacttgggattttatcactcacttgaatgtaggatcatttatgattcactaactacatagattcttgtttattatacagatgatatgtatatgaatgatgattcaagctctatgagctcattgaattccttcaactactccaacctaaactattgctctggctatgaagaggattattattcaagtctcagaggtaataacaatgttgaagctacaatggcacaaaaaatctacaagatttcggccagcgaatagtactgaagctgcttctataagagcttgtcctcacttaaaacataaccatcatcaacaacaacaccactatccgccgaagctaactaggattcgatcactggttgatgtgcgaagccagttgttgcaccggtctttggttgaggagataaacaaaaggcggtcttttaagacggttggagctgttgagaacatcgggtttcagaaccccggtgaggatttttcgagtactaagatgttcacaactggtgattttccaggaaggtcttcttccaaagatcatagctagatataaaagcaggggattctcaaaatatgatcatgttgtaatgaatgaaaaggtcttttgtttttgttcattttttcttatgtataagaaggcttgtttttgtctttgtaaaaatgatgatgatgatgataacttgttgtattttatgtacaatcatatattatttccatgattaatggaatttgttggaacaattagtgtatataatctgattttgatcactgtgaagcttaaacttgttctgttactaaatgagtcacttaattaaagtaattacttaatttatgtggatggtttagactatacttaatttgtagggtatgtaagggaggtataacacgcttttatgttgtactgatatggtgtgcttttaaattgtcataataatttaatattttaatcttgactggatttcatt

SEQ ID NO: 264178 - DNA, 1027 bp, Cannabis indica
agtaaaaaaaatttaacatgaatgaaaattcagggacatgatttagtacatataaagtttgagggacatgatttagtacctatcaaagtttgaggggcatgatttagtagatatcaaaatctaaggagcatggtttagtacataaataatcactgaaacagtaaaattgaatgaaattagacaaaagtccttaaatttaataatctcaatagttccgggagcacgatttggtacatgtcaaagttcagggagaaaaattaataattaaccagataaaaactatgtttagataaaaaataaaaaattcaatttctaaattttatttagaaattagggtcctagccaaacgggtcattgtagtgaaagccaatggtaatgttagtcttattttttaaaaaataaataaataaacaaacaaaattcatcaatagtattttattcatcattcccaataattcccatatagtaatttttattaaagaaaaagggatcaatacaagatttatcgcggacacttttacaaagatcaaattccatatttacataaaattcagatcaaacaataacgacaagcttctatattattgatatttaacaaggactaactttaagatgccttacttttatttgtaagagaggagaaaacaaacaaagtacgtatctttttaataatggttcttttctttgtcttgatcaaataaaacttcagacaccacctttgctcctcttccttgggccatgtaaaggcctatgtgatgcattagattctgcaatgaatgagatcaaacaattaatccaaaaacacatacaattcaagtttctattacttttttggcttattggttctatgcctatataaagagctttcgatcttaagtcactttactagaaaagtaaaagcagcaccaaaactggtatgaaattaattaaggattagtctaattcaccacagaaaaataagaactcaaattcaagatatttactcctttgttgctaaaatatgaagatttgttgcaggttgacacca

SEQ ID NO: 264179 - DNA, 3299 bp, Cannabis indica
aaaaagtgaaaattacacattttgacggattttttatacaatttgtgtaaaaatattactttttttaatatagttattttatggtatgtttttctttttaaaaaaatatggaaataacattataaggtaatttgttaccctataaggaggtaactggttacaccatgcttaactagttactctaaactattttttccatcattttttgaatttttctcacaaaataaatttttgaaaaaaataattatatttataaactttattgaaaaacccataaaagtaaaacattgaatgggaccttatagttttctttagtttagcttcagtgtatcaacatctaaggatataatatatcgttattagtgcaatttaatagcaatgtctacatattttagtataaactcaaatatgtaggacccgataaacatttgcactaattgcgttacacaatgttaacgcactaaatagtaccttaaattcaacatatttgaccaaaatctaagtctttaacacttttttgttctttcttttgtaaaacatgtagttaatgagtcttatccatatatttcctaatatttaattgtattattgtcttaccatacaatgcagaagccaaagttccattctgtgaaaatctgaaaatgagatgaagaccattctcaatgcagtatccaactaaagtagctgtattaggatgacaaacatgaccaattatgcctaattccattaaaaactctttctccttcttagcatctttgttgtccttagctaatctcttcacagcaatggtttctccatcacaaacatcacctctataaacctcagagtaccctcctctccctactatgttatctgaaacccgaaatagtaatccaaaaatgcccattagattattttgagttgtgaatcatcgtcgagttttagtgtagagaaacctcttacctggattgaagttgtttgtggctttcatgatttcctcatagctaaaacactttaacaaaggcttcttgatttctttcgtgttgtttcttcttctcctaaacggcgagccaaggaaagaaaacacaagtctgcatggcgagaaactttgttttctttgtttggatttcttagtaaagtttggtgtcacagaagttgagtatgttatgcttgaatctccacaacttagtgtctcatcttctgtgctttgatactcaacttcgatttcatctaaaacagttctcggcgagctgtttttgctctttgattctgatttttcggctggggagatagctttgttacttttgttccaccttgaacttgatcttacaatttctgctattaaaaacagttattagttacaagaacttataaagaaagtcatgtcttaagtgggattttctttaaggccggccctaaggtaagacgagcaagttacgaaaatgatttccagtattaaaagttctacaattaacattatattataattttgataacgattaaacaatttgtataggtaccccaaaatttaattttgccttaggctccacatacctttaagaccggacctaatttacttgaaatagaattggttacctttagagtgagcagaatccgaatccgaactttgttgtggtggcggcatacatttcccaaatacaacaagtgtgcatccattaggtgaatttctaagacaatatcttgcaatgcttgtaggtctagatattcaacaaacacaaaaatgtcactaatttgtaaccaattaatattaccaatgaaaaaaagaaagaaagaaaaaagacatgacattgctgattttctcacctatttgatctgtttcttgagcctccaataataagataatctgctgaaacagaatttgcttccttgattaaacctcttcctattttggagctaaatccaactctagcctccaaattaacctgaaaaaaatgtcaaagtcaataatgaaactattacttgaaaatttgtaacatttttccattaagttgagaaaatttacctgtttgaattggcaggtcttggcaaattctcccaaaacagatataacaaacgctttagctcgacgaagccgcgattgaaactctcttgacacttcatacttttttttatctttgccaactaaaatagtttaacaaaaaaataagtaacaagacattcttaaaaaaaacaaactcatgcaattgagatactaaccaagaatatgaacagcaacaatatcatcatttggatgagcaagaattgcgattgcccatgatagcaaatctttgctctcatttgggtccaaagaaatgccaataagtatcttagaagaggtagaagaagataccatttttgttttgaattttcctatgaaaccaaaaagtttactaagaaaaatgtcagttatttttttggattttatgaatgaatgatgttgttaagaagagacagtgagtataagaatagatagaaaaggtaatgacatcatgattgaatttcagttggaagtgtagtgtgttctcattccattattcttgtttaagaagcattagaaaactttctacatatatatataagagaaactttcttttcctttttcatttttatgtgtatagatgtaattaagtgttatggttggagggggtgctttggggtataagcaaaggttgtgagtacttatttgatttgtcttgctatagaagccataaagagaaaaaaggagtacttcaaactaggaaggggaaaaaaagaagaagaagaaaaagggttactttctttttttgatttggtggctatgagcccacttaaaaagaaatcatgctcttctctatcacttcatcatgaatgaataactaaccactctctatcattttaatggatgatgagagagtgagagagtaagagaagttttgtattttgacatataaatgcatggatggtcatctaaaatcattatataatgatgtgacactaaaaatttaagttgtaggaaaaggaaatacaactcacacggttgaaagttttgtattttgatgtacattatgccaagtcatataaatatgtatttagatatcttaagttgtgcaaccattaaaaacaattatcttcagtcacaatttttaagtcacaacaaaaaattacttatgacaaaaacatagtatttagatacaagtttttactaatttaattttagtcacaataagtattgtgatcaaaaatacatttagtcacaacaaattgtcatttttgtgaataatacttttagccacaggttttttaattacaacatagaaattattatttataattagtcacaa

SEQ ID NO: 264180 - DNA, 556 bp, Cannabis indica
cttaatagttcagggggaatttttaatggccaaaaaaattcagggacatgatttagtacatgtaaaagttcggggagaaaaattactaattagccttatatttttataacaaaaataataaaaaattaaaaaaaaagttttacttaattagttattaaaagaaagaaatggggccaactaattgtgttttaattatttaaaatattgatatttgatgattattaattgtcaaattaagtgtgaaaagagtaagcaatttactttttgtcacagccatagggggacattagtagtaacacctaattatattcaaacgcgttcgattgtcctatattcccttcctattcacaaaaataaaattaatataaggtatatataaaaaacctcaaaaaaaataaaaaaaataaataataatatttgcattataattaaatatttatattatgttttttaattttttacacttatatattatattatatgttatattttcgataaattaaatattatatgttatgtttttgttgcactcgttactataaattttgtgatttgg

SEQ ID NO: 264181 - DNA, 526 bp, Cannabis indica
cgatctgatccaaaaaatctaagtctaaaatattggataaacttaaattaaatcaataaatatatataaaatacattcaattgatagatacgatccaatctaacattcaatagatgttagatcaattggataatcgaaactaattggatcagatcagatgataaaatttaacatccaatatataattggattaaatctagataaagcctaaaaatattgaatgtggtccaaaatacacccctaactgtaagtacttaaaattttgaatttataacctactaccactcaccaaatatatttatacaaccctcaccaaatataagtaccggagagctcttaataggaagtttaaccataattatattttgtacaacatataaatataatgaaattaaacctataattcatgagtataattatacaaccctaattcatttaatataatgataacaataataatattaattaacccttcaattaattacttttaatgacacagccggtgcatatggtatagctcagaaat

SEQ ID NO: 264182 - DNA, 501 bp, Cannabis indica
ctaggactaggaccaggaccaggaccaggacctaaatccaaacccaagcccaaatcaaaaccaagacagagacctaaacctgaaccgagactaggacttgaacttgaacctagaccgggacccaaacccacacaataactgggacctagacccagaataaggatagggaccagaaccgtaaccggaccagcaccgtactccaaataagacctagagccgaattgggagccggattgggatcccaaccaaaacctggactccggacccgaacccgaacctgaactcaaacccaaacatggaacaagactagggacacagaaatagggtcgggactcagaaccggaacccagtctcgatcccaaacccaaacttagaaatgggatctgggacctgaaccagaaccagaccgagacccgggatagtgatcgagatcttgactcggtattcgggtaacggggcctggaacagaccagtagtcggtgtctagatctaggactcaga

SEQ ID NO: 264183 - DNA, 634 bp, Cannabis indica
tcgcttcatttgggacaatcgcagttctcgttaacagagagtttctcaaggttcagttgaatgttatattccaactcgtcaggattttaaatctttctcagaagatgtctgaagttaactgggggaagttacaggaatgagccttcacatagcgagataggcacctcgcttattgggtctcgagcaaatctgactgttatacttagtttgtacattatatattaagtgtttctgcagtcgatatgtgtcgctttggtcttcccagatgtaacgtacttgatgcctcgctatatgcattcaatgacatatggtttctcgttaatatgctaagcaacagtttgtatatcttttcctcgcataagaccttatagtcagcaggttgcatatatactctgctacttacgcaattaatgagttattccataaaaagcgatttcatcgatccatattccctgtcttaacacgtgtcctccactaagatggtagctgaatttcgggtataacaattgccccttaaaaagttctttttttaataaaaagtgatttttaataaatataaagggcctttttttcttaatccctttttggaaaaacgcgtcgtttggtttcgtagttgtacagttttgagggtcat

SEQ ID NO: 264184 - DNA, 706 bp, Cannabis indica
agacatacacgaaaaagataatgtttgtggaaaatgttagaagtcataatattttcgaactttagaagacataaacagataataaattagattgtaaggaccataatcatggaagaagaaaaaaagaatcatcaatcaagataaggactaaataataaaacatgcaagtaggacagactctctcaattattgacattattgttgtctatcttggtttctcttcttctttttattaaggagacttgattagtcaacaaatatattaaatatcagtatattcattttattttggtttctaccaactttgtttttggttttattatctcactagtgacactatagtagatatgtgtaataagtttattatattcaaccgttcaaatgggaaaataagtagagtgggaaataattatgagtggcattcgatctaatctaatttttttctcatcatccgatctactctaattagtaattaggtttaaaaaatcatcatctgattcaatttaattagacttcaaaaattcaatctaatttaattactaagtggattggatcgattttttacttaaatatcaaattacgcacctaaattttaatattaactcaaaaatataaagaaaaatatgtttaaattaaatatcacaatttatttaagttaaatacttcataaacatgcaatcatcacaagtgtaatacaactaaaagt

SEQ ID NO: 264185 - DNA, 1746 bp, Cannabis indica
ggtaaagagtgtttaaaaaagagataaaaatgataagttttagaaaagagggtaagaataaaagaagacaatataaaaagggtatagagtctaatttcctctttcttttttatttttaagagtaatatcgaatgttaaaatacaataggtaaaacataaaaaaacaaaggtgaattacctcatactattttttaattttaatttacggtttgggttgttctgatagtttttatgtcagttgttatatatacaaattttaattgcaatttaagttattccgttaattatcattggagtttctgggtagagtttcgaaaatatataaaaaaattattttagagtataaaaataaaaattcctcaaaaaaaatacttacattaataaaataaaaaagtaaatgatgacaatttatttgagcttttttattgcacataacagtttactcacaaaaggagctcattacattagaaactgaagtacgtggtactctttctcaaccacccaacaaactgaacaataattaaaatttaaacaagactgcatttatttattattggtgggatatgggatcttttatttatttatttattaggaataatacactaaaaaagctatatttttatagcttaattagttgagtgcagctttggcattggcgtctcggagtttcttttcatcagaaagtatttttgccaaactgcaaaataataacaataattagcatataaatctgtaggttagccaaaaaccatataaatagtaattaattacttttaatagctatatttatttatattaaaaaatagagttatgaaaatatatagtaataaatatttgatataaattaattaatatacctttttagagagttagcattggtaccagcacctggaacaggttcatagagaccagttgccatactcatacgtacaactggcttttccagcaactccttaccagttttcactaaattctccaagttttcttttgtagctatatccactgatgctagggttcctttcagagtatcatcctaataacaataataaaaaatttatttaaaataagatagagttgaacaaccaacaaattaatatttatatctacaaaaaaaaatactaattaaagggacctcatacagcctagcattattattaatgtaatttaataacaagttttattgagagacatgtcataatactatttatatataataataaaacttacatcaatgcgaagatagttgtgttgagaatcagaagcatggaaaagaacagagttatgatagtcaaccatatcggcacttgcttcagagaaaacatcaatgataggagttgatccattgaaaaatatccaactaacagttccccattgggctgacattctagcattgtatttttgctctgtcttgtttgatcctgttcccaatgttatcatcagaaaacgagacatctccaatggctttaccgttccgtaatctggattcgctttcgttatttcttttgtaatctcactaaacgcaatcaaagactgcaacaacaatattaatataatttaattaatcatcacaaaataaacattaatatctttatatatataaaagagtttgtatgtatatgtgtacaggattattggcggccatgccaccgtcgatgagatcaaattcagcagtctttccatctttgtcttggtttgtaaaaataagtggaaaggaaggtatggtggagcctgccgatgtcccaatac

SEQ ID NO: 264186 - DNA, 599 bp, Cannabis indica
aattgtaaaacaaatttcgagaaagacatacatacaaccatattaagttagagcattgctattaggcaccagtggtgcctagcacctttgcgacatgtcgcgttgcgattggctagcgatactccctaaaagctattatattaaattatatgggactcgatacttagttagaccaatagcgatattgacacgtaggagggtgctaggcaccactagtgtcctttagcatttctcattaagttattatcattataataacacattcatgttcatgcctagaaaagttaagagcattgatagagattagttccttactttgtaatgaaaatatagttgtcatgtattgacttagccgaatacatactgtttgtatagattatggccctcattggggtgcatataggttgtaaaaagattgttggtgcaatacaattcatctgatttatcaaaaaaaaaaaaaataacacattcatgttttttttttctttttggaaagtttaacatagaagaaaagaaagttacatctgaattggattgtctgcattaattatagaacaaacaacagaaaaaaaaaatcagtattccacatagcaataact

SEQ ID NO: 264187 - DNA, 947 bp, Cannabis indica
agccttatctcatagggatgcctcgccaagaatggagccaagatcactttgatagagggcagttgcttgtcatttggcttctcgagactaatattgtcttaactctaataattatactttttgttgtcgagatgatcttccttgcatgcataccgtcttctagcgagataagcaccttgttgtctgttatcttgactcgccacactatccatactcagtttgtatatcgtataatatacgctaagtatttttactgttgtcgttttctctttcacgcagcgacgttgatgcctcgtcatgaccgtgtgcactcacatggtttctcatcaatacataagttagcagttcgtatgtttctgtctcgcagaaggctatccagccaaccgtgttataaacataccctgcgaattaaatttccaatgagttgttccatgctaagtatacttttcgtttgcgtgtttgagttctttgctcttctccgctcgacacgtgtcttcctctaatgtgcttactgaacttcaagtttaccaattgccccttgaaacgttctttttaattaaaaagagctttttaatgattacaaagggtatttctatcatgttcctctttttttgaaaagatgtatttcctctgattttggcggttgtgctatttcgaggtacatcgaaattaaatgaccatcttacccactttcgcttcgaatcgtgtccattggatcaaatctttctctgatttaacaaaaacattatcacagatgtaaaataacaaaaaaggaagcacctttgcaccatttcagaaagtttgagaaaaacccttaaacttcttcgtcaaggatcaccattaaatccatccaaagacttgcatgccatccttgtccttgacctttttcctgcaagtttcctctgactttaatttctcaaagcgatccttgcttcatttgaaggttt

SEQ ID NO: 264188 - DNA, 1047 bp, Cannabis indica
cgttttacttgtacttaaccctccaagctcaaattttagcggtaaaatcttccaaactactgaactgttagtaaatttaagttgtcatctggttaattgtcaccatagtctatttatgtgtacactcttgtacacgtggtatatttatattaatacacctaatattattattttaaaattatttcaaaattcatttcaaaactataaaataaaaataaatatttaaaaataaaaatattataaattttgaaataactttttataatttttatgtaccaatataaatgtatcacatgtacaagagtgtccataagtagtccatattggtagctaactgtaaaaaatagatgtcacattaaatttgctaaccgtttagtaattttgagagatttatcactaaaatttgaacttagagggtaaagtgcaagtgaaatgataattgagagggtttaaccgcaaaaagctcaaattaaaataggtatttaagtacagcaaaatgaaatacatgtaaatttttggcacaaatttccctaataatatattaatataataatatttccaaacgagtccacaacactcccaatagctcctttaaaatacgtacttttttaaaaatttaaaggacatagagcaaaatcaccttccaacaaatgatgcaaatttattctctattttaaagcatatctattttgttcaaatgtttttctacctatagagaagcactattcatccttaaaacatattttaataatatttcaactatattttattctatttttaataattatgtattttatatatatatatattaaaaatatattactcaaattatgagaagacatagagaaaaaatagataagcttatatatgatgtgctattaatgtatgatgtaaaatatataataaaaatgcggtgttttggtaatgtattttaaaggataaagtggagaaataagtgctactcggaataaatgaactaaaatagcttaatctttaaattatagagaaaacgttacaaaattgaactttccaacgagtgaagtaaac

SEQ ID NO: 264189 - DNA, 1067 bp, Cannabis indica
aagttattagtaaataaaaaaaaatattaaaaaatgtttgagaaaaaaaaagttaagttctaaagttaatcaaaatttgagcctcacagtgataatttcacacagaataaatgaatgcagtaaagtaagaggtatgaacacaaaggattttttacgtagttttgcagttaaaaattctgcatagtccctgagtcaatcttattagatttctaatagtttctcaggacttattttgtatcattttttcgcctcttttttgatcttacatgccactatttttaatcacatagtaggcagttaattataaagttgactgtaatctttacaacgtttttttttcatgaaaccatggagtttgattacatatcacgtagtacaaatgcggttattatttaaaaatcacacagttgtaattttcctgcttttactgggtcaaaatgatcgtgtatttaaacacatctttaattgtagcgttctgggatgcctcgacagaaacttggttccaatgatcttgatagcgagctggagcctttttccctatctctccgaggtcaataatgtacgcctcgttgcttctttgtttgaaagtttaacgcttcattgtgacaaccccagtttttatcaacagagaatatctcgaggctcatttgaatgctagcttctgactcgtcaagattgtaagtctcactgagaagatgtctgaagttaactgggggaagttacaggaatgggtcttcctatagcgagataggcacctcgcttattatgtctcgagtccactcgactgttatacttagtttgtacattatatgctaagtgtttccacaatcgatatgcgtcgttttcatcttcccagatgtaacggacttgatgtctcgctatgtgcattcaatgatatatagtttctcgttaatatactaagcaacacttagcatatctgaagttacaagaatgggccttcctatagcgagaaaggcacctcgcttattatgtctcgagtccactggactgttatacttagcttgtacattatatgctaagtgttttcacaatcgatatgcgtcgct

SEQ ID NO: 264190 - DNA, 592 bp, Cannabis indica
tctaatgtgttttccttcatcatagaatcatcgacatgatgactaaattgcatgtatagatcttagtaatattatgattgatacgggagaaaagtattaacatgaatcataatttttcgataattgacatgtgaaaacttacgacaagtaagctttaacacattcaatgaataattttaatctcataactatctaatactaaatgtgcatttttgaatttctagcaattttattaccgaaaatatcaattaaatattgacaataatttgtatggtaaatgcgcaaatcatgatcaatattttattacacattttatagtatatgccccaaaagaatttcataataataacaataaaattcataaaaagaaaaatctcaaaatcacaaaaggcatatatataacaaaactatggaaagataatcatataaaaatggtcttgtatgagattaaattaattaacaacaatttgtcacaattctcacaatttttgattaacgaaattgacatgcttagactcacgataggtgagtacataagcgctcaattaattatccactaacataattacactatcaaagaaaatgtcaatca

SEQ ID NO: 264191 - DNA, 440 bp, Cannabis indica
atcaagggctagagatctgaagggaaagagtcattatatttcactgcacctaatgtaaggtttctaaactttatatgtgtttagttcattgttttagaaattcatataaggatgttaataaaacatacttgttagtaaatctagatcctggtaaaatatttccaacagattccagatcgagtgaaatccacgtgcgaccatgaaggtcccgcgcagacttaggggaaaatgtcatcgagtttttacacattgacgtggtaagaaaactgagcgacacgtgtctcacattttttatacttgggcggaggtaaatgtccttagcagcttgcacataagtcgtaagcatctatgattgtagattttctgagcagaggtgtaaagaagacatccgaccaggtacaagtctgttatgtcgagctacttacaagagttaattactt

SEQ ID NO: 264192 - DNA, 570 bp, Cannabis indica
tatttaaaattggaaatattccaaatcagaaatatttgaaaaaaggaatatttcaaattggaaatatttaaaattggaaatatttcaaattggaaaaatctaaaattggaaaaattggattttgggaaacaatcccataaaaaattggatttttggggaaaaaacccaaaaaatcgcaatttgtgggggacaccattgaaccccgatttccaaaaatcataactctttcaatttttatcggaatcgagttccgtaaaaacgaaaattgctcaatttttcacaaggaatccaaataaaatattttaaaaaattgaaaaattatttttcatggaaaaatttcgtacaacataaacattcatcacataagcacataaaccaacatgaaaccatccaaatcaacacaaaacatataaaacatcgttttaattcatattacatgaaagtaagtaattaccatagctcttgtgccaattgttggaaatatttcaccaggatctagatttactaccaagtatgtttcattaatatcctaatatgaattctaaaacaatgaaataaacacataagagt

SEQ ID NO: 264193 - DNA, 1501 bp, Cannabis indica
ttgatagagcattaaaatagcttcgaaacgcaagttgaatcatgtcaatcagatcaacattgagtgagttatgactatttttacgtgaaggttgtttgggcccaatgcccaagttgacatatgacttcaacttggacgctgagtgagtggaaaatattatgggaatgtattttttgatgcctatgtgatattttgacatcacttagtctacttttgtattatggagaaattggtcaacaattcttgatgatgttgctgctctgcggaaatgggagactcgaagctctaattttttagtagtttaccatgttagaaatgagaaatgcaaagttgtgaatttaacttctttgacttcatggctctcagtcattgtgaaaaattatatgaacagtcacgacaaaatcaaaatcggatgagcagaactcagcgcataaggactacatatgtcaactagggcattgggtgctcatttcagagctcgtgatatgtcgttttgatacttccaaggttctagaacttgagaacaagatattctaccccatttttgaccatttcggagagaattttaaaaacataacatgcatttgaatcacctaaactagcgcagcaggtggattatcaagttgggcgctaggcccaacaccaagtcgacctgggcattgggatcagtttctaggcccccaagtttgtagtacttttctccccaagttttcttgtatctttgttatttctggtgatggaaaaaatgcgtggaacattttttcaagaaatttattggaactagcccaggttgacaaacctaggcgctgggtcccacttttagcctcctgaaagttccatttggtctccaaaaatagttgaatcttaatctttgctgaaaatggagaatattttcagaagagttctcggaaaaaatccttaaaaatggcccaggttatcaaccttggcgctgggccagccccaggtgttaacttaggcgttggactcctattctagcacacaagttgggttgtttcttcccataaagcactagtttcactgtttttgatgaagataaagaagatgcaagagttaaatttttgatctgatacttggaagtggccccagattgacaaatcaacctaggcgttgggtgcccgagcatcgggtgcccaaaaatgatctttctctgatctgattctgatgcctcaaatatgttcgtggtacatctctcaatgcaaagtttgacccattttcactaacacgattttgaaaattgacaccctaattaggacgtcaacttgggcaatcagtgaaaccataggtgcccatgttgacttttggggtgcaggttcatgtaatttcaactctcaaagcctggatttggttgttgcatgtattcatggtacaaaatattgaagacaggagaaatgagttatcgaagtccgaaattccattttggagttttcgaagtcaacctaggcacaaggctagggagccctcccaggtcgacttgttatga

SEQ ID NO: 264194 - DNA, 1374 bp, Cannabis indica
tacaaaagttcatctcaaattagacgttgagatcacctagtaatgcttattcagtttaagaaaataaaaagtcaattttataaaaaaagaagatagatttaacaaaaaatttcgtatcaaaaattgatttttttttcttcactttgtttccatcatttctttcttattttattcttttcctgctaaaattaacttccaaacaaaatgaatttaaaataacaggagtaacgtgttttagctacgatgaaagagcttacacccacggagaaagaagcactggattttcttctttatagtttttaatcataaagttagaaagggtttttaaaacacagatctcaatattacacacatatctgaatggtttttctatctttcgaatttgaaatgatttgagctggtctttatatagaagcaaataccaactacctaaatggaatctacttagaacaatcacaagaaacttgccattttttttacaaagtttcaattactcacaactcagcaattttacagcccaaaatcaggccaagtgggcactaaattagaatggaagagctcacgagaggtgaagctttcaatcatgctcaatttaaaccctcatttgttttttgaggggttcttttgttttgtttgtatccaaggtgtagtgtaggttgtcttctttgttgtcttgagtatgtcttttgttttagccttgtggccactctgtaaattgttttacttatctttcactttctctctttaactcatttagtcatgtttagtttcttgattgatttgactctttacaatttattagcaacccttttatcctcttttaggaaaaaagccttttgcttgttgaaatctccaaatgacaaacttagtatgagaaaacaacataaacctacataatttggctcatgaattatttgttttaggctaagtctatagcatatcatagggatgtgcataaatagatccaatctaatgataaccgaccgatccaattacaacttaccaccaaatattggatatttgattgtgatcggatcagattggatgttaattttgaatatccaattggatcagatcggatgttggatggggtgtctaaaaatccaatacatccaacatccaatctaactaattagtattttcatttagtttggatgaataattagattttatattgttatacgtaatatatatgtaaaaattaacattaaattcttactctttttttcttagattggatggatccaatccaatccaatataagctggacttaaaatattcgatagatccaattcgatccaaaaaatactaggtctgaaatattaaataaacacaaattaaactaataaatatatatgaaatacatccaacgga

SEQ ID NO: 264195 - DNA, 579 bp, Cannabis indica
aaaagccaactgtattactgtttttttttttacagcttagcctatggttaatgacttgtccaaactgtcataactataaatacctcctctccccaactcgatcaacacacggctagagaacaactatcatcacaagtctaagttagtggtgtccaagattaagagagagagcttctgtagtgagagagaaaccagagaaaaagagaggaaatcaccatgatcattgctgatattttcagctaattttttttgagtggattctctcagtgtgagctttaattgtaatttcttgtattcgggattggtgatttcaagttgtattctttctctctcagatttcattgcaatgttatgacatatttgattcattcaacttgattgaactcatctcttgttaaaatttcttatttctggtttgctaattgtttgttattgttgtcattgtgattgttgtccttgaatctttgttatgataatcttaatcaggtttctaatccgcaacagtttcggtacaaacccaataatatagaatttgtgccttatatgtgccttattgaagataataatagagtttgtact

SEQ ID NO: 264196 - DNA, 3612 bp, Cannabis indica
ggcaaagcctctcaaagaaggaaatggtatttttggctaacaatgattatagactcaatggactatgttagaaagtgtgaaaagtgctagagttctcaaaaatacctagagttaccccaaacaaactcaaaagatgcaaactccctatccattcgctgtttggggaatcgatctcatagttttactacgtaagggaaaaggtggagtttcatatgctgtagtgggggtagattacttcaccaaatatgctgaagcagagcccttagccactatcacatcaaataaagttcttaatttcatgatcaagaatatcatttgtcgcttcagaattccacaaaagatagtgttagaaaatggaatgcagtttgacaacgatctctttattgacttttgtggcaaacaccaaatcattaatagctttacggtggtcgcttacccacaaggaaatggacaagtggaagcggttaaccaaacatttacggatacattaaagaaactcctggagcaagccaaagggaactagcctaaagaaaaacctgaagtgttatggtcttcccgcactacggataaaatagcaacaggccacactcctttcgctctaacctatgggtacgaagccatgatacgcgtagagctcacacccccataacattaaagagtaacatatgactaacataccaatcaccagctgttcgctgagtctttagatggaattgaagaaataaagagaaaggtctgagattagaaaggcggggtatcaccaaaaatttgcaagacactacaactccaaggtgacatgatcaaatttaagcctggagacatggtgttatgaagagtattcctaaacacaaaagatgcagtagtaggagtactcggacattcttgggaaggaccatacatcttcactgaagcactagaaccctaaacataaaagttggtatgctatggctacaacttgattccagtgcctgtactaagggactacaacggggcgcatctgcgatgatactaataataaaataattgtctttaaaacagctcgcttcacagtgagattcacttaaccatgtgcaagtgaattgatcgcctcttaaactaacaagatgtgacaaagtcatctttaggttaggaggtccatcactaaggtatggtccctgcactactagtcaaacagggcaatagtgtactggggattacttcagctaaaatttgatgactaacaaaaaaatctacaactgctacttcttcttctttcaacttagctcacagtaatgtaattgtatttaattttgattaataaaaatgttgaacaaagtttttttggtacttcattaatattattcaattacagctcatagacctaacgacgctcttaaacactgagtaaagcttgtagagttagtctcgagataactttggttatttctttagtgagttcaacaatgccgacctacgaatctatgaataagtggatgagtgctcccacgtgtaacgcttccctaggactcgtgatcaagaaatcccaaggggattttgtatggcatatgactaatgaagttacttctttgatcacttgggggcacataggatatgttatggtatacgagagtcatatgttacatgatcattcaaaaaaataaaaaaattgcatgcctatgtaagtactttcatggtaaagataacattatgaaatattgacgtcactccgagtgattgagtttcttaagacatggaatactttgcaagtgtaaaggtcaagcggtagcatataaagtaaaaaaaaaaggagcaaacatcaaaataaagtttttattatgttggaataatttttaatttaattcaacaagtctgataaattgttactaaggcttatccacattaaaaggccacccgggatgaccaactaacacactaaagctaaaagctaaaaaagaaaagaaaaaggactaagacagtgtcctataaagcccagaagctatctaagtcaacaatagcttcaatttattcctcgttccctcttggtggcgcataagtaggaagaggaatgtcaggtactcaaggttgtagcttttaaccctcgcaacttctttgattgttggctcaccaccattcaagtcaaattcaatcctcttaagagcatcatcattgaaatgttgctcacaatgttctataaataatgagactttgttttgagggaaggtcatccagttgaatgattatgcaccaccattggacgatgaggcatgatagatggcatcaaagcataagcaatcatagaaggacacatcaatagctgttttttcctccaactcggccacttgactcctaaagcgttgaactagtcctctaactgagcaatgcttagagtcctctcatcaagtgactaacggaaagagtcttcaacctcaaaagccttttttttgagcaatagctagatctttcttcaagttattctcttgagctttggcattgtcagacactccttgaagattggatacattactctctaagtcatttaatggcttcttccaagtcaaccacctggttctttgtaatggtggcatgcttctccgcaactaaaagtttctcaataagctcgacaatgttcttgttttcattgtccatggtgtaggccaacacagcctaaaaccaaagaatgtaagtcaggtgatggtaaatataataaagtcagctcaagagatgacaagaaaagattgttaccccaaagatatcagtgaagcatcattggacaatgacgtgtggaggcttggaagtaactaacttcctgaacggaatgttctcaaccttggatccaatcaaggaatctcaattagaaaagccatgtggtttgctcaagtagctgctccactaaatccgaactaggttttggggtaccattatcagcctcatctagagaaatctcaattagagatgcgggagatccctaatcagcctcaacagctttggacttccctttgctagaatcttggatagggggagggacctcaactcctttacttcttttcctagacttcttctttgcatgagtagaagaagcaacaaggataccctatacaacctccctatctgaaggctcaatctcctttggtgtggagatctttctcttcgaacaagtcgccatggtagctagaaaattcatattgtctgtagagaggaaaagacaagtcattagtatagcaaaagtaatatgaaacacaagatagcaggttggaactacaggacatgagcattagtgacctgctgattccccaactatctccgacacatttttaatagaagtaacttcttcatcattttgatcaagaacacaggtattctccttgaatagtctgagtcaatttgaatggaattctctccatcagaggagtcctcatcttccgaaattgttctaggcagaatgacagtttcactttggccatcatcttcaagaggcatcgtccaagagtctttagaaaagcaagcatccaaataaactcgctgacttgccattattaggccaacattgcatagatttttagtggtaagcaaagtcttctcatgtaaagcccgcttagttaatttggaaattatcagttaattatgattaattat

SEQ ID NO: 264197 - DNA, 879 bp, Cannabis indica
ttcaggatgtcgttaatttcctaaacatttccttattcttgggggccctccactaactctggactagcaagtatgttctatcgaggccttgcctcatctccaatactttcttcatgttcttccacaggaagattctctttccaacatcgtaagatctgaaaagaaaaaatggacatcaagcaattagtaaccaaactaaggattgcataataagggtacgggaagagtccttccggtaactgcttggagaggtccccaccggaccttatgtcccgaaacatatagttccaggacaacgaaattgagaacacaaggaagaaaacaaagaagggctcaaaatcgcattgtctggtaccaaaaggatcctaaacacaagagaaccaatcatgacaacatcatccaagaccctgttggatctcataagtttaacaacaatgtagattggaaaatataggattctaagaatgttaattttcctaaggcatggaaaaattttctaagttcaatcaccctaattaatttctatgtttcaatgtaaggctgtacataaatttttgtaaaccgcccaaccgaataatccgcccaaaccaaaccgacataacctgaagaataatgcaaaccgaataacccgacgaaaatatagcccacccaatttttatattggacgggtgaaaaataatacaaacctgtccaatcaacccgaactaacccaatcaacccgattaagagggtttttatatatatatataaatatatatatatatatatatgtatatgtgttttattatatatttacattatcatataatttacatacatatttaaaaaattataaagttcaaactactatatttttttatggtagttgatttgaacttt

SEQ ID NO: 264198 - DNA, 978 bp, Cannabis indica
acggttcagtaagcttttattgctttagtagtttatttaattattatgaaataagaaaagcctgataggaagcatgttagtagcctgatagtagaataggcgcatgtttttaatttccaaattaagcggcattagtaagctctcgttgatcatgacctgatgtgccaactcttggtttcgcaggctgttcagactagatggacgccaggcggaacaccaggagtcagggcaactcagtagggtcaaatcagggtcaaggagctcagtttcccccgaatgttaggggccgtggtagaggtcccaggggcagggcccgtggtcggggtgatgataacccgccacaggctgcccaggctgctcaagccaatcaggaagcccagaattgggaaactaggtttgctgaaatgcaagccagaatagaggagcaagatcgtgagattcagagattgaggcagcagggtgctcctgcagtgccggtgccagaagttcctgtggcacctgcccctgttgctcaggccgagatagtggtagcgacgaacaaaatggaacccttgtatgaaaggttttggaagcaggcacctctagtttttctgggaggtccggacgtcatgaaagccgaacggtggctgacggtgattacaagaattctgaactgtatgggtgtcgcctgaaatgacagggtggtgtgtgccacctttcagttccaagaggacgccttagtctggtgagacatggtgtcccagatacacgatgttacaaccatgacctgggaaaggttctaggaggtgttcaacgcgaaatactacaatgaggccgttagaagtgccaagagaaaagagttcgtgcacctgacccagagggaaaatatgagtgtgactgagtacacacgcagtttccccggttggcaagattagcctcgggaatcgtgccaaccgacttcagtaaaaaggaaaagtatttggatggattaaatgtgaa

SEQ ID NO: 264199 - DNA, 455 bp, Cannabis indica
ggcacaaaacccaacaataagatctcttctatttatctcttttaagccaaactcaaagaaaattatcatttcacttatatgttattatagaagctatagattttgtatctatgattagcgctcccactcaattgtactatgttcctaaaatgtaagtattgggccgatctaattgatcagctttaacgaacaagtcaaagaacacaaatagtacagttaagctatacctacatgacacacaacatacaatgacacacatcattttatatgtggtatcgacaactctttcgaattgctcctagtccacaaggccacgcccagagagagaaatttattagatgaataacaagtgtttacaaaaccaaattggcctatacatataaaactccctgtttgaatttgccgcaactgttgtagtctattcttccaatcagatttcagaagtgtcgagacct

SEQ ID NO: 264200 - DNA, 901 bp, Cannabis indica
tgaaacttgagtttggctttttttcttgttctaaccgataccattttgccattaccaactttaagtttcaactcttcggattttaaataattctagttttcaagcaattgcaatgaacaacagacatagttagtagatctagaatcaaaaatcccgatggatttgtcattctctaaaacatgtgattcaagttcttagtgttcagaagtctgggacaatttgatttaaaatatcccttatgttcacaattagaacattgaataatatgtctacttaattgttcttggattgttcttattgctggttcaattttttgtgaaagataatctgagtaagtggaatcactatctctatccttttcaactgcgcctgaagtagtagaattttcgggggaattattctcaatatcttcaactttccttttgcccttatctgcattactggagaaggatctccatgcaagtgacaatgtccgttcataagcacgcaaatcagcgtccatcttgtctatgtcagacgagttccaattgttaacaacgaattggttaaactcaggtgataagttgttgagagctaaatgaactctttgctctctagataaaacaattcccagcatagcttctttctggaatttcatgttcatcatgagcaagtgtgaagttatactttgaccaagagtcatcttcacactttggagttcattcctaaatgcatattctagatgaggattggggtgtgggttgtacattttgacactacaattatcaataaacaaaaacaaattattggttcaattaaactcatacacaagttcagaaaataaaagtaaagcaaatatgtttgcaaaaatactaaaataaaacatattaattattttccaaggttttcaacataatgaaat

SEQ ID NO: 264201 - DNA, 1528 bp, Cannabis indica
aagggcatcgagtaactccatttagaatttatttactattcgagcaactccaactaaactcatccacacccctacgaaactctacacaccgtctatttaaagtcatccaacttttgttgctcaccatatttctacataatataaaaagagaaagttcaaaacaaagttgaaaatatgcaagtgtccaaatccacattctcactctattactaaaagggtaatgaacctatctcattcaagtttgtaatatacatataatataatctatgctcttgagattgcttctttcttgtcaaaatttcggcagtaccttctcacaattctcataagtaatcaaaatattaataagtctaccaacttacaagaatgtgtcaggagatgacgcatcaaaatctttagcaaagaaacaatcaaatgagcaatagatcacactataggttatggatcttgaacatgtattcttgataaatttagcaactgatgttattcactattattaattattaataaagttattggttatgtatcgtcaataaaattagtacattatttactagttattgatctcgaatatgtgttactgataaaaatatacatatatgaaatcattggtttgttttcaagttgtgtctaaaacatttagtttgaagatatacagaagaaatgggagattagatatgatgtatgaattctcatgttctagtatttcgtactattctcagaatttgttattaattattcaaaaatatattttataaggggtgaaagtttaaattttataaaatagaattttattataaatattataattaaatgacttaactgttaaaaaaaattataatagacttaaatataaaaaaaaataaaattattaatattaattgctaaaaggggttttattaaatatttaaattaaaaattaattattttaagaaatagtttattatagttaatttaattcaaaaaaagaaatttttacatgttggtaacctgctattacatgttaacaaaaatgtaaccatcatggacccatatatagataagaattgaatatacatttaatttattaagttttaaaatatatttataatttttgtattagatttttaaattactatttttttaacattaaaatagtaattgtatatctaatgttttaaaattttatataaatatgtgtagattggattaaatttatacttttacatgccaatcaacatccaatattcgacacaagtgcgaattttagattttccaatctgtacaagtgcagatgtctgcactttgcagattttttttatttaagcatttatatattacaatgcataacttgagactcgaactcaagacctccaatacactttaagaattagattgactattttataaacactcctaaatttcacataaaaaaaaaacttgtgataatttcataaagatggaagggaatagtgatcgttttcacaaagtgtagtttatactttgtacacacataataccaaatcacacacaatttttttttattttt

SEQ ID NO: 264202 - DNA, 1136 bp, Cannabis indica
gctgattgctttgctttaggcatgcctacgaggcatcctgttcggaccgtaccctccgggcagatactcaaggttgattccacatgtcaccatcatgcgatgccacatcagagtgtaaaaattaggataacatatcttatttacaattttgtttattttgttatatttgatttattaaattataagattagaaatatgatattagaaatatctaaatttcatattaagataatatattatattatcttattagatattaaagtaatttaaattatttaaataaactaaaatttttgaaagttagttagaaatttgaatttcaattagaatttaggatatttaatagatttgtaagattttaaatattttcaaacaacctaaattttaaattctagttaagatatattttaaaaatttattttaaactagaatatcttaacctactttccagttatctgttacatgtttgttatgtttgtttatttatttatttaatttattttacaaacctattatttatatgatctaaattgctatgattaacttgttgacagatctaatgatttgatttaaatcatagtccaattttcagtagatcttataaataatttgtaacagataaattttttgtatttctttcatttgtgtaaacttagaaacatgatagggctcatccaaatcaattggacctgtgtgagcctatatgtctacttttgggctaagaaacattatatttaaggttaaattcttctcctttgggccttgtgtgagagttaggggcccattagtaatgggtacgacatagtgaatccagccctcccgcacatgaacaactccaattgtgaaggcccattttccttatttaaataattttattaggctaattatactagtttaacctaataaaaattgaattagcaacataattaattttgaaataagtaaaattaatttttcattggattattttaaaattaattaaaaaaaaacatacttaatttaatgaaaagattctagatagtgaattatagtaactaatttatattttctaatatttaattaagtagaaaaatatatttaagttaaaaattaatttgttaattaattttagaccaactttgttatcttaatttttg

SEQ ID NO: 264203 - DNA, 1594 bp, Cannabis indica
tggtaaaacatattccaacacggggaccactacaagtatactatctcatccttggttatctgaccactccaatccgtatgtcaccactactcttcctagacttcatcacaaaatggttaactctctttttaatcataataatatatcctgggatcatgagattgtccatgacatgttcaattcgcgtgatgcatctttgattctcgtgctacccttatgtttttcagctggtgatgattgttagtcttggataagggagagcattggtattttctcagtcagaagtgatacaacctactgcagaaatcaacacaacatcagcatggtgttgacaattctgggttttggcgcaaactttggcaacttaagatcccccgaaagttcaaaatttcatatggagagcagtttcgaatgcccttcccacctgtttacagcttgtcactaagcatgtagacatctcttcggcttgtccagtatgcaagagtcaactagaatccatccctcatgctctcatcagttgctgttttgctcaggcatgttggaagaatgctcaaccgtccctcaatattactggtaataccagtgttggtgcttggcttcacaatgtgtttaaaacttctaataatgataccagctgctgcattatcatgctttgttgggcaatctggaaagcacacaacagtcttgtttgggataagaagacttctactccgcagcaagttgcttcatcagcattagttacacttgatcaatggcgcaaagcttaggataaacaaaatttattctcattggctcttgaaactaatggctctaaagctgagcaatggactaaacccgtacctaatacaatcaagattaatgttgatggtgcttcatttgaaaatgaaggctcttatggctttggaattgtcgcacgagactcctctggcactttgctaggcacagttgcagtttgcaaaaatggctcttttgctgctgaagttgttgaagccattggggtaaaggaggctcttaattggctcaaagataagagttgggataaagtggagattgaaaccgacaacatgctaaccgttcaagccattcgtgcctctcatcgggtgtcctctgtttttgagttggttgttaatgattgtaaacttttactttcaaatctcccaaatatttttttttttgcattttattagacgatcagctaatcgaatagcccactatgttgctaggcattgtcgatttttatctggttgtagtattcatatacagaatattccgcctgatctaccaggctttttgtactctaaatgctaaatttcaatcaagtttctattacattttttttaaaaaaaatatagaatatatattgatttatacatacgtcaatgtttacaatttactagatgcctcattagtacataatttaagaatataatttattcttacattaccagataatatttattaataaattaacgatttattcatttattaacctcattaaaaactctttaaaataaaaaacctcttcaataatatttgatactacatacaatatttacaaaaagacatattggacagattaagtacactgtacaca

SEQ ID NO: 264204 - DNA, 782 bp, Cannabis indica
gagcaatgtatagaagttactagactaccaaatgatataggaaatttgattaagttgcgacatcttagtgttcctagattattagaaatgccattgcaattgggaaagctacaaaatctccaaacacttaatagatttgttgtgggaagaaatagagattctggtggtattgaactgttgaaagagtttcaaaatctacacgggaagctttatattaagggactagaaaatgtgagtagccttgaggaagtttcagatgcaccattattaaagagtaagaagtttcttagtcagctatctttgaaatggggttttggtcatgaacctgattacttccacaaagaaagacaaagagagctactcagtgtcctccagcctcatccaaacctgaaggaacttacgattgagaactacaaaggcaacagtttcccgaactggatgggagatcatcgctgcttgtctaatttagtaaggttagagatttcatgttgttctaattgcagcttcttgccgtcgttgggacagctatcttccctcaaagaccttaggattaaatattgtggtgtggtaggaataggttcagagttttatcattctactagtcttgattcttctgttgcaatacaaacaaaaccattctttagatctttggagaacttgacatttgggggtttgtattatctccaagagtggtcatttatggaaggtggagtttttcctcgtcttaagaatcttaattttgataggtgcaagagactcaaagtgacattgttaggagatta

SEQ ID NO: 264205 - DNA, 889 bp, Cannabis indica
taaatctaattatatgaaatgagttttatttagggcataaaacccaacagtgaacgcatgggaaagattgaaggagttgttgaggaagtgcccacaccatggtattcctcattgtatccaacttgagacattttacaatggtctcaatgcagcctctaggatggtgttggacgcttccgctaatggagccattctttccaagtcttacaatgaagtttttgagattttagaaagaatagctagcaacaagtatcaatggtcaactaatagagctcctacaagtcgaaaagtagcgggtgttcttgaagtagatgctctgaccactctaaacgctcaaatggcctcaatgaccaacattttaaagaacatgaatatgggaggaagtgtacaaccagctgctgccattcaaagggaagaaatttcttgtgtgtattattgtggtgatgggcatacttttgaaaattgcccttcaaatccagcttccgtttgctatgtgggtaaccaaaatttcaaccgcaacaacaatccatactcaaactcctacaatccggcatggaagcatcatccgaatttttcatggggaggtcaaggggcaagttcaaatggagcacaagcacaaggaaaacaaacatttccactgcgattttctcaacgaccaagaccttaacaagcacactaacctcaaggctctcaaactagttctttggagagcttaatgagagattatatggccaagaatgatgctgtaattcaaagccaggcagcatctctttgaaatcttaaaattcaattggggcaattagctaatgatttgaagaatagaccacaaggcactttgcctagtgacaccgaaaacccacgaagagatggtaaagagcattgcaaagcg

SEQ ID NO: 264206 - DNA, 2214 bp, Cannabis indica
tttaaaaaaaaataataaatactaaaaaataaattatacatagatgataaaaatagtaatttttttacaagaacaaaaataaaaaaccacctattaaatgttcgatcgttttcttttggaccaagtacttgtgcaacaattaatgatgatataatcaaagtgccataataataactataaattaagaatcatataattaattaatgaaaaaattagtggttgttgtaatataaaaattataatggggtataacaatcattgttttaaggccaagaatgaaataattaataactataaatatagtttatgaattaaagaagttcatatatgacattgttaaatccttcaaataaaataaaatattattagctggaccaattagttgatgaagtggtagttgaggtactcatgaatgtagtttatgggacaagaaaaaaaagaaaataattatggaaacaaagttgactaaaataatagttgaaaacacatgggaacaaattttattagttggaattagcagttgctttttgtccattataatataaaagaataaaaaatataaattaacaatgagagttgagatcaaaattaaaaaaaagctatattattgaattgagcctctcgtgcagcacaaaatcagaagtttttttaatatataaaataaaataaataattacaagtgggacagatgtcaatgagagttgagatcttttatgatttgctttatttttttttttttatttaatgactggtaaattaatcatttgctttaggcttctatataatatgtattaagtaaactttaaaatgaatgagggtaattttttttcttttaaatttagagtttgagttactttgataacttttacgtaggttattatataaattttaattgcaatttaaattattctattaattactatgtggatttttaagtaaatttttgtaaaaatgtaaaaattttattttcacaaagtatttctacaaagaactttaatttagaacatgaaagactttttttataattggtagggaaaaggggtcctatatatatttaattggttactttgtgaatatatatatatatgtaaaaaaagaaaaaataaaaaaataaaaatcaatcagagatacatattggaattattgtaacctccaaaagaagcaaaaactaataatacaaacatgtagggttactacccttaatgtagggtatagtatatggtgtctttattaggactttaccataataaaaatatacataaagaccatgccataggttaggttaggtcgactctcaactcaactctttactaattattattactcacctctcacacactctctcaatggaatcttaactaattaattataaaaaattgtcaaaaagctccaaaaaaaaatcacatatataggcaagtttgtttattataatataatgtagaatatgtatatgagttgtattattgaaccaaaccccatgtcatcaactcatgtgtttatgcatgcgtataaaatatatacaaacgtatagcatgacgagtctatacaattaatgcggctttttcgaagcagttatatacatgaacataaataaataaataaaataaataaaataaaatattaataaagtctatttgaaaataataaataaatgataattgtaattaaggaagagatggagtgttaataataataattatatgataaaaaggttagaattacattggattggatttggtttagagtgtggtgtgtctggggttttgtggtcatgatcccatggagttgcggcgtatactataagtcagctatggtcggccaattttctttcttttttttttttgagaggaggtcggccaattttttttttaagaaaggttaatggtatcaagaaaattaatatggaattatatattttaatttaataattattataaaaaataataaatcatttatagtgatattgaatactataaaagtagtacttatatggttatattgttgttaattactagtaatattagagcatctttaataagtggtacaaatacaaaatatagctcattttgttaaaaaaatttattttaatgatatgctaaattataatgtaaaaatctcactaaccaaaagtgattcaaatttgcatcacaatatagcatgtaaaattttgcatcacaataaatgctacttttatattttaccattatgtcattt

SEQ ID NO: 264207 - DNA, 621 bp, Cannabis indica
aattatatgagtatggaatcaggggttaaccctaagtgtgaaatatcctgaattggtgtgactaggattatcggcacctgatcaggagcacccggggatttggaatctctatctattgctggacaataggtaagacagtgattagcatgtagagtatgcgcagtggcgcttatattgaaagttatatgtatgattatttaataaccgggattagggcaattaccttaataggaacgatatacttgcctagggttattaccctagtgatatatgtaagaaaatgccatgtcatgttatatgtaatgagattcaagggttatgcgcttaagggataattaggttagactcggtaaccataactgagatgaaccaattctaaggccttaaagtaattagacgtttgagagcaacacgtaggtctacgccacgtagatttaaatagatgtgtgagtgcgacacataggtctacgccacgtagatgtgaataggcatgtgagtgcaacatacaggtctgtgacacacagacatatatgaattgcattattgtttaaatagtataatgtgcatattaatattgttatgttatacaccgtcttgctgggcttggctcacgggtgctct

SEQ ID NO: 264208 - DNA, 1033 bp, Cannabis indica
ttcatcgttttagaaagttcgtatttagggtgttaatcaacatacttgtgagtagatataagatcctggtaaaataatttccaacagaaggtgcaagaaaacttcccaccaccagcatttcgcagaccatgtgtaacgccctaaataattaggcacgctacccaaattacttacgaaaccctaatcccctaaacgggattactaatcaaaattagcgtagaatttaaactttaataacaataagaatgaaaataaacttgtaataatttaaagtttataaactaaaagttaccgaagttgggatcccaaaaacaattacaaaatattattacaagtccttttctttcagtcgacctaagcggcaaaacagaatctcaaaaacacaacactagtagaccccaacccgcttggtctgatatggcccgaaaatgtacattcttcgcccagctcctgcactcatagctaatcagctaaagtcttaccctttcctgcacaatagagcactcgtgaactaagtccagcaagacagtataaatcataacaataatatgctcatcatgctatttaaacagtaatgccattaccatatatgtttgtgttacacagacctgcatgttgctctcacatgcctatttatgtctacgtggcgtaaacctacgtgttgctctcaaacgtctaaatacaataagcccttacaatggttcatctccgttactatatattcatacatatcatcttcaatataagcgccactgcgcatactctacgtgctaaccactgtcttacctattgtcccacaaatgcagagattcagaatccctaggtgctcttgacgaggtgccggtaatcatagtcacacaatcttggattttcacaactagggttaacccctgattacacatttatgaaatattcacatggcatttaaaatttagataatcccatagagctcagaatgagctttccaatgatatataaaagtcccaaataagagttcggaataaaaagatatgcattttcaaagttggaatcc

SEQ ID NO: 264209 - DNA, 962 bp, Cannabis indica
  modified_base (58)..(58): a, c, t, g, unknown or other
  modified_base (69)..(69): a, c, t, g, unknown or other
tttaatttggatttttgttggattttgtgagatttagatgtgatatcgcgataatgtntggggggggtntatattgtttgttgtgctataagatatgggattgtgtttgagtcgtggtggaggtggcactaacagtgatggtggttgcggtggtggtgacggtgggtggtggtgatatgttttaggaaaagaatagaaaaagaaagaaaagtacaagaaaaaaaaaaagaaaacaaaacgaatttttttaatatttaatgaatttttttaaaaaaaaatttaattaaatttttttgtcttttcaaaaaaaaattatttttttaatttttttaaataatttatttatgtgggcctataatattgtgccacgtgtacattatgtccacgtgaataatccaccatgacagttaacagctaaatttggacgggagtgttaattttctaacagaacccgagtattgggagttttatcgcccaaatttgagttttagggattaagtgaaaccaaaataaaaattttaaggattttaacgccgtttacccaaaattaattatttttcattacatttcattaccccaaccaaaattaatttaagtgtgcaaaatcaaagttggcggatattaatcctaatccgtatctattctatataaagtgtgcctatataactgaaattcttggtttttgagaaatttatgggttacttttaatttttatttaataaaataataaaatattatttatatataataaaataataataaaacaaatctcattaatatttgaactgatatttgggtgacttttaatttttatttaataaaatattatttatatataataaaataataataaaacaaattctattaatatttgaactgatatttaatgctaaatattcgagaatcacaacacatttaaaaaaaaaaacaacccgagatttgatactctgagactctcaatt

SEQ ID NO: 264210 - DNA, 1374 bp, Cannabis indica
ggcgacaatatttttgaattgaacagtaaactttttgtaaagtatttttgaaatgggatcccaaagtattttgcatgatacgatataagtatttaattgaataagcaaaattttaattaatcacgattttcattaacctcgttgattagcaacgagctgcacagtacgtttaaaatcacgtcaacacgcctatgctagttagggtgttacagtatatgtgaggattttaaatcgtgccatacagtacaggttaagtttttttaattaaaaaaagttgtttcagcgacgatgttttttaattgttacattggaaaaatatggggaaattgcaaattttctgccatttttcctttgacattaatttttaaattttttataaatctaaatagtcacaataattaaattaacgctaatgtcatctaaatatattttaaaatctatattgtcacaataattaaactaaagctaatatcatctaaatatacttaacactctatatagtaacaataattaaactaatattaataatcatctaagtatatttaaaaatctatatagtgacaataaattgagatgtctacacagtgatcaacaagtcaatcgttgtcgcttcacttctgctttcaattaaagaatctaccgatcacacataaaatttatctcgttatttgtatacgaagtggagaacctaccttgtaaaacaaaggtacatattaattagtaaagactattatcatatgttgtttaataaagagtaatatttattataatacttattaattattttattagttgtgtcaacacgtgtattggatcttctacagtcatgaaactttcaatgaatttcatgacgtagtatccacattgtctgttgtcaggttgttcaggacatataggagttatccactggatagatctatcaggccatcctatcatttgattatatatggtgaacgatctaacaaaaattaaagttagcatatataaatttataaatacaaaacacacttacatattgggatgttggatatagaacttacgttaaatattttttgccctgctctgttgggccgttttcctcgtcacctcaacgtatggactctatccgtagccacaaactctctccattatcgcaaatcaattatgctttcacacaattttgtggcttctcaagaaattagggagccacttcaataaatttaaaaatactatgtgttagggtttttttccaatccttccacgtgtctccacctttagaaatggttaattttctatctgtctctggtatataggacgcgacctgaaaaattgacaatcgtagctataagtacaaattataattaatagtaaggaactcaaataataaaattaatt

SEQ ID NO: 264211 - DNA, 694 bp, Cannabis indica
tacctaagcacagatcaaatgtgttcatgtttagcttcaagagtttaaaccaagaaaagataatgaattgaaaataacataacatactctttcagcaatacttcttggatgagtagcacaaccacgctttgctctaactttgcaaggaacagcatcttggaaatgcaaaaacttttccatactaatttctgctgctgaagattttggcaaactcaagtggtgtgacagcaactgaattcggtttcccatctcttcattattctaatcacaaaaaccaataataaaaatctgaaaaaaaaaagagaaatttgtgggtagttttttttttttttcttaattaccttatcttggtctcttcttaaaccaccataactatctgagaaatttgatgaatcattccaagaaccaaatgagaatccagagccatagaattgaacatcactagtatgattctcattattatttccaagcttattttcttcatcaagtgtatttgcctcaaggttgttctcactttcaacctctgaaatctgagataacatacccaatgaaggaattcttggtgagaaactaagctgactcttcaatctgtttgttggtggactcatttccccttgactagcagtaccattactattattattattcagtccaccatagtttccagagcctttaatggtggcatagcctgcaa

SEQ ID NO: 264212 - DNA, 751 bp, Cannabis indica
tgtcatccaaatttctaaaccctagctgcaagccgtagctaaaaacgacttcagtaaaccttaagtgtttcgccaagttgctgttttatattggttagcaaggccgcttcgggtcgtctatccctagcagcctgaaattgtttcttgaaatccctggacagctgctccttggaagttactgaatgatgagtaaacttgttaaaccaactactcgctgttccaacaagcaaggtggggaacaaaatacagcataaattatttgtcacattactcgctcgcattattgtgttaaaattattaaaatgcaagaccggatcagtggttctgtcgtatgacaagacatgcgggtttttgaatctcgaaggaaaaagggtgctcattatatctgggtgatacggcttaagctcctcgttcgagtcgtatccagatagtttccctaattcccccacttgatatctcctgaacttgtcctccagctcgtttatgcgtaattagattggatcctcttgctttggaccaagctgttggcaagggtcaggtttcttccgattcaagtgctcttacagatccggttgagagtaattgctggcaaaccttgtcttactcacagatcacgtcctactcatagactttgtctttgagtggctcgcggatttactggttcccatactttctcaatcattagctcgttgagtactttctcctcttcgaattaattgattcctcatgctctactctttcctcccgagag

SEQ ID NO: 264213 - DNA, 1509 bp, Cannabis indica
tgtggaaactggcagcttccaaaaaaggtcatctttttcttgcagattcaagatagaagaattatgcatttcaatgatttataaaatctaaacaataaacaaagaaatcaatgaattttagcaatacaaacaaaacaaattcattcctgtaaattgctatacacagaagcattactataaaattatgtattagcaaaaataacatacctatccaaaaacaatgagtccctctctctcattgttcaattcaatcacaaaaggtggttattttgacatgtgaaatcaaagtagcttcatcaagtccatagagtgaatcaatcaagtgcatcctcaatgaagctggacctttggccaacctcattcccatctcaccggcaactccaaaaaccgataaggccaatgctgtggcttcaaaggcattggaagggtccacggctacgaaggcagctataagtgctgtgacagagcaacctgttgctgtaatcttctgcatcattgccactccattgtgagctccaataactctttttccatctgtaacaatgtcaatagctccagacactgcaactatagcaccagtagcttgagccagtgacttagcagcttcaatggcgtccgttgactcatgagagctgtcaacacccttttgagtagtatacataataaaaatcaatactttaaactcaaatcagatgaaaaacaccaaattgagaaatacccatttgttaaaatcgtgaaaaatactcaattgattttttttcttggtaaatttcattaatttaccaccaaatttcattatgggctaagtgtaaatataaattccacaagtcacaccgactgaagacagaatacacacacacaaatctctcattttcttataaatttaattacactaaacacaatatttaaccaaaattatccaaagataaaattttagcaattggatgaatgaaaatataataaaaaaccaatactttaaaactaaaattagatgaaaacaccaaattgaaacatacccattcgttaaaatcgtgataaaacgtcaattattaccttggtgggttgaacagaagctttggaaagagccaaaatctcagacccatttcccctaataacagtgggtttgagttgaataagctccaaacaagcattcaaccgaaaaccggaagctccggcagcgacagggtcaagaacccaaggcttggaggagttaaaagcgaagtttgcggcggctttcatggagggtagccagtcggcggagagggttccgacgttgagacagagagcgtggacgtgaggagtgaagtggggtatttcttcgagggtgtgtagcatggcgggtgatgcgccggcagagagaagcgtgttggccatcaaatccatggagacgaaattggttatgcattggattagcggggattggcggcgtacggtggttaacatggtccacgccttatcggcccattgatcggacggtggctctactttgggttcggcttccattgttgg

SEQ ID NO: 264214 - DNA, 507 bp, Cannabis indica
cttatacgaatacattttttttttatttatttattttccttttccctacttcagaaatgtcaaatcccccaggttctcctcttcccgaatcttcaagcggggatgagttccattctgacgtcggggatcgatttcccctaagtccttcgattttttctcgttattaccggcccagtggcgaagctattgtcggaaggatgatgagggcttacaaggctaggcgcaacgatacgtcttcatattctgacgaggagtggttacagaatttctttgagaacgaaggacgtaacatttcagttaccacaagggtgcctgctgaattccatgcccttcgcttgcgcgctgagcgacgccgggataatcgtcgaatgcaagctcggaactggcgggcttgggatgaggacttggagagggagcgtttagctaatgaaaggcgaatggaagagtgtttaagggagggagctcctttttaccccctgtgtaatacccggaattaagaaatggatt

SEQ ID NO: 264215 - DNA, 930 bp, Cannabis indica
tagttaagtcttgatacacggcttggagagttaacttcactctttgctcggatcatctgccctttggtttgcttagtcaagtagactttgtgcgtgtagatgtgttgcttgaagtttgtttggaacatttctccagccaattgtaaagaatgacagacacatgtcactagtacatgttgccatgtcatagtgcaaaaaatggaataacagaagtgtccacctgatatgtcgtggtagccaagtttttggtgccttccaagatggtatggttggccacatctttcgggtttgaagagattccagacgtggctggaacacgaacatcaggatatgcaataataaggtgttgaggaaaacccaatgaggcataagttgtagctgaaattctccttgtgtaaccatggcgtttgatcatataattttataactcgctctcaatgaaagcactaaacaattgacttcagatttggccaaccgatagcggagtcatatttaatgatgatgcttgccacgtgttgcacaattagagcaaaaaattaaagtagacatcaaattttatagaggttttgccccctgagttagcggatagtgacgtactccccttttggttgtattgataccagaaataataccacttaaataacaatagtagtgtgatcaagagtggcactcttaagattacaatgtgagtacaaaagttggcaaatctctagtgagaaggatgcttgggcatgtgagagagaggagaggagagaagtgagtttcatacttagagttgagagcttagagagctagagacttagagcttcgaggcataggacttgagacttagtccatttgggttagaataatgctctttatttacataattaaataataaataataaaaaggataattatatctcaaaaatagggaagttgttgatattt

SEQ ID NO: 264216 - DNA, 735 bp, Cannabis indica
taattgaagatccatcaacattgatatctccatgttctacactttgaaaaggtacgggagtccttacttcttcgggtttaagaaaaccattctgtgtgcagttcctcaagtttttatcagcaagattcagaacagatgccattgattcacataagggtgcatcagagccaaatgtcaggacagtaccattagatttcattgaaggatgaggagagtgaattccacttgaaacatcagttcttccattttgaagagcttcagaaacagttatgtgacggtagtgagaagcagagttcttgttcttacgacgaccagcacccacaggaacattcctcatcgtcccaccagcagtccaatatctttggcatttcttgcagaagtgtcggggttggttaacgttgtaattgttgtagtaacagaacttggtgtccatgctattacaccgggggcatggaagtatcttgtctggtttcttcaaggtcttttcttgtgaattatttccctcgctctgctcttcttcggtctttgaagctttcggtgtaacactctccttatcaacaggtgttgtcgggttctcagaacttccagaagttgcacccgaattccttggctcttcaggagacataggttggtttccatcttcctctttagtctctgtgggatcatcatttgttgttgcctgaatttaccaaaatttctattaagaattgagttgaacactgaatatttatccaa

SEQ ID NO: 264217 - DNA, 801 bp, Cannabis indica
tgcttttctttctaattttttcaacttttgaaaacctttgaataaaagatgaaataaacttaattaaatttattatttcagccaacacatataaaataaatcacataaatcccaattaataagatcactaaaggacaaaatatccatggggcaaaatgaccaattttcccctccacactaaaataacataaaggggtactaaaggggtactaaaggggtactttggaaaattctaaattcctgaccaatcccgacattcccaatgtctaaataaccgtcccgcaatactaacatactaagttgtgattatactgagccaaacaccgagttccatgttaccgggcaccggaaatgcaaacttatgaaaatcactatatgacataaaatgcatttcagaattcaataataacagtataaataattatttaaatatctataaataattttcataattaaacataattaactgctaatttccaaattaaactaagcggtctttacacctgcagtgcctccaccgcaggttcaggccattgtagttcctgcggtgctagaagaataacctgttgctggcaactgtatggagccgttttatgagaggttttgcaagcaagcaccttcggtgtttttgggaggtccggatgtgatgaaagctgagtagtggctcatagtgatataacgaattttgaatttcgtgggtgtaacgtccccgcttcaagcctccattgggcctttacacccacggactaatggctcttatacacgagtttgtcactctggctgcttcatggactgatgact

SEQ ID NO: 264218 - DNA, 677 bp, Cannabis indica
ttaatccttacccccaacatatgaattaacactaataatattataattaatttaattctctgcatgatgttctaatctcacccttagatttatcagtgatgacctcaactcttcccaatttgaccatagcttgtccaaagtttttgggcaaataagtcattattcccaaaggctagttgtttcacaacatctttagtttttcatcattggctaaatcttgatcaatcttgagaattcctctcttcattactaattggttgtagaatgatttatctacaaccaaggaactatcttcattagtttggtccaacgggacgatgttgttgaaactcgattttgaaggacactttgatttcaaagagttcaccaatgtcgagttcattgttgggtcaggcttcccactgccattgaagttgtaaactcgatcttggaacagactgcagtgtgctgttccaacagtatgaccacctacacgtacgcatgcatgcatatcgaattctaggttaacgggagtaaaatagtaaaagaaaaaaaaagaagggccgacatataattattttttgtaaaaaataagtataccaaaaaaattgtgtcactaaccgaaacaaaagactatcctttgttaataaattttaacttcatacatagatttttgtaactagtagttctttaaacgt

SEQ ID NO: 264219 - DNA, 772 bp, Cannabis indica
atgatggatcagaaatttccagacttcctggaatttgaaaatgaattcgggtcaactaccacagtgatgctgaagtatgagtggaaaccagtggcatgttctcactgttctgggtttggacatacagcggaggaatgtaggaaacactctaatgggaagccacaatgggtaatgaaaaaagacaatagaaagcaggttgaaacagatactgagggatttgtgaaggtgactcgacataagagtaaggcagagaacattgaaactgaagttactgggacacaaggggcaagtgttagcaattcttttcaggttttggaagataatgcagagagtttgatagaacagagaatggtgaatgaccatgagatagaaggatttgatgctagaaaagtgagtaaaacaagagaggggggagcaccctctctttccaatggataaattgttgtgttggaacgtccgaggagccaataatcaacataaacagcagctgattaagcaattcattagtactcagcatgttgattttgttggtcttctcgagacgagagtaaaggctccaaaacttggagttctatactcaaatgtgtttcaaggatggtgcttttcttccaacatagcttggcattcgggggggaaaattgtgatagcgtggaatccttcaagattcatagttgatattattaaatgcactagtcaactaatgcatttaaaaatatcaactattgatggatttagtagttttttaacagtgatctatgctgcaaataataga

SEQ ID NO: 264220 - DNA, 640 bp, Cannabis indica
ttatctgccttcacaacccattcggtcttggcctgagttttctttttacattcagcagtcacatggcccattccatagcactgttgacacacttggcttccattcatactggactgttactgtagtgttgttgccatattcactttcaaattcaagcattcctggcaagtcttgttcaatgctaacctcaatcaaaatccttgggaacataagcctttctctttctcttgtaatcgcatctaccatgacaggctttcccaattgcccaacaattttaaacaacgacttctctccccaatacttgagctctaagccctctaattgtatccaaataggcactagtttcacatcttctttcttaacacttgaattcaggtcccatggcttcataatgaccggtttcctattgaagaaaatatagcccccatttaacacttcatctctttgctcaatagaatgaaatctgatcaagaacaccccatatgctaatagctttactttgtccactttctcagaccattttcgttttgcaaaaccttcaaggttgtgcaacggtggattagaaccaagcacatagcacaccaaagatggtttccagtagttaatctatgtcctctaaatctatcttcaccttcctatc

SEQ ID NO: 264221 - DNA, 568 bp, Cannabis indica
ggcgaaggatggactttatacgttgacggagcctccaacagcgaaggctccggcggtggtataatactcataagccccagtaattttaaggtacatgctgcacttagatttgaattttctgcatctaacaataaagacgagtatgaggctttgattgcaggattgaaactcactcttgaaatgaagattgagtatttacaagcctttagcgactcccagatcgtcgtatgccaagtaaacggagaatatttggccagaggcggacatctggatagataccttgccctaacttgtgagttgctacagaaattaaaaaaaaaatggttgtttctcgagtaccacgtgctcataactctcatgcagacgctttggcccgtttggcctcaataagagaagccgaattactcgatgtaattcctgtcgatgtattgactcacccagcagtgagtcggactgaagtaatggagataaatactgccagagaagtcacatggatgactccaataatggattacttagagaaaggaatcctacccgaagataagatagaagctagaaaactgcagta

SEQ ID NO: 264222 - DNA, 760 bp, Cannabis indica
tcctgctcctgctcctgctcctgctcctgctccatcagaatggtcaagaatgtggtaacggtcgaaaaacagtatttttatttttcgttaaattctgtttgctattattttaaaaaactttttaataaataatttaataacgattaaatattattttgtatcttgtattttgtaaaaattattaatcaaattttctattttgtttaatgataaaatttttaaaatagtataaataagattctgaattaattttttgtcaaaataaaacttaataataatctcatctaaagatattatgacaaaattgattgcatttgttttatccgtgttcgtgttataaattgccttcaagttggttattaaaaaaataaaattttcaaaaattaagatcagtgtcctatgtttgctattttagaaaatataaggtctatttttccatttaacaaaacaaaaggtccaattattaacttttacaaaatacagggtccaaaattgtatttactttgaaattcaaactcaaacttaaaatcaaattaaggaaaaagttgtcttcacctaaaataaattattgttacgcagattatagatccagtttgttcaagtctcgacaggttgatggtactctgggttggtcccccgcctgaggattgggtcaagatcaactgcgatgtcaaagtcggtgtggaaaccatttgtgcggttgttaggctatttttagcctactttttgggtcacctttttatagttgttttcctttttt

SEQ ID NO: 264223 - DNA, 1322 bp, Cannabis indica
gaaggaaatggttgagaagcttcaggtttgtatcggtttcgaatgtgcgtttagtgttgatgctcaagggaagagtggtggggtagctttactttggcgagaagcggaggagttccaattagctaggttcggtcctaactatattgatggtgtcgttcacagccgtgatcatggagagtggagattgacggggttatacggcgagcctaatcgtagcttgcgtaagcgtacttgggatcttcttcgctcgttgaaaacggagagtgacctgccttggtgtattgtaggagacattaacaatgttacctctcaacaagataaaagtggaggtaatctatatcctagttggttgattaatggtttttgtgatactttggatgagtgtgggttatatgatttggagttgagtggttatccttacacgtgggaaaggggccgaggaactgattcatgggtagaggctaggcttgatagagctttagttacacaaagttggcttgctaagtttcctttggctaaactctataacatggaagtgtccacttcggaccactgccccttgtatctagtccctgttgccgagaacattcaagtgaatacaagagtttttagatttgaaaactcatggttaaaggagccaatgtgttttaaagttgttgaggatagttgggaattgtctacaggtctctccattacagaaaaaattcgtgattgtggcaatgttctgcttgattggggaaaagattacactggtaactttggtaagaggataaaggattgcaaggctgagattaaaatgtggaagaaagagcgagatgctaattctcttgagcgttataaagcggcggaggtgaacttgaataatctatatttgcaaagagagattttctggaagcagaggagcaagcagctttggctgagagagggtgatcgaaactctaagtatttccatgccaaggcaacttcaagaagaagatctaatgttattcaaaaactgaagaataccgacggtgattgggtcggctgggaagatggtcttccaacagtggtgatcaattattttcaacaattatttcagcactctgatggtgatttttcttcagtcattgactgtgtctcccaatcggttactgaagaacaaaatgttttgttacttgaagaggtgactagagaggaaatcaagaaggcgttgttccaaatgcatcccgataaggctcctggcccagatggtatgactcctggatttatcaaaaattttggaatttggttggtgacgatgtagtgcgtttggttcaaacattttttgctactggtgagttccc

SEQ ID NO: 264224 - DNA, 1092 bp, Cannabis indica
  modified_base (622)..(622): a, c, t, g, unknown or other
gcatcatcccattctttaatgccccgagatttcctgaaaaaatttaggtttagaatggctagaaatagccaaaatagtagctcaaaaatatggtgccaacctgctataatcaagcacttgggaaatagaataatgatcctgaggcacaacagatgattagttttggcaagaaaacagtgatagtcttacaaatatgaaggcttagaagtagttcaaataggtctgtttggagatgaaacatcaaaattggaaatgctttcatgctgaatatcagaagcagcaggttctgcaatagtttttgaaaagaaatcttgatattcaacaggaagagtatcatttttgtaagatgaaaaaaattgtttcatggaagtaaacatctctttaacaaaacaccttattagaattcaaatctaaaagcttgtaagctttcaaaccagtaggatagcctataaaaacacatggtacaactcttggagaaaacttagtgccataattaggtaatgtagatgcataggataaacatccaaaagcttttaaatggctataattaggtggtttggatttgagaaatctcaaaaggggaaacattttgagcaacattcaacaagtgttgatattttcnccacaacaacagaattttgttatggtctataaatgcaagaatattgatgtacaattctaagagaactaaacagcttgtcaaactgcaattcttttgcattatcagaccttatgactttagcagtcttttggtactgagttttaatgagctgaatgaaattcagaatggcagtttatgcctcaaatttttttttggttaaaattgttggaaatattttaccaggatctagatttactaccatgtatgtttcattaacatcctaatatgaattctaaaacaatgaaataaacacatataaagtttaggaaaccttacattgggtgcagcggaatataatgactccttccgttcagatctctagcccttgattcctttctgtagcagaacataatcaagatctgaacctggatctctttctctccttcctttgatgctgattctccttcttgattggattctacacaatcttc

SEQ ID NO: 264225 - DNA, 1452 bp, Cannabis indica
cttaggtcaatagatcttaatcttgagattgttaggttctggcttaaatgtattatttgtgttctttgacttgttcgttaaagctgactaattggattggtccaatacttacatcttgggaacatgatagtgtaattgagtgggagcgctaatcatagatatgaaatatatagcttcgataactattagaagcaaaacgatgatatctttcgagcttggcttaatgcgataaatgatagagcgctcattttagtaattatattagtttgctgaaatatcatttacaagtagctaagtatttttaggataaaatacattgatgggtagaacggtaaatttatactacaccatgtagatcatctatagaggatctttgattatttggatataaaaaatggataattatagcgtatctattcttggtgaatagagcgttctatgtaatcagaagtacaatttcgaatctatagtggagtcatattattcccctgccatcattgtaaggatttcttaatcttttatgtgtttattttattattttggaaattcatatttagaattttagattatagtttataatcaaacatacatgttagtaaatctagatcttagtaaaatatgttccaacaatcatgtgtcaaaggagcagacacgtcagggatgacattcatctcttattattcagtaggcttctgcgtaccctctctagtatgcctggagggcttcatcctttacttgtttcaggaggctgggcaaacttctgggtcttaggagaccattacatatcaaagcaaggtcttgatcctccactgggtctgggcccattccggatctagcttagccttctgtgactagggaagcttgagcccatattaatacaatgattaccttcagctttgtgccatgtgtctttcttctagaaatatggataacatggatgtttaaacagacatagaaattatttgaacaaaatagagatatgtttaaacagaaagtaaaaacaaacataaaataaagaacacacgagattatatgcgatattccttttaaattgctactagtccacgaggccacccccagagaataaaatttagtggatgaatctcaagtgattacaaaatcaaattgacttatataaattataaataaagaatctctctttgaatttactgcaattattgtaatctatccttctaattaaatttctaaagtgtcgagaccttgaactctcttcaaatcgtagcacttgcacacttccttccaaagagtgacttacttcaacctatacaattttaacaagaatcaatacagaataacacaataacaaaatactaagaacttcttagactcaagttcttcatacaataaacaaaacctctctaaatttgaaaaataatttagaaaaggatatagtctctcaaaaccaacaacctaggacataagaaaaagaat

SEQ ID NO: 264226 - DNA, 631 bp, Cannabis indica
gccggtcaacgacagctgttttgtcttggcagagttctattaaagaggaatagaattctagttcttgatgaggccactgcttccattgattcttccacagatgccattcttcaaaggatcattaggcaagaattttctgaatgtacagtcataacagtagctcacagagttcctactgttatagatagtgacatggtcatggtcctctcttttggtatgtttttttccacttcatctctattcaaagaaaaaagaacagatctttttaataacttatggggattgtgtacttgaactcactcacaggtaagttggttgagtatgatgagccttcaaagcttttggatgccaattcttatttctccaagcttgttgcagaatattggtcaagctgcagcagaaattcacaataaaatatattattattattaataagaatggattatcatctaataaaaatatattccatcagtactagtatgaaaaactaataaattgttcaaggaacattaattttgtagctcaattttcaactgaatatgtcttgattgctacaaaatgctaataggcacaatgcgaaatattgtcaaatcattattattgttaattaaatattgaatcggatataatt

SEQ ID NO: 264227 - DNA, 1658 bp, Cannabis indica
gggtggccaagcctactgtgccaaagagaatacaagaaattagaaacagacatatgactattgtaacactggatttgggaagaggttgcagatgatgatgagggagcttggttggacagatgactgagttggggagactcaaacttgtaaggacctttgtcaagcttcctagccaacaagatcttcttggttgcctaatccttgacagcacaagtaaaggggtgaaactcaaagaaaactccattgtcaagagcaaacttagaaacactaagtaagttctttgtaatagaggggacatgcagtaagttattgagatgcagaggtttagacaaagaaggagataagaaagaggcattaccaatgtgttctatgttgaggcaagtaccattgccaataaagatctgttcttgtccattatatgtcaaggcagtcccaagattagcattgtctggagtgatatggtgtgtggctcctgaatcggggtaccaactttcatcacacacggtttcatttgtggcacagcaggcctgcatatctgcaacattagctgctggtgtgaattgttggaagcattctggaccagtaaaagacttgtcaaatctgtaaaagcactgctttacagtatgccccatcttgtgacacagttggcactgtggtttttgattccagctactgttttgtcctctagtaaaggggggaccacgaccaacagtgttgggaggggtgggttgtcctttgcctgaagtagggccatttctgttgtactggttatgggtattgcctccttgctgattggaatcgccataaaaataaggaccacttcgaccaaaaccatatctttgcatttgaggaccagtaggaagagtacgcatgtaaggattattgtttggatatcttgtgtgagacaagtgagcttctcctttgctaatgtcaagattcttggcatttttatcaattcttccagactgagccataagaagagcctcgatctcagctacagagtaggattcctttcttgtagtgacatatgtaacaaacacatcatattctggtggaagaccattgaaaatggcttcaatgtgatcttgaggtgtttgtttgtggccaatagtagcaagaagatcaacaatattcttgatcttgagtaggtaatcattcaatgagccaagcatctttgtgtttcgaagctgagttttgtatagactgatgttagcagcgttgagtgcagtgtagtactcatgcaaagcttcctagatctgagttgtggtgtcataaccgatcatccgattggttgttttctcagtcatagaagagagaagccaagacaccagaaggttgtcttgttgatcccaatcctcaaaagcagggttgatattgttagtacgttcatcatcacgagttaaaaacttaggaagaatttgagtaggatcaaggaattcatgaagacgactacctttaatggatgtaagaacttgatgtctccatggtaggaagttgtgttcatcaagctttatcgataacgagtgagtaaaagtaacaggataggacttaggaagattcacttgcgaattctggagctgagcagtgttcaatcctactactgcaccattggaagactatgtaaactccatggatgatcctggagctctgataccatg

SEQ ID NO: 264228 - DNA, 1461 bp, Cannabis indica
gtaaaataatttccaacaaacgttacataagctaataggtttgaattgagtgatatggattggcgtcttaactttcagaatgagggtgatcaaggttctgttgaagaaagtaggatctgtaccattattgagagcatccaagaccgattcagtgacaaggggaccaacagtgtgccagtaagtagtgtaaaacatgacatacatgccatccaaattgggacttttatcactactcatggtcttaagagcattagagacctctgctgcagtgtaaggagctgagattatttgttgagaatcaacatccatagtggttggaattgtttccaaatatagcatcaattcaaggttaatcaacaccttggctattgaaaatatcatgaaaataggtagtgataatattcaacagggccgaagtgcctgtttggatgtttccattagagtcagttagcttcttaattttattattgttgtgtttagcactcgcattctggtggaaaaatttagtatttgaatcacccaattacagccataaaactcttgaacgttgatgccaatagtctggtgccaataaatcatcacaaatagattctaagttttgaagagcatcaaaatggtcttggtcagtctttggtgaattcttgagggctgcaacatgttcatgagtttctttaattttcttttttagatgtccgaattttaattgatgccattattggagaacggtagcacaattagacatgttactagtcacttgggcaatgctattagtagtatcttgaaaccaattgttgatgataatttcaacacatgtttcctcctccaaccatattttttcaaagctaaattgtgatttgaagacacgttcagcaggctgatctccaagagcagtaacagagacattaatagctctatggtgtgacttatagaaatcgagatggtgaactgatagtgtgatgaaggtagaatcccatcaatcattgataagaccataatcaagcatttccttaatattccctaatccttggcatttattactccaagtagcacgctcaccttcaaaagacagttggttaagatgacaaccagccatagtagatctaaaagcttcaatctgaactacacttcgtgttgggccaccaatcttatcttcattcaaaattatttcattgaaatcaactagaacaagctaaggtgacaaaggagccacatcaaaacatccactcaaaaccgtccaagtgtgagatctttgattaacacaaggatgaccatagaatccaataaagtgtaaagaaggaccatcttgactctcaatgaaacaatcgatgtggttggtagaataattatttagtgaaattgtgatatgagaattccaaaggaatgaggccaccgccttggcattgtcttggaacttctaatccatgaggaaagcgtaacctttgacgaaacttatctataaca

SEQ ID NO: 264229 - DNA, 767 bp, Cannabis indica
ctattaattatccattgttattagctgacattgtactttactttggagaaaaatataatataaaaatgtgaaaattgttttacaaaaataaaaatccacgaaatgcaaagcaaataaataaaagttgagacaaacaaaaataaaaattagaaacatagtgttattcagacattacagttttattacaaacaaaagtaaaattaaagctacaaagaggaatcactatcatttccatcattcaccaagttctggttttcatcctcaataagtacgttcaactagtaaatcatcaatttcttcagtaacataatctttatcaagttcattatttttccactcaacatccattgattggatgttaggttcaacaattacagcttgttcattggattgtaaaatcaactccccgagatcaaccatcaatacaaaatttactgagttcgaataatgtacgacatcaacatttttctcgtcttcattgttgtcaatgtcccaaatttgacgatagttaacatcttcaacaacattccaatcacgacctctaagtggatcttgaagatagaaaacttgtttatcttgattagcaagtatgtacggctcatcttgataccaaatttggtatatttacactggttatattattttcagtgattattttcttttatattggattagtgctataccacttatattcaaacaatgtcactgtatatgcaccagtataagatatggttattacatctacaaatgtgtcgtaataattaaac

SEQ ID NO: 264230 - DNA, 722 bp, Cannabis indica
gtattattcttgtttagtaggtatttactctatcagaataaaaggcttagaaattttatctttctctcattcacttttattttctctcttcatcttattctttttctttcttatttatattatgcataataatttataacattatcaacacgagtctcttagacaaaataaatattctttaaagttcttgaattgtttcgaggtcacgatgcactgtatatatgtatctgtcagaaataatttcaagaaccattttacttttatcttctttgtatatatgtgtatatttatttttattctacatatctattcttaaattcgtattatgtgttcttactatttataatagattttatacaattcgtacaaatgatctatccattgcaagaaaaaaagcagtgacatgttaacttggaatcaagaacattcttaatagaagtacgatctctgtaccacatgcattaagtaccactactgtactagtgttggttgggctgaactgtacaccgactactactgagtgttgtaccacatacactacatacttaaccgtactagtgttggtaacacaggattgtaccctttgaacatcatatgatgtaccaatgcacttagtaccattaccgtactagtgttggtagcatatgaatcacaatatcagcatgcatagagtatgcatacacatattcacatatatatatatatatatatattctatgcta

SEQ ID NO: 264231 - DNA, 1067 bp, Cannabis indica
gaaattggcttgactgcatcaattaaatacaggaagggaattataaatattattttcaaaactaaaaaatattagcgcaaatataaaatcaaataccatattatgtactactatatatattaatatgatactgttatattatttgatataatataatatagattaaaatatttaaatgtgacaaattatatattaataggagattaatgtatattatgtgttggaggttatattatatcatatatagtataataatacacataaaattgtaacatatgaggagttacaaatctgaaaatagattgtaacataaggatcaaaattgataaatatgcaattatgtgagttatggaattaatgggataagtttctagctgttagaaactgtgacaatactcaattatatcatttaaatgggtaatgggacgttgagaaatgatttaactcggagaggagttacattttgagtactaaggaaacagttgtttaatagttgtttgtatgttattttatggttgttttcgaacatctggaaccagattatgaaaacgttcataaacgtatataaattaattgagcttgtttctagctctcctgtccaacgtttttatcccattaaacacaaattaatgtgttggtaacagccatgtgatgaaagaatttgattttcaaatattatcttcaaaacactataaatagaggtcttgagtttactttggggaaaaagaagtttctatcaagagagcacattgctagaaacactataggcttgataaatccagaaagctatttccattctttcttttccctaagtgcttgtggtagggggaaataagcttttggataaaggtgtaagaccttgttcaagtttggtgattccactattatacacttatggtgtatgtggtgttgagattgctctcacatctcttttatatatatactatttatatattatgtttcatgtgtagcttattgctttaagttgtaatccatctctattctctattttatgtgtatattttgtttaagtgttgtaacattatttatacatgttttgtcctttg

SEQ ID NO: 264232 - DNA, 626 bp, Cannabis indica
cctcttccataatgtacccatttaagaatgcgctttttacatccatttggtacaagataaaattcttgtggcatgaaaaatctaacaatgttctaatggactcaagtcttgctactgaggcaaaggaatcctcataatcaattctttcttcttgactgtaaccttgggccactaatctagccttgttacgcacaatgaccccatgctcatctaccttatttctatagacctattttgttccgatcatcgattgatgtgacggtcttggaactagctcccaaacattatttcttataaattgatttatttcttcttgcatagctagaagccaaaattcatcaacttcggcctctttaaattctttggttcaatttgagaaataaaagcgatgaaactgcacaaatttctaaaggagtttctagtagtgacaccttaagaaggatcaccaagaatttgttctataggatgagcacttttgaatttccactcatgtagaaggttagaattaataccttggctttcatttaccattttcacaagtggttcctctttcggagtttgtgaaggagcattggaagtctctccaatttcaaatttttgaacctcatctcccaaacctacaacat

SEQ ID NO: 264233 - DNA, 1835 bp, Cannabis indica
ccgagaatagagtggcaaccacatgcgtcggttatgtacccgcatgccaccacgccagtcaacacgaaacagatgtgaaaatcttcgtaatggtaattagagatggcgtgttgttcgatgtaccaagtgatggctggccttaaggctagcaagcagaaaatcacgaaagccgaacctaatattactgtgtagacgtgcatgtccttgatggtggccaccaataggacgagcaatacccaagcaatcccgtctgttaccacggttgctgaaagtgcggtgcgccctatctccgtgtggaggagcttgaggtcttcgagaatcatggccaattccgagaaattcgtggtgcaaagagcaaggccccagaatatggggccatacgtggctgcctccgtcctcacccctatgttgtcgcctacaaacatgcaatgtaaggcgtagccaacagggaaggggaggaggaagcctgccattgaaattgttaaggcctctttggatgtttgggaaattggttttatctcaacctctaatcccaccaagaacatgtagaaaagtaagcctaaattcgcaacagtctctagagtcataattgttctttggggaaatatgtaatcaaaaccgacgatgttcgagctatcccgctcgcacctaatagtataccaccctgcattattcacatacaaataattagtagttaatattatgaatgaattgatcatgacaatgatgagttcgtgtgcgcacacacaagaatctcggctgcgattcgtggtagacgaagggtcctaaagaggaagatgatgagatgattgacgaacatgatgaaaaccaattggaaaatgaaagccaccaccgataaatggctatcgcttaaaacttgccaaagccctattctttcagaaatagattccctataacacatgacaatattattaaagtctttgctctttaaacaccaatctcttccaggttctagattcgtattattacataacacaattgagtcattcaacgtagccatgttgctggccccgccttctcggagagtgtgtagtgacctaccacaccaccgaccagactcgaccgactcttttcccagaaagaatatttgggaaaagagaaggttgagaagagttaggagaaggcggtggtacgtaagtacttacgtactttttcatgcaattttagcataataggtgtaaatatatatgttgttaaatataagggagttaaaaataggaagttttggttttaaattagttagttgaaaggtatgtgaatgtggttgaattgaattttgaggttgatcgatcaatttgggtggttatattgagatattgtcactgttaatattttgactcttgttaatattgttgatttatttcttaagttttatcctaattattcttcacttttttgtttgtacttatcagtttcaaacaatatctagatagatatagtacatctcacgtcagcagtattattttatttgtgctattatttttcaattaattataatgttgcatcattttcttagtctaaaaaatctaatttttttagtcattttcttagtattattattgtaacattaccaggtggcactctataaaatgtgtgtttgtaggggtgtttacaaaatatccgatccaatccaatccgcacgatccaattcaattcaatccgcaaaatgcggatatctgcacttgtgcggattggattggattgaaaaatccaaaattcgcacttgtgcggattggatgttgtttgacctcaaaaagtaaccgatccaatccaattctcacttaattatacatatttttaaaaaaattataata

SEQ ID NO: 264234 - DNA, 686 bp, Cannabis indica
ataagtttaggtaaataatttagagaaacacacaaaatttatagtacttcactccccatgtcgcgatggtaatagagttacgtctacttcgagtttttatttctcacgagaattacaagaaaattagctaagtgtgaaagctttaatttttagagagagatgttctgaccttatgggtacttttctgaatgtaaaaaatgagctggatgagctcttcttttatagggaaggaggtcctattaatataataataaaatattccaaaaaatatggaaaaataaatttatgatatttttgaccgttgataatgatctaatagaaactgacttcggggttggtcgttaatttttggaacttgagtctggatttttcttttaaaacataaaaatgaggcttttacaaaatttacacagtggaaaacacttgttgaaaacttaacaaatgaaaaacttaaaactctaaggactgacaatggattggaattttgtaatgaagagtttaacaattattgtaaagaaaatggcatacagagacacaagtcagttagaataacaccccaacagaatggagttgcaaagagaatgaacagaaccattctcaacaaagtgagatgcttgctgttacaatctggattatatatcacaaggattctggggagaagcagctttaacagctgtatacttaat

SEQ ID NO: 264235 - DNA, 1833 bp, Cannabis indica
agaagggatggacttatctcaaaccccgatgaagtcaacttacctggaccagatgaatctatcacttctgcctttgctactttcaaagataatgggatgaccctaaacgaaatggtagctcttctcggtgcacacacagttggatttgctcattgcaatttcttttcagaccgactctcaaattttcaaggcacgggtaaacccgatccgactatggatcctaagttggttaccaagcttaaagcattatgcgctgttgggagtgctccaaaagtatttttggatcaaaatactagtaatgttttcgataatgagttctaccgccaaatacgtttgaaaagaggagttctaaagattgatcaagagcttgcaacagatcctgcctcttctcgttatgtttccactttagcttcgaatccagccttgttctctaaagatttcggcaatgccatgactaagatgggaagaatcgctactgtgggaaaagagggtgagattaggaagaattgtgcagtttttaaccctcgtccaaagagtttaatcagtagtgttgtagacattgttgaggaaattattgagtaggtttccaaaaattatacctcatcaattcgaaagagaagatgaatctcttcatgcctcaagtgaactccctaaagagagattcctctaaaaattgaagtatggtttagtagttgatttacttcatatgaattagttattgttgtcttaatggctttaatattttatgaactaaaataatctccaatataaagctatgcgtagaagtgtttttcaacatacatgaaactatctctctattcatttcttgcaataattgctatcaaatcacaggaataatgttgttaaattgtaatcaaacaacctaaacaatcccctaattagttatactacaaaaattaaaaaggtgcgtggtgtgaaatttttacacaatgggatttgattcaagtacagctccttcagtaattttccaacctgaactggaacaagacattttgtatctcgtcgtgtaagttctgctgttcgagtcattgtgctcggggtggagaacatcagttaactgtgcggattcttcgatggttgcttccaccacagcccgctgtccatcgagtgacactgttacgctatcaacactcaggtttgtcaaagagtaatcatagaaccaaccgagttgggcaatctcagccgcacgatctgtccatatcttcaacatcccaccatccaaaatctaacacataacgttttttaaatgtcagaaacaaatattgcttttccccgcctaagaaagagaaaaaggaatttatatacctctgccaatttctctatacaatgatcaggcccaaaagcttgagatttaatactctgccattttcggactaaaccttcagcagttctcgcatccattttgggtaattcatcaacagtttctttatctcccgatattcctgtacagttaatttgcaattagataatattatgtcataagcagagcattttcaaatggttaagcaataaactacagtaaatcatacctaaactgatagcatcagatgctgtgaccgaaccaagttctttccgaatagtgctgctcctagaaggtatgtacctcaaaccaatcagagtcatcactccaatcaccacaccggcacacatgatcttaatgcttatatccttgatgttgtcagtaattactatcacttcaccggtttcatcagacctttcctgtccatatggttcagggacatgggcagagtcatcttcgagagggtcttcattttctgcagggagaagagagtgattcatctcaccatcacc

SEQ ID NO: 264236 - DNA, 1068 bp, Cannabis indica
cctagttgaaacactataaaaggaacatgatgctcttgttggggattattttaccaagatctagatttactaccatgtatgttatttaacatcctaaatatgaatttctaaaacaatggaatttaaacacatataaagttcaagaaaccttacattggttgcagtggaattaaatgactccttccgctcagatctctaacccttgtatccaatttgtagcagagtattaccaagatctgagcctgattctccttcagttgattggattcttcacggtcttacacactatgattgagtaccaatttgctatgcgtggacatgtactcaatcactataggattcgaatttagaagagagaacgagagagaaaaggattcgaaatagagaaaagagagaaggcctaaattttgactgaaagacttaagtggatgaactgttatcatctttcaatttgagtccatcactatctattcataggaatccttctaggtttaggtttgaattatttgacattaaaaaattgatatataaatggtaaaatcattcttaagtggtcagccataggatgttggcccaccacttgtaaatttactatttttcaactatttatcctattctttcacaaatgccatattttctaattcaaccacttaaataccaaaactatttatttaataattaaaattaattatcaaataaaattgtcatttaatatatttattaattggacttaataaagtattttaattaacaaacaaaccattaaacctcttttctttacaattaagccctagcttagtgaaaattcattaataagacatagtctaaatttagaattataattgattaattaaaatcaattaaccgagtcttacaagaagtattgtctcaactaatatgaggaccatgggcctatataaccgaacttccaataagcaaatttagaatttaccaagtaaattccctaacttattaattcatccttgcaccactatagatttgaaattgaatacactctcaatcatatagaacgctctatatgttccacgatataaatatgctatgaaa

SEQ ID NO: 264237 - DNA, 511 bp, Cannabis indica
ttaacagattgatgtcttgatatttttcttttaatttttagttgccttataataagattttctataatatgatattgaatattataattacaatacttagtttgatttttgtgtttttttgatcacctctattttactgtactggggttgttttattttattttttgttgtattttgtctttttttttattttaagtttgtcatattatctttttatagggttaaaactaaatttatatgtttttatgagctctatttgcaccctataaattgataagtacaccatattaaaaaaatacttaaataattttaaaaattactcttaatatatttttaaaatcttttcatcgcattattttatgttaatttcaatacttatttttttttttgaaatcatgtatttatattttttttctaagaaaattttatataatttttttgtcataatatttgaaatataatttatttttattttaatatgtatatttttttaagaatatgaattaaaaaa

SEQ ID NO: 264238 - DNA, 510 bp, Cannabis indica
tttattagatttaaaatttagcccacatacaattttagatttaataaaattttcatcttcatcatgtttctacattggtaaaacatgaattcattaaagcctcaatttcttttaacatctaaatttgtaatcctattcttgcagctatttcatccacctctaaatacgctgaaatcactagtgaaatccttgagcttaggagtgacaacttcaaaatctggaaggaacgagttcttctccacctagcttgcactgacatggactatgcaataaggaaagacgaaccagctgctatcactgatactagcactgctgctgagattgcactgcgtgaaaagtgggagcaatccaatcgtcttcgcatcatgttcattatgtccaaaattcctttgggaatgcgtggatcggtggagccaccagagaaggtgaaagattttatcaaagtgatggatgagcaatttgacacttcagataaatttttgttcatcaacctcatccaagagttctcgt

SEQ ID NO: 264239 - DNA, 753 bp, Cannabis indica
aaaaaccaggtttttcagctcgttttgtgtcagtttcaggtttctaattagttgatttccctgctagtttgggatattattattttaagttgcagtagatagggttttggttttaaaccttagtcccggttgtgatttagcgagtcacttatgcgtgttgttatcgatgtgatttaggagcctataattcgccgagcagttgttccactcaggttgaccggcacacctgaattcggaattaaggtaagattagtataatatcatgcatatgttattacatgtttagcgtacatgtgttattgcctgttagattacattgatagcaataatagtatacgtagagttgtactgattattgataaatgtatgttggctgaaatactgatcgatgctgtcacatcaatatggctagagtatgactagcatattgagtataggctgacattatggtcgatagtattgtcgtatgaacgttctagactcagtaccgtgtgggacacggggattaggttatgatcaggtgtatgggcgccaggttataacctaggttatttgtatgtttatgttatacttttcttactgagtctgtcgactcacagtgttatttccatgtgtaggtaagggcaaggctaaagctgaggaatcgtgaggacgagtagatgaaggttgtacatgtcggggctgttaggcctggagcgtacgatcctcgggacatcagggtttttgttgtttagtcgctggacgacaaacttt

SEQ ID NO: 264240 - DNA, 540 bp, Cannabis indica
ataatttttttaataatttttttctgcttttgaaattttattccatttcatttctattcttattgccactctcattactatttttatattttcattactctagccaaatgccaccttaataaaatacttaaaatttatcatatatatttattatttatttatttatttttattttgaattaaagggagagggtgccacaagggtaacatattaatcaataatatctagtagtgacttgcatatacatatatatatcttcacattattttatttttgtataatgtaaaggtgagcatacacatatacttagaaatgtttaggggggccagggcctcctctacttctaaggtgcctccgctcctgattaccggtacttggtcaggagcactcggggatttggaatctgaactattgcgggacatcaggtaagacagtgattagcacgtagagtatatgtagtggcgcttatattgagaatgatatgcatgaatgcttagttaccgggattagggttattaccctaataggaacggtctaata

SEQ ID NO: 264241 - DNA, 595 bp, Cannabis indica
ttatgtattctgttgaccccgagatggacttgttgtcttgccagacttacctgtcaatagttgttatcactactagaaaaataggttttagtaacccacgttgagtaacttttaaactgtttagtaacacttcaccgcgcgtcactaatgagaatgattgaaaaaacagtttttagtgacccttcacgcgtgtcactgaacccttttacaattactcactgtgcgtcactgtaggcgtttaaagtcaagttttatcagactgaaaaattaacagcaacatacaaaaaatgtcagtatatcttttttttttattctttattattatttttggagatatagtgacccacagaaaggaccactatattagatatttttctaaaataacataatatttaattcttttaattaaaattttatataatataaataataatttaattaattatatactgatataattaaatataacaataataatttttattaactaaatgtaaacaatactacaaaaatagtttcaactaaaataataaaactaaaaaacaaaatacaaaatattttttttactgaaaatatatatttttattaagattat

SEQ ID NO: 264242 - DNA, 790 bp, Cannabis indica
catgtcttgtgtagccttattcggccttctgggattgtttaccctggccagtgggttaacaacccaattaggcccttttcgagacttgtctttttgattgatgagattacccatgaaataatcttgtaaggtatactgatatcttctcacctagtcggcgtattgatagccaggtagaatgcttcctggaaggcaatatgtaattcatggatatcactcatgtaggatttgactggcatgctcctattactactgacaagctaacatcaacatcggtctgagcataattagcaaagaccaactaaagtgcgttttactctcttttttgaatcttctttctgcaactgggaacagtctttctaatagtgtcccgacatactacactgaaagaaattcctacctttacactcacctagatgatgcttcctgaaactgagtatattgatcaagtgtttctaccttcagagataccttgatgaccatcctgactttggttccctccaaacctcttattctaactcgaaacactggatttcaatggagcttttctattatgattaaatgatgtgttaccactacccttactaaaccaaaagtaggaggagtagtaactcgatttttacgttagattgaataaaatgtagcgtaaacttaccaaatcgactgatgtacactcttggtgggtataacttcggccaccaattttagttgagaaaacattgaatctcaacgttaattaaggtataaatatattttttattcatttttaaaatgtacattgctttatttt

SEQ ID NO: 264243 - DNA, 1521 bp, Cannabis indica
aaatattattattaataatttatttttcagaaatttagtggcatgcgtaataattaattattaagaaataataactttgtggggtgtgatgcttctctccatttgcttcaaatcaaaccttatcaccaatttattgaacttaatttagcaaagcagatgaaatgaaaagtgcaaaaatgttcttataaattatatggcatagtcaaaaggaattatattattttatataattctttggtttattttccataataatagtgtgaagacatatcttaagagtgagaatacataatagagcaaagtgaaagagagaagagataaagaatgagcttaatttatattgaatctggaattgtgtagtaacaaaatatagagccaaacaagcaactgaaagtaataacagcttataataactggtttatcaaacaccaaactaaggttttcaatctaatgattctatagctaacaggtaccactttcttattgatttcattgatatgtaattatttcgtttgttttccgtaagagctaaaaggtagtagtgctgtttaacactctcctacatgtcaatatcactattggtttaattgtcggatctcatataatttaatgtattaacttttaaagaacatcgctagctaatcgcaagacaacacgtctagaaggtactaggcactacagtgcccaataagaatgctcgagctacaagaggagggcaatcaatctatatatactatacatatatatattaattgagtttcttgatgattcatctgttaataccaccacacatgagaaacataattgttttattattgcaagaataacatccagaacactttttactcccactcactcactcacttttatattttaccaatattaacttttacacaacacttccacttctttgaaacactctgtttacactggactctttctttgggacatactgatacaccttgagaggccaagctccctatttatactactcaaagttgatttacaaccaactacaatatcctaaaaaatctagttaattattttgctaaaacatttttgaagcttagataaacttttatgttaaaagtaatgctagccatatatacacaaccaatcagctttattgaaaatgtatctcattatttaaaaattctatgttacataaatatttacaatttgtgtgcacataatattattctttttttttttttaatttactaatactataattagcttggcccaaaatactagattgccatcatcaaataacatattagaattagttttgttaatatggtatgttagaatgaaacgagtttagatacattaattaatgaggagattctttaaaatttaaggaactgttttacttcataacttaaaaattattttcagttttaaaaatagaaaatagattttaaaaactaataagggttgttttggccaaatttttaaatactaaatttaaaagggaaaaaacaaaaaataacaaaaaggaaaaaaattaacaaaatactt

SEQ ID NO: 264244 - DNA, 764 bp, Cannabis indica
aatgatgacttgcaagtgtccatctattggcggaggcatcagatcctggttattctgaccttggttggccttgacgtacttctgtaagtgcgggttatttttcttgatcagaagttctatttcccgcttcaagttgtagcattcgttggtatcgtggccgtagtctccatggaaccgacaaaactttgtcatgtcccttttgctggtatttttcttcatgggctcgggcttcttgtacggaattaccgactaagtcgctatatacacactttctatatcttcagttaagatagtaaatgcagtgtgtttggcgccatcacggggagtctgtccaggtttttcggtgaactttcccttcttcccgtttccttgcttgtggttgttgcctaaacgcttgccacttgaattgctggaatattggggaagttgggcggactttccaatagaaggaaccttcgtttggttcagtttttgctcaccttctgctcgctgaatggcttcttcgagcttgatgaaaccttcgacccggtcaaggaaatcactcattgagtcgatcggtccgtttttccttatatgtttccacagttcgccatggatttcaatgccccgagtatcgcggacaactttccatcttcggttacccgtgataccttggtctcttccgtcacgaatctactaatgtatacctggaatggctggcctggtcgctgttttacttcgaccaaatctcctagatgcaatgggagttggcgtgaggaagagaa

SEQ ID NO: 264245 - DNA, 577 bp, Cannabis indica
atttttaacaagtcgtatattttaggggacaaaattaggtagtgccaaatagggctatgtatgggttgagttggccgggttaaggctattatagtgggccaacccaatgagatcgacctgttatatttttacccattcattttaagttttatgtataatccaacccaatccaacccaagtcatcattggttgggttgggttacaacccttactaattttcacaattataaaaattagaaaatttaaatctccatatgaacacaagttcataattaaattaaaaaaaaaaataagaaagttcaaacataaggcaaagtcattcaagacttatttcagtcatccgaaattcaagtcttaaaactataaaatttaccctaataaattacctactaaatcaactagatagtgtcatagtgactacaaactttaataaattaacatctaatcgtcatcaataaagaatatcatgtcttctcttttggtaattccttgtcctcacttcattgcctcaattcaaaacagaagattattcaaatttatagacaatctatataaaactactatatatcatctataa

SEQ ID NO: 264246 - DNA, 728 bp, Cannabis indica
ataattaacattgaaacagaaaatagcatagaaaaattaaagagaagagaaagaactagttgaagcaattgatccgggtcgccacaagccgctcttctagcctcctcctttgtttctagggttccaattctgaataatccctaattttcacgaactctcactatttaaaccaagtctcaacttaaaaattcgtgaaattacgaaactgcccaaaaatcccgtcactggggtccccgtcgcgactggcaaagcccccgtcgcgacggggttaagcagcgaattcttgaaaatttctctgccagttcccgtcgcgactggcatgttccccgtcgcgactggaacaggcagcgacacaatttttggtttttcttctcgattctttcaccacttgtcctcaattcttgtaaatactttctttaaacacccggggacctgaaacaaaagaatcaagcgtaaaatagccctaaaactagaaacaaagagtgaaaactaaccgaaaatatgacccgaaacttagactaattttagcctaacatatattcctccgcctcaagtgggatccctgagttaaagctgggagccagagtatcgaccctcttgtgcttcttggtagactcaacctccaccatctttcccttgcgcttccgatctagaggggccagaatctcgccctcttcttccccttcagcctccccgtcctcatcgatcaagatgatttggcctaaggg

SEQ ID NO: 264247 - DNA, 677 bp, Cannabis indica
ggtggctgagtcgaggcaaatgtatgctaaccaccggcaagaaggcttctcactctcccagatttagagtgttttagggtagagtgtttagcccttttgtcctctcttccaggatggggagcaatgttggagcacttcaacgaagtgttcgactgcgggaacacaagtccttctgctgaatcctctttgtcagacagaagcctaggttccctgttggtagggtcaatgtttgatggagctaatgctttcaccgctccactgccccccctccaggggtcgtttgagtcttggaaggctctctaattctaagtgagggtgtcagagggtccgaaacttgtttggacttttgggctcgggtgttcttctgtttccccttgttgttagccgcaacatttactcttttgatggtgttcataaggtcactgagcattttggactcaagtgcatttggaagaattaaaagcaccacaaacaagaaaattagttaaaaggaaaaaaataacaactcaaatcacataaattcaaagataaaaaggcatcatgtgagtgcaactgcaaagcgtgcaactatatgggtcccctcttgcaaacatgtttacgttttcccagttgatgaagttatcatgttccctgaagcccaagaagaacatagtaaggaaagagcccactttaacagt

SEQ ID NO: 264248 - DNA, 3930 bp, Cannabis indica
ttagtataattggttcttttattgttcatgtagaaacatcaatgcaaatattttaattttgattcagtgttcttgttattctgcgtatttcatttatttttctttaaattttgtgttttcgaaatttaattattttcttgttggttaattgtgattgaaatacaattttggtacattatgtttttaataatatttatatcgtattttgtaatttgatatcatatgtattttatgcacataaatttaatcgataaaatttatcaatataattaaatttgatcaaagttgggtatagaatggattcaacaaaggctcctcacaaaaatggattagtattattcaccttagcccattttttgatagaagtttatcattaagttcgattaatctaattaacatggttcgattcaaagttcaagcactcgaaacctgcaagctcgttgctaggtactcgagtgtgttgtcagtgacaacacataaggtactcgagtgtcatacatgctcacgctcgctgcgatgacagcatgtatgcatacctcataacaccatgaactaaaataaatctcatcagaaacaacaaaaggccatcagaaacaatccaattattgttgttaaaactagttttgagtctttgacattatgcaaaggaagataatctaaacaatctattgaagagacacacaatcttcatcccgatgacctgcaaatcgaatcgttctttagccaggtggccagttcatttgtcgtcccccgagcaggtggacatgaatatgataaacagattgacctgcaaagcaaaagattaattgttgtgttagtttcggatctacatattaagacgtaatagaattatcgtaaaaaattagaactctaagaatacagacatccttgtggcccgtcgttgatcacaattctgtagccatcatcgagtccctcttgcttggcgactagcttagctgtgtaaagaagtcggccaagaatgtcacagtgtctctcttcagcctggtaagcaaagtacagagaaagaagatgatacttattgatctaatccaatacttgaaagaatgagaaagttttaaacttttcgagacagtttggtatctcacaaaattcagcataagaatttataggctaggcgaacaaagacactcctaactagccaaccaatagcgatctaagtattagccacacttaatcaatcatctcggcctctaagaatatgataactcagcctccaaaatcctatattgagactaatatcaacacactgaaaaaaaatccataactaaacagagatgataaagatcaacacttgttatagaaagtgaagtatatttacttatacactcgaacaaatttcatccatagaacattgtgaatttctgaccataaagtgagcttatctttgaaaatggcttgagcttaggctaaccaccattcacaagaaaccacaaacttggtctttcacggtagcaagcacatgaacatcctaactttttctactctatttccatttcgggtttaaccttattttgcaccattaaaagttctacattaaaatgcatatagactttctttttcccttttcctttcactacatttttttgaacataaaccaccagaaactctccgaatgctttgagttcttatttcgaagcataaactcattgaacatatcatcatacttattacttttcccaaaaatacttaacctatcttcccaacttaacattatttaagttatgataagaaccaagtttttcaagctcaagttttttaaaaccaataaaacagtagccaaactatgggagcccgtaggcccctgtgatgcaaagagagaatactcaattcattgcataccctcttaactctcaaaactaaccccaatacaatgagtcacacacccttttatttactaaattctaacacaccatactaatcctagggcctaacaaggtagcaactagaaatcatatatgaacaaagttttagtttctttttcagttgacaacatggagaaatctaaagaattagttaacaagaaagaatccttccttggcaaactcgataatcaaacgatataatttcctgttgtatcaacaagctacagcatttagagccaaaatttatattagatttcataaaagaaaaaaagatgggaaattctttttacaaagaaaaaagaaactacgcatgtgaaaggcgagttacaatgaaaataaaaagaactatgaaatacctgggaaagaccagttaaaccatccttaactttgggaatgatcaaaatgtgtgtgggagcctgaggagatatatccctaaaagcaagaacctgtttcaaatacaacagaacttagatgattatctgctaaagcatcatcatatcaagtaactgataagttcacttaaacacaaataatattggggtataatgagtatttagttaggacatatgtgttgaattcaataggaaatatctcaatattatgtgtaccactgaggcactgatccctccaaagccatcagatttccattaaacagatccactcaataattaagagaaattctcagaaaatcacacagaaattctcaataattatgattgacatgaattgagatatctaaaatctgattatgatacagctaaaagcttgaaaacactttacttttatagctttggacaaatcagtcaaaaatacttctttaacatgatcaaaggacaaaaatccctattcctattttgagtgtaatcttcaattttcgtcctattttacaaattcagtccaaaaatattcaaatatcatacagcaaaaatcaaacacaatacacaaaaccacacacaaatacataatacccatttctcaattttcccttaatgaaacatatttgaatgccattagcataaataaacagcaaagattagttttttatatttttcatacaaaaaatccccaaaaacaattatacaaaatggaatggaatgagagtaccttatcatcctcaaaaaccacagtagaggggatttccttgctgataattttatcaaatctgcacatttcaaatcagaaaaatcaatattttttcttttaaatgatttcatacatgaaaggaaagatgaaagtaagaaagagagatacatacatggtgggagaatcagaaggaagagcagccaaggcagcttctttctcagaagccatggaagtagagagtagggatggtttaggaggaaaaagggtggttgagaaatgtgagtttagtactgcaaaacggctcctatttatcatcaaattcgattctgacacagttttgttgtttatctttctcatttcaccatttctttttggaaccaaactttttgattcttcctatataaggccagtgaaatactaacacatcacataacataaaacttttttatttatttttttttttttgaaaaatgacacaaaatgttacaacaacttttaagccaatatatatacattttttttttttgagggagccaatatatatacatatagagatccattatagtgatttgaataagagcattgctaggtcggacctgaagtataatggatcctaagaaaaaaaaaaggctcttatttaaaaaatatggatatttttcaaaattagttaaaaaatgtataattttaaaagagattaaattttttttggggcctttcggttaggagtcgcaattcgtattcgcgggttgtgttcctgtcgtgtcaagacctataataggtatatgctcaagccttgacccaaacacaacccgtttaataatcgtgatagaaaataaaatccgaacacgacccgtttacaggaccgaccgtaggcataggcgggctaggcctgtgcctagggcccactcattttggaagcccaaataaaaaaaataccttttaaaaatacatatttttttaataa

SEQ ID NO: 264249 - DNA, 1270 bp, Cannabis indica
aacaagaaaaacccatcacaaaactcacaacaatggataataaaactaagaagctatcatcattaccctctctgaaaccgctcttgaatctgcgaggaacgttacgaaggtacctcatccttccagtgccggtggtcttcctacggatcgccttgacactccagttgtctagaattaaatgaaacaaaattaaactaaagccctaaacaccaatacgaaactcttccaaggaaaaaaaatggctttatgattatctaagtacaacctaaagtgattcgttatatacgattcattagcattcatacataacgattgtgaaaacaagatgtaacattaacacgatgaagaaagaaacttacaagtcctcttgcgggcagctgggtaagcacaagccgagcatcgactcttctggagatggaaactgcggcgaccacacctcacacagagagtgtgggtcttgttcctcctcttaccgaaacttccagttcccttaccctattgatctcatcgcaatacaaagtgataataataattcaatacgtaaacaagaatcaaaatcgaaatcaaccaaaattgcatgatatcagaacagtagagatagcaaatgagaagagagaaatgtaccattgtagcagagagaaatgaagaaaccctaggcggtgaagaggacgagtttggctaaatagaaggaagcggcgctgagaggagtttataagagccaagtgcgagggttttagaatgtctagggttggaaacaaattggggaaccatttgggccgactttctattgggcccaatttgttgggctttattaaaatattttattattctcttttttctatatcacttttgtttaataccttaatttatttttaatatatatgtatatattttttttggaatactttacttttgcattcttaataagaaaagaaattctgtataataatcccctaatctttttatactgggaggagaatttggactttgacctacagttggacaaaaggtgtcgatgaataatttattatcattctctccattttctagttctttgcgttgttgttgagaattgttagggaaacttacaaaaatactggaataagggttaatttttacaaaaatactgccacacgaattttttttaaaaaatactgtatttttataaaacaccagtagaacactagtgaaaacttaacacagtaaaaaagtaaaaaatactatctgacaatatttttgtaaaaaaatggtaaaaattagtataccatgt

SEQ ID NO: 264250 - DNA, 2269 bp, Cannabis indica
gcatgaaaaaacttggagttccgatctcccaatttaagccatgtttctctcgatttctggcgccatatgctctctttatggatccacagttctgtaatatttctctgaattgtagcctcttcagaggagagatccgaagagattagttgattttggatccaggcaagtcgggattcagcttctttaatccttttatctcagtcgccaaaaacctccttcctccatttttgcaatgctctttgggtgtcactcagtgtcacaaatagtctcttcctaatatgaccactagtaccccaagtcttctcaattgtcatcaaacacgaaggatctctagcccaagcttcaaaaaagcggaatggtttgaaacccatgctaatcccctcattggtgtccaccaagataaatccatggtctgaaatcgtaattggagagttggtaaccgtcacatttgggtaagaagttacccaatctcctgatgccaaagctctgtctaatctctccctagtgagatccccattgaatctattattttgccaagtaaattgacaacccttggagccaagatccacaccgcccgtattcaacatgaaattctgaagagtaattgtatcttgatgacctttccttcccccctcttctcccatgggtgagcgatgaggttgagatcaccaaccaaaagccacggtaagtgacatagattgattttagctgtcaaattatcccaaaaatcttttttttttcagcctcgtaaggcctaccgtagacagcatacaacatccatttaaatctgttaatggtatcattgactacaaccgtaaacatcccattagaagattcactaacctttagatttatatcttgattccataatagagtaaagcctcccgccatcccttcagcaaggaattgtcacggagtttgggaacccaatagacttctctatggcatttccctcttcttcattcgccttagtttccatcaaaaacacgcactccggtctatgtatcttaacccaagcttagagagcttgagttgccggggttctacgaataccccggcaattcaacgatatgattttcatggcgaggtcgggggcatgataagggcgcctcctcgcccgcctgaaaattttgaatttcatgaacagccacttccaccaagttttgctctaaaacgagatttttaatttcagacttccggggtgccaccgtagtagggatggtcccggggttcctctgatctcctcgcagtcttctcttgctcttttttttttgaagtcgagtcattcttggtgccactacttccaggagtgaaagtgttaacgtctaaagtgggaaggagggtagtagaagacgaacccaatttatttcccacattaacgatattaacatctggagtaataacatggatgatagacaagcaggcttttctcttcttggacccagagaaggtttggcccatatcagagaaaatagtagtatcatgagttacaattttttgggctagaccctctttggcatccactaattcatttaccacatcttttaaagttttatccgtgggccgtgtgacataatttggttctggatgccgatggggcaccttggacttacagatttcttcatgaggcttttccacaagttggtctctagtggaccctatatcagccataaggcttgcgatgacccccttgtctctttcacgattatctatatggttcatttggtgggattttttccttagatcagagcgagggcgtggcttactagcattgcccaaagtgggggaaagccttcctacaaccataccatgtatagcatttcccatcctaacgttcgaaagaccagttgtaccctggtcagacgcctctgatgggtcgtttttgtcagaactaatgacttttttacccttgtcacctttagccgcgggagctcattcgccgaagacaccagaggcaggggaaggatcatggaacttcagtcttggaattatcgaatcaaagcaatttttaatgggcactcccactttaatccatgccccatagagagggacgacttttccaatcgggggatatgcatattctgtaggtcttttgcatttagagtatgaatgagccaaatggccacagttgaagcaaatcgacggagtttgtgatacttgaactgcacccactctttttctatcgcgagagtatattttaggtagaaaacctggggacaaagcttctagttgagaagaacgtcgacttggaactttagaaatcctctcg

SEQ ID NO: 264251 - DNA, 2634 bp, Cannabis indica
agtatcgattgtaagcgaaagatagtgatcttccaacctgagggtgcggaatcgtttatttttatgggatcaattcagggattctaaatcccagttatctcagtattgaaggccaaagatctattataagaaggttacttaaggtttctggcagtggtgttggataccgcttggcctgagtttgttcggcccaaagacattatagtggttcaagaatttttgtatgtgcttcttgaagaactttcgagattaccaccgtagtgagagatagattttgtaattgacttaacacctggaacagagctagtttctaaggcaccttatagaatggctcctgcaatacttaaggaattaatgattcaacttcagggaatgcttaatttagggtttttctcgacccagtgtgtcgccttggggagctccggtgttactcgttaagaagaaggattgatcactttgcatgtgtattgactacaaagaattaaacaagttaactatcaaaaacaagtaccctctaccaatgatcgatgatttatttgatcaagttcaggggaagacagtttctctaagattgatctccgctcgggctatcatcagttgagaatctgggaagaggacattccaaagactgtctttcgtactaggtatggtcactatgaattcttagttatgtcttcgaattaactaattctctcacagcttttatagatctgatgaataaagtattcaagaatttccttgatatatgtgttataatatttatcgatgacattcttgtgtactcttagtcagaagcggagcatgagcagcatctttagatggttttgcagtgactacgagaacacaacctctatgccaagtttaagaaatatgaattctggctgtctcaagtgtcattcttaggacacattgtcagtaaggatgggatcaaagttgatttagaaaagattgactctatcagagttcaaattcgaagagtgagaaaatttcctcgtcaattaatttattaaaaattatttactatagaaatgtttctcctacctacctttcctgattttaactattctgtttcttgtcttcaaacttggaaaattgaagtaacaaacacaactaataatatatgataattcaatctgtgtctgtaatttttgaagtaatttttaaatatttaaatttattacaattagttctaactagcgtaaattgattaagctctcgtattataattatatgtggcttatgaccacatcaataaattattttaaaaaatgatggaaaaattataattattttcaaaaaaaattatcaaaaaaataattcatgaggtaaaattctacaaagtgtagagataaagatcttattattaaaaaaaagaatgggcatcaatagaaatagtaataaatttgcatatgattgtttttgacattcttttacctattttattttatatatagtttttacatatataatgtttatatctttccctctccatcatttttacatttgaaacacataaagtaatgtaaagaaattgttgaaaatggtcaattagaagtgaataaatagaaattttacccctcaaacatgacagataaaattttgttcttcaattatatttttgtataacactccttgaactttggataaaattacaatttgctccttcaattgaattcattcattttgcattcaatttcttcatgcaaaaccacaccagagctattctttaatttgagagttcaaacaaaagaataattgcctatataacattctaacaataaaacataaaatgtttatccataattctagaattaatatttaaatgttaaagttattatgcttagttccaactcttaattccaactaattttttaaaaaaaaaaaagataaaaatttccattaatagtccattatatgataatatattactcaaaagcataattaataagataggcataacatatcgtatacaaaaatagcaataagaaagagattattaacaactaaaggtgggagagaatgagtcttctactattctctctgttcgtccccttttccttcttttcttgctttagttgacctcaggttgtccctcgttggttctcctttccttttgtcctttgtgttctttgttgtctgtttgtctctcgctgggaaaagttgtggagtgagtttgtgggatcctaagtcctcttcatgtcccttgtttttgtgatctctttttgtcaactgtggggtccttttgtctctgtgttgggtggttattccttgtgtttgttttttggtcttcagtgtttattgctttgtgggttggtaggttggtgtgtggtccctggaaggttgtttctgtcttggtttggggctatattaatgtccatggacgatgttggtgactctactagtggtattaatggtagatgcctctctttaaaggagatgtccattgctcttgccccaagtgtagtgactacaaaaatcctttccaaactttgcctttttggcaaaatagtttcatccaaaacttttactgctaaggatgtggaacatgcttgctccatcttacgaaaaactcggtttcgtgtggagccaactgatggtgttcttgctagttccaatacttttcggttcattttt

SEQ ID NO: 264252 - DNA, 1028 bp, Cannabis indica
agggatctcgagccaataccacagccaagtaatattgaagaaaaaccgacctggaagctacatgtggatgggtcggtaacagatcaactatctggtgcaggaattgcccttgtcacacctgggggcaacacctgcacgcagcggtcaaatttagattcaaagcctctaacaacgaagcccaatacgaagccgtaattactggacttaagctagcgaaggaaatgaaggccgaacacatcgagatctacagttattcacagctagtggtaaatcatgtatctggcgaatacgaggctcggggagcaaaaatgatagcatatctaagcaaaatacatgatctgctcgcacaattcaaaagctacagtctcagacaaattccaagagaagaaaatacaacggcagatgcgttagcccgattggcgagcagcaacataagtgacaaggcaaacctggtccctatccagttccttgaagagcctagcatcactggcacggaagaaatcgaaatgatcgacacatctccaaactggatgacgccaatagcagcctatctcaactctggggaactcccagataaccgaaatgaagctcgaaaaatgagaagaaaggcagcacggtacatcatagtagaagggatcatgtacagaagaggattctcgataccattactcagatgtgtcacaccagatgaagctgcacggcttctatttgaagttcatgacagattctgtggaaatcatgcagccggacagagcttatcaaagaaaattctaaggcaaggctacttttggccaacgatgattgaagattcgagagcctatgtcaagaagtgcgacaaatgccagagattttcaaagataccaagagctccgcccaacgagctgacacagatgcaaagtccgtggccctttgccatctggggaattaacctaattggacagttacctaaaggtaaaggcggagtgcaatacgcagtggtagcagtcgactactttactaattggattgaagccgaaccactcgcaact

SEQ ID NO: 264253 - DNA, 1274 bp, Cannabis indica
tctccagtggtgttcggccggtttttgtggttcaccgtgcgtggtggatcggcgtgcgtggtgatcggcgtgcgtggtgaacgccgtgcgtgggtggttcgaggaggaaggatatgcgttgatgacggtgggtgtggggtttcgggttgggtcggaggggttggggtcggactggggttgctccgatgggggttttgggtgatggtgggatgtgggtgtggtgctttcgtggtcggcagagaggaagagagaggcttgagtttagggatttcaaatgtgaggggtatttttgagaaattaacaatgtggtcatatatgaccaattttaataactatgcatttagagaaataattttagggtattataagtatgaaaattcaaatttctctaatgttattatgttaccatttccttgctcgaatggctaaagtattgctctgctccaatatattagtcttttttgttaatgtggttgagcaactcagcaactctagtcgactaagcatttttacaattatcattactaattttaaaggaaaaaaacaaaaggcataaaagtgggttggtgacctagtagatgacttcatatttatatcaaaaagtacttcatatctatctaatgatgaaaaattgaatatttagtctataaatgggtctgaattctgatcaatcaaatattttgcacttatcttcaggctgaatttagtgaacccatattagatttaattatatcattcccactatagaatattttgcaaacaaataagaaaatatgttaaagctaatgacctgagaaagtggaacatattattaattagagtcactactataagtagacctagttttcgactacattcatgttttgatgatgagacaactaaacaaacagatcaaatctatatacatactaatcttcaatgatagttgtttctcttcaagtaaatatgagaaattagaggttgtcctgtaatctttaactaaaaaataattttttgtttccatgtgtagttagatatgttgtgcaaaattctggttttttaactcatgtacaagaaacatttaaatatattttattaataatcttcatgtacaagaaacatttaataaatttttgtaaaactttatcaaattttataaactaagaattatagagatttctgtgaaagaaatctctccaaaaataagcgtatgctactaaatatggagaacacacggtattctttagtaaaaggcgaaagaatagttcgctttgtgttcaccacgtagctccgtg

SEQ ID NO: 264254 - DNA, 674 bp, Cannabis indica
gcatgatagttttacaatgcataatgcgtgaattcttgatggaaaagattcaattttttccttcgcttagattcttgactctttgagtcatcaagaacacgaagaacatgtttgagttttacaaaacacacattttgattcgaaactaaccttggcggccctaggggttttgtttgggacttggccaactctagggtttttccatgggacttgatcggttagggtttcaactagaaattaggcagttcatgcctgtgttggtgaccctaactagttcttagatgggtcatgggaccctggccaaccctctcaaagcttgagaaccctggtcggtctaggccttggttccaagtgggtggccatttttttgttcacttttgacctcgaaaagaatcctatcatggccttgtaggcatatacaacattagtctcatatgtggttcccttagaaactctatatgaaacttattggtgagtctattatagttgaatgctcaacttaagactcaactataaagaccgcttagcctaaatttggaaattagcagataattagggtttaattatgaaaattagctattaattctaaattattaatttaggatgatttatttgaattcagaatgcattttatatgtcatatatagaaatttcataattttgtatgttcagtg

SEQ ID NO: 264255 - DNA, 502 bp, Cannabis indica
atgagactcctgcaagatcctaataggccgacaccaaatacacagccacaaccacaaccacaaccacaagaagagcctcagtcaccagaaaatgaaatcattctcccaaatgattatagactagatgatgatgatttgttctgtacacctgacaacacgaagatcaccagcatcggggatactcaggattctgagatacaggtgttagagagacagctccagaactagtggagaaccggaggaagagaaaacaacctatgtggtttgatgagtacactaaaatgaagaagaagtccatggcatcgaaaacactaatgaatgtggacccacttagagtcgttgatcgaaagctgctgtcgacttttcacagttaggttctcgaccagattgggaacaagtacctgagagagtgtttctccgatagacacaatttagcttggttcctccaactacatactccgaagacatggcttggagacgatgtaagtgtttaagacttttt

SEQ ID NO: 264256 - DNA, 977 bp, Cannabis indica
cttgccttagtattttgaaaaaacgatccaaagtatcgaaactagttatgcccgaatcgttcataaaattctggcagtacttttccaaacaattgtcaacataattgtagaatttttcaccaccatcatcatcatcatcatcatcattaacattaacattaacattaacattaacatcagtgaaaaagagtgtaggagctgaataccaaatgggtttccaacgctttgaaagaatgcatgtacgaaccacatatttagttgggagaaaagacagaatgtgatggatcaatgcatcaggaagtttggaaattctgtcatcatcatcaccacccaccaccattgatgatgttgatgtcttcatggtcttagattgaggactgtaacaacaataaaagtagtaaattaactttcctccataacaattaacaatgataataataataagaagaaaagagtaaaatggtagattggttaattaatattccttacgtgaatatgcataaattttctctttcttcatccatggttgagatttaggggttgggtaagtaaatgtgtgagagtgagactgaatgacagtggaatgacgctttaagacaatgaggaaattatgtagggtttggcctggtctggtctggtctgggagagagaatgaaagagaagatgggtcattacaaaataagtttgttaaaatagtagaaacagcacattatgagcagcaaaattacaagttctcaaaatacgtgtaaaaacacaactatcgtaacaattagagagtctaaaataaaaagaagaatagttttcaatctcccaacaagacgacaaatgattgagagaattaatcacaactctagattcgttcttcacgatgatgaacttgtgtcctttgagcttagctgtatcaagggctaagcaacatactcccaatctattttagcattaaagatagttttttagaaaaattcgaataatttaca

SEQ ID NO: 264257 - DNA, 906 bp, Cannabis indica
tttatctgattatcaaaaggtatacaattgtgatgagactatgtatttatagagttagggaggagacttagctacaaaaccctagttgggctgagcatgtcagcggtgactgtggatggaatagcatttaaggttcgttggagtgcagaatcatcaagattaagattgctaaaaaagaaacttggagagaattaaataaatttttgtttatagcattggtcacataatcgatttacagaatattaatttgaattatttaaataaaaagatgtaatatcacaaaatccgaaggacactaaagaaagaaaagaattttatttttttagaaaaaaaaacaactaaattgatggctaaaaaatctacagacattctttacttgttctttccaagaaattaatcacttattagaggttcttttctggtactgatttttaacccatttgataccgaaagaggttccactcttcactttttgggcaccaaacactgctgcaaccttcgccttttcagcacccacggtggccgcaaccttagccttcccaagtccagccgaggccactgctttcacctctgtcatcttcttcccactgcctttcttcgaccctcccttctcaccattctccccttcaaaactgtaattccctccactccattgttcatcccaacttggtcctttgcttcccatggtgtttcttagctctacaaattttaaaagcagaaaatacattaccttataacaaagtttcatgtacaatgtttctaagtttcagattaattagtaaaatacatgatggtactaaaagtcaatctcataaacaattctatttattaaaaggaaacagatggtaagattgtttgttctaagatttagatttgtcagatttctgaaattcatataccaaaaaa

SEQ ID NO: 264258 - DNA, 1679 bp, Cannabis indica
gatcatacctcagacctcgcgaaatgctttaaaacattaaaaaagtataacatgaagctaaacccaaaaaaatgttcctttggagtctcctcgagaaagttttggggattcatagttaatgcgaggggtattgaggcaaatcctaaaaaaaaaaatcaaggcattaaatcaaggcattaatagacatgccttccccgacaaagcctaaggaagtacaggcctcgacaggaagaatggcggcacttaacagattcatttcgaagtcaactgataaatgtgtgccgttcttcaacatattatgaggcaacaaaaagtttgagtggacaaaagagtacgaacaggcattttaaaacataaaaaagcatcttgcaacgcctccagttttggaaaaacccataattggagagacattatttctttatttagccatctcggaggatgcgattagtgcagctatagtgcgagaagagggaaagtaccagcaacctatttactacgtgagtaaaaggttactagaggaaaaatccaagtatccccctttagaaaaactcgcgttatgcctactccatgcgtctcgcaaactatgaccatacttccagctcaccccataaaagtgttaaccgatcaacccttgagacaagttttatcaaaaccagatgcttctagaagattaataaaatggtcgattgaactaggggagtttgacataacataccattctcgaacatccatcaagggccatgctttagctgacttcttaataaaaggtataactctagaagaaatcccacctgatcagcgagatgcggaaacctggaagttatatgtggatgcatccaacgaacagggttcgggtgtaggggtgatattaatatcgccggaaggccttaagtttcacaatgctcttaggttccaatttgacgcatcaaataacgaggctgaatatgaagccttaattgccggcttaaagattgcagaggccttaagagtcaaaaatctcatttgtcatagtgattcgcagctaatcgtgaaccaggtcctccgggaataccaggccaaaggcttaaaaatggcaaagtatttagaaaaagttcaaaagaacttagaaagattcgattactttaaaatcgaacaacttccaagaaaacaaaactccaacgccgatgccttagcaaagttggcctcgcagaatgacctagatgaattaaatctggtttcggtagaaatactgagcgagccaagtatatgtgaaactgaagacgtcgagatgatggatagctctccaacatggatgacacctcgtatcaactatttactcgatgggcaacttccaaatggaaaaaacgaggcgcaaaaactattgtatacagtgactcgctacacgatgatcgaaggcaaactatatagaaaagggtattcaatgcccctcatttggtgtgttcctcccgcagaagcaaacgaattcattagagaaattcatgaaggcttctatggggatcatgcgagttggcaaagtcagtctaaaaagatcattaggcaaggatattgttggccaacgattaataaggacacacatgactttgtcaagaaatgtgataagtgttagaggtattaacatatacctcgcgtactgccaacagaacttagaatgatgaccttgccctacccatttgctatat

SEQ ID NO: 264259 - DNA, 1503 bp, Cannabis indica
agtttttatggacatccaaggaagagtgttatgaaatattatttatagatgtccaaatcaccaaattaattatcaccattaatgcttgattgtatttttcttttattatattaatttagtttcctattcttttagtcatatttttgtataattagagattcacccttttggaataaagaactaaaaaattctcattcagtttctcttttctcttcatcttctttttgttttattcttatctattttatattattctatattattttataacagtatcaagctttttgacacagtaccatcacgaaaaaaagcacaatataacaaaatgttctaaattaatctgtgattatccattcagatgaactcagaacaatcgagcccttagttatgttatgctagaatttagaatgatattgtaagattgtattattttatatctcaaaaccaattaattataaaaagagtaacttatagtatttaattttcataatgacctgtttaattaagtttttatgtttggttatagctaaaagtataaaataaatataagttttattttattttatttttactattatataaagatttttcttaatgaaaaatacttttcaaaatgtttggatattattaaaaaaatatttaaaaattatgtaaattatttgaattgttaaaatagcttctaaaagtcttttgtagagaagctacaaatcctaacattttctaaaaagatttttaaattatttttttttttaacaaaacacattttttttttttaattctaaaaaccttatataagttaagccaaacaaggccattattaatgtgggactctataatataatttttttttctttttggactaactgtgaatctgagtaatgttaaatgtttattgagtagtgctaattacaatattttattataatttctaagtcaatattcacgtccgaaatcacatgctagaatattttttcaaattttttaatagcggtatcgttatagttatagtatcatgcctataatttttttaaaaattccgaatattctacaatgccgaaaatagagttcttgatatttcaatttaccacgcgcgtttaaaaaattttatacatattttcggcactgtaaattattcaaaaattttaaaaatttaatttacagagataatattataagtttaatgaacaccgttataaaaaataaaaaaaaataattctaacatgtaatttcaagtacaaaaattaagtaacaaattatattaaaaagttgacacccgtcatatgtattttgcattaataattttttttatcaatcaatcatgaagtttattactccagataacaaattacaacctattatgactttcaaatgaaaacctcaatatcagtctatacatttcctttgtaaactttttaaacacctatattagttacaaaattatttatataatcccaaaaaccaatctccatccgccggctgtactttctttggccaagtgcaaga

SEQ ID NO: 264260 - DNA, 783 bp, Cannabis indica
tggtgttcgcatcatctataagtcacacatcacacattgtgattaattaatgttaacaattttttataaaatttattatattaaattatataagatctaatacacacaataataatataacatattaatatcttttaatatttctcataaataaatatatatctcccattctcttggtaatttattataatgatattagtggaagcattataagttttagggaaattttaccatgcaccccttaaaatgaatatattgatgcactcttatctgttttagcatctaaaataattttttagtcaatttttttttcatgcatgtgcattatagttatttaagacatcctgcaaaattttaagaaatttggaaaagtttaacatgccgaaaaatatgttcaaacagtttattttatacgcgtgtaaaatagacagtttgaacattattttctatatagtaaattattctgaatttctcgaaattttgtaggttatcttaaatagctattaagtacatgaatatgaaaaaaaattagactaaaaaattcttctgaatgccgaaacaagtcaagggtgcatcagtgcataccttttaagggggtacattgtagaatcaccctaaattttataacatgccctatatattaaaaatgacttctattattattattattattattaaacatagttctattcgagcaaaaatgataatcaaaatcgaaataagaaaaatatttgacacctttgacatggttttcctcctatttttcgatttccatgaataata

SEQ ID NO: 264261 - DNA, 1068 bp, Cannabis indica
aagattctaaatgatggtaagttttggtcgtaggtgtattaggtcatgcatccgaggtaatctagtagggttaactgcgagccttttgggctccaggctggcggtgagggtgcaaatcctccaccaccacaaaactgagaacgaatgtatgctacgatgcaagagaccacccggcagttgggtgatcagatgagagagctgagagagcagcaagctcgacctgctcctaatcctaatcctaatcctccgacacctttagtagtgtcaaaggatgtgggatattgtttggagccattgtatgagtggattaggaagaaaaatttgcaagtattcgaaggtggttttgatccacttaaggtataacaatggatgagtatgataatatctatttttgaatttatgcgtgttgaggataatgatcgggttggatgtgctatcttcatgctgcgagaggatgctcgcatttggtggaaaatcgtatcttagggtcatgacctaaataacatgacttgggatgcttttcagaacctattttatgaaaagtactacaatgaatccatccaagctactaaggcagaagagttcaaacggttaacccagggcagcatgatggtgacagagtacgccaccaaatttgattggttggcaaagtttgcctctgatgaagtgaccactgaggctgctagaaaggccaagtttatttgggggttggaagtgcatattgcttgtgatgtaattatacctgctaagcaaccgagagtttttcgaacttatgctcaagtggttgagctagcccttgctgctaaggatgcaaaagactagattcgaaagagaaatagtatgaaaagagatttgtgaaaacaatcacctagtgtcaattgtggtaggggtgctgaccctaatgatcgcaagaaaagacctaacgacccaccaactacgggtccctaacaagaaatttccaaggtaatcaaggtttctgacgaggtggaaacgaaaaattagagaacctatccaaagtgcccaaggtgcaagaaacgccatcatgggcaaatgtcaagctcgagcctg

SEQ ID NO: 264262 - DNA, 632 bp, Cannabis indica
atcgtccgcatggggatcacggagtgtctcagtattatgtgggccgcgagagcgtgccctgaaaactgcgttgagatgatcacgcagatcacctcggtgtacctgataacgtcctccctgttgtgtctgtacagagccggaccttgtgtacctgcttggagtgcgaccatgcgacgacgaagaggctgattctgcgtcgttgtctcttgatggtcggctgcgaggattacggcgctcaggatcttcatcgatttgtgcgctctggtttggaaaccttgcggattgatccctcgacattggatggttcaggtccagaccttcagggttagttcttcgttccctgcgtacacggttagtatgacgtctagaagttgttacctgagggttatcggtgcgaatagcaggaactcgaggagggcgtcgggctcggttttgtccatctacttcggcctgtagtgcccgcagttgatcctgaatcgcagcatattgatcagtggtgagctggatcattccctcggataccactgccggagtgacggggggaaaatgcatggttgctggtggcgtggatgtgtccccaacttgagggtcagtcgtttctgggaataggttgagaggtctgatattgcttc

SEQ ID NO: 264263 - DNA, 730 bp, Cannabis indica
cgcgatactggggggcattgaagtacttggcgaacagtggaaagatataaggaaaaacggaccggtcgactcaatgagtgatttccttgaccgggccgaaggtttcatcaagctcgaagaagccattcagcgagcagaaggtgagcaaaagccgagcaaagcgaaggctccttctactggaacatccgccctgcttccccaatattccagcaattcaagtcgcaagcgttcaggtaacaaccacaagcaaggaaatgggaagaagggaaagttcaccgaaaaacccggacagactccccgtgatcgcgccaaagacaatgcattcactattttaactgaaattatagaaagtgtgtacatagcacagtcgctgattccgtacaagtagcccgggcccatgaagaaagatgccagcaaaagagacatgacaaaattttgtgggtcccatggagactacggccacgacaccaacaaatgctacaacttgaagcgggaaatagaacttctgatcaagaaaaacaacctgcacttactgaagtacgtcatgacaacccaaggtcagaataaccaggatttgatgcctccgccaatagatggacacttgcaagtcatcattggaggcccgcacatcactggagacacaggcaaagctcgagaacgatatgcccgcacagctcaatacgagcaagaagaagtcattctagtcgtggaagaaaggaagcccaaagtt

SEQ ID NO: 264264 - DNA, 650 bp, Cannabis indica
gatcgattcacaaagtctgctcattttttgtttgttagaacaacctattcagtggaccagttggcagagttgtatgttaaagagatagtaaggcttcacggggtaccaaagtctatagtttcggatagagatccgaagttcacctccaaattttggcagagtttgcaacgagcaatgggtacaaaactaaagttcagtacaacattccatcctcagacagatggacagtctgaaaggacgattcagatattggaggacatgttacgagcctgtgttatggattttgaaggctcttggagtaaatatctaccgttgatagaattttcatacaacaacagttatcagagtacgatagggatggctccctatgagttgttatacggtaggaagtgtagatctcccatccactgggatgagacaggggagagaaaatacctaggtccagagtcagtgcagcggaccaatgaggcaattgagaaaataaaagctagaatgcttgcctcacagagtagacagaaaagttatgcagatccgaaacgcagagatgttgagttccaagtaggggaccatgtgtttttacgggtgtctccaatgaaggggatcaaacgtttcgggaaaagaggcaagttatgccctaggtttacaggacc

SEQ ID NO: 264265 - DNA, 764 bp, Cannabis indica
ttctttaaacacccggggacctgaagcaaaagaatcaagcgtaaaatagccctaaaacttgaaacaaagagtgaaaactaaccgaaaatacgacccgaaatttagactaattttagcctaacacataacctggtaatttttcatatcacagactttgtatctacacatcgccaaaagtaatcgcatcacttaatcaggtgagcccgtacttacgctcggtactcattatatatcactgacgcccctacttacgcctagtacgtctccaagaaaatcgcatcacctaattcggtgggctcatatatcacatgcataatatcatcacattatcgatactcaaccaatcaatcttttcattatataacaatattaactatatctcaatattaatcaattcataacaatactaatagtattacatacaacgtactatgaagtacaatatacttttcttacctttaatctaggttcatacatttcggccaatccaagtggagaactatccccgatgatctcggccctatgccacaacaatgataaatcaataagtgtttatcctaaaacactgcttaatattcacataagacaatctaggattttctaccaaatcccgcggtataaatacactaaaacaaatttatattttggctctaaaacatacacgttattgtagagctcatcgcaagcttcgaaatggtatatatagaatgtccaaaacgaacaaaaatatgatttctgatctcttaggaatttttaaaaaatat

SEQ ID NO: 264266 - DNA, 685 bp, Cannabis indica
tctagttctttgttggggtataatcgtatgaaaggaatgctgaatttcatggaaaaccagcaaaaaatccacctgcaattgctcaatttgcagctgattatttggccaaatatcaggctgctaggatgctagtgattaaacctcagccatcttccaatgatgctacatctccacctgcagcgtcgacaactcatacagtgaagcccccttggattgcacctccaacagagaagttcaaactcagcactaatgcaaccgtggataaaatgaatgagattgttggcattggtgctgcattaagggattcacatggctcggtcgttgcagctttatcaaaaccaatcacagactgttacaaactagaggaaatggaagctcttggccttgcacttgctctacagtggctcctgtctcacaatctttcagcaaactacatcgaaacagactcaatgttggtggttcaaggacttaaagctgctccgaattgtaattcaacatttcatactattctgaaagatgtaaactttttaatatcctttttcccacaagcacagatctctcatgtgtctagatctgctaatacttatgcccatgttctcgctaagtttgctcttacggtggatattaatgttggatatattttaccaggatctagatttattaacaagtatgtttcattaacatc

SEQ ID NO: 264267 - DNA, 798 bp, Cannabis indica
tttaggatgtctgcgttcttatatagtcacctctatagacatcgtatgacaagctgatagaacctagacacgcgagtctatatcggtttatcaaggctgttaggtcattgggaccaactcgcattatagagagtcgatctctatgctttcgcatgagtatagagaggatactcgcatatatcctgatacatgcgagttggatccattatctaatcccgcataatacgagttacagttatgcgattagactttggtcatactcgcattatctcactgactatatctcaggcgaggtttaaacttcgaggagtctctcatggacgtctcagctttcattggaaatctgagcacacgtgtcctctaaacaggagtctggtctcgagtttctaggtgagagaaatctcactataacaacaacctgcttctatcacaatgtttgggcatttcataatcaagcttttcatcaacacaacctgctgcttcccttggttaagatggataaaaagattgacttcagcagtcattggcaggagtaccgaaaatattatcacttaagtgctcatagtgatattcaagctaggagcaagaatagaacaaaaaagacaaaaattagaaaaactagtccgtcgggaccatagctccgaaatttgggccttggctccgtaatctggagtcatggctccagaagagaaaattaagttgagaaggccccagggctggaactccaccatagaaactgatttcctatttatttttttaaattataattgatttttgagttattatgtgttatttatt

SEQ ID NO: 264268 - DNA, 6478 bp, Cannabis indica
tatttaaattattccgaaatttttaaaattttgtaggatattttaaatagctataacatacatgaatatgaaaaaaattagatcaaaaaatttttttggatggcgaaacaagttaagagtgcactagtacatctttttgaaggggtgcattgtagaatcaccccatattatatattcacttattcacatgtactcttttggttatgtttaaaatggtgaactaacttttttaggaaagcgtgatttgaaaaagaaggatagtactattccaagaatgagaaaattgaaagataattctacccaagattatcattcggtgacttacttttgaaaaaaataatctgctgtcccaattttctattctcaccccgtgtcactaataatatcaagccatttcaagtagttaagagattcattaactcttttttagggttaacattcatccattaataattattcaattctctctccaactaattaatatcattctatctctccaataaaaattataataaattaataactaaaatattattatctctccaactatttaactttatattttttttaataaactttttattcttattttaacattaatatcaattattagccttttatatttctttttaaactgacatttttttttctattcctttgctcaaataaaaaaaatcacgtgtacttatataattatatattaattaaattgtttatgttttcacaatatagttatttttttatcaattttttttagtaaaacaattaaacttcacaactgatttattgaaattttgatatgtacgtactttgagcgtccgcccaaattttgctctgtggcagttactttgttacttcaggttttttccaggtttccatcccctctattcatcatctttccccatgatctctacccatttctttaccctctctttctggccatgatccccacgatctacacctcctccattatgatttccctcttaccactctcctatttatttcgagttctatgtgccctaacccacaattgttctaaatttggtactatggaaaatatgcttaaagacctctccaatcagtttgttctcacggacaaagaaagggtggtgcatgaaattggtggatcgattacttctgctacatctgctactaaccattttgctgtttttgcctttgtcttaactcacaggaaggtgaacgatgatggttttatcaaccaaatgtctggcttatgagcttttcgtttcctgttaccatcactgcccgccgtgaaggatactttcttgttcaatttaggtgctctggagatatgcaacgcaccctgtaccgccaaccttggcactttaataatcaaccaattgtcttgcactcggcacctcctttgtctactccggctattacggacttcactcacattcctttttgggtgcaggtccatggtttgccctttctcagcaaaactaaagttatggcaaatattattgggtcaattgttggagaatttttggaggtcgatgatgattccttggaggaaggatgggggccctttatgcgtatccgtatctctcttgatgtcactcaacccctcctccgtggcacacttttgaagattactggtcttgttgatgacttatgggtgattctgaagtatgagaaattacctgatatctgctataagtgtggtcgtcttggccacacttttctaagttgtatccaattcttggaggctgaagatgttgggggggatacttccttaccatatggtccttggatgaaaggggaccctttacctaggaggggaactggcagacctttatctcttaccaatttccgaaatgtggcgtggccactcatgactcgacttgtccgaaactcacttacacaagccttccctctcaccccgaccctccctcctcgaccccaaaacatccgcccgtcagaacaagccactatttcccctgctgcccttgctactagccttctcgcctcgagtaattttatcttagcaccttgggagcaatcatccaacaatcctttacctccaccctcccttcaaaatattattaatcggatgtccacaccgtctcctgaaaatcctacttccactcacaataatcctagtatattgcccactgccaccttgggttcttctccatctcttcattcaccaaccatagatccttatgctaccactaccatatcaattgacactccaccaatagttactgctcgcgaattcaccaacaaccactctttcaaaaggcaatctgttcaagtgggatgttcccttcggaatatgctcaagcgttgccgtcttcatccaaactcggacaattccacatccgatctcactacagctactgtaactgattctgaagccgaccttgttgatgatgtgccatctacaaattctgcagaggacgaggatgctaatttggcgggtgttgcgcagcaaccccgccagtcgccatcaatgtgttaagctggaatgcccggggtttggggaatacccgaggattccgtcaattgaagctgctcaattcccaacatgctcctcatctccttttccttatggagactaagttaagatctggttctgtcaatagagttcgtaatgctttaaattttctgaatggaattgaagttcctagaaaaggtcttgggggtggtcttatgttattatggaaggggaatcttgatgtaactttgcttactttttcaatgaatcatatttcttgttatgttcagtgtgatgatggaatcaaatggcatttttctggcttttacggtgctcccactaatgttgaaaaaaagcaaacatggaaaatattaaaaagacttgctgatattgctccccaaaatccgtggatggtagttggggattttaatgagatattttctaatgaccttaaagttggtggaactcttcaggataatgctcttattaatgatttccacaatgctgttaacaagggacatctcacacggcttgatcataatgatgacatatacacttggactaataaatttgaaggtgctgcacatatgaaggaatgtttggattactgttttatcaattcccattggcaacaagcttttccttacatttctcttcatcaccttgattattacttttctgatcatagggccctcaaaattactatgaatgatcagccgactaatgttcatctctctcctaagaggcgatctcgatttaaatatgaagccttatggcttaatgacaccgaatgtcaagatcttgtggctcgccattgggatccatcttctcaccaatttatgaggcaagtggttatcaacatcaaacaatgttccactcatcttcaagcttggcatgataagaaatatggtaatatgaagaagaatatctcaaaagcacaggatcgagttgctggtcttcataattccaacgattgaagtgctgaatttttttctgagctccataaatctgaatgtattcttgatgatctccttgaacaagaagaggtatattggcatcaacgttcaaggatctcttggattaaatcagacgatgctaacaccaaatactttcattcacgagcttctggacgcaaggctaataattgtattaaaaagcttcacactccttctggcttggttgttacagacttagatggtatttcaagtcaagttcaagattatttcaactctatttttcacagtaatggtgttgatcatgatgctctttcccaaacacttgaggtgatccctacatctataactcaagccatgaacgattctctcctttagcctttctctcctgatgaagtttattctggtctccttagtatgggctctgataaaagtcttggccccgatggtatgtctgctatgttttgcactcatcattggtctatagttggcccattggttactatggctgtccttgatgtgctgaacaataatggggacccctcactcattaacaatactttgatcactcttattccgaaaattaagtccccaaccacggtggctcattttcggcccataagtctttgtaatgtgctctacaagttgatttccaaaacagttgtcttgcgcatcaagaattacttaccactggtgatctcgaagaatcaaagcgccttcctatctaataggttgatcactgataatgttttagtggcttttgaactcttgcattgcttgaaaaataagaccaggggtaaaaaaggctattcggctatgatgttggacatgagtaaagcctttgacagggtggaatggaactttattgaacatgttctcttgaaaatgggctttcatgtgaagctagttgatctgattatgaaatgtcttcggtctaccagcttctcttttcttattaatggacatgtcactggtcaccttattcctgaacggggtatcaggcaaggagatccactatctccatatctctttctcatatgtgctgaatctttctcttgtcttttgaaacatcaagaagcccagggatgctcacgggtttggctataactcgtcatgttccacccatttctcatcttctatttgcagatgacagcctcttattatgcagaactgatgctcgatcttgtgttgctgtcaagagtactttagatttatacagccgtgcttctggccaacttataaatgctgacaaatcagtcatgtccttcactcagaataccacgcttgctgatcaaagagcttttcaccagactctgggtatgcctattcaaccttgtcatgaatcttatcttggactcccatcctacactggtagcaacaaaagtgatgtctttagtggtattaacgatcgtgtgtggaagcttcttactgcttggcaagaaaaacttttttctatagggggaaagaaattcttttaaaggctgttgttcaatcaattcgcacatacgctatgagttgctttcggctcccagcaaaagtgtgtcacaatcttgagagtctaatggctcggttctggtggggtttcaaagaagatggtcattctatgcattggaaaaattggaatgctttgtgtcggagtaagttagaagggggtcttgggctccgtaattttattgacttcaatcaagcgctgcttgccaaacaggcttggagattggttgataacaatgactcactcctttatcgcaccctttaccatcgctactttagccgctcaactttccttcaagctagactgggccataatcctccctatacttggcgtagtattttatggggtagggacctcttggttaaaggcctttgttggaaggtgggtacgggatcttccatttcttgtgcctccgatccttggcttcctggtacaacgaactttgcacctgttctttgtatggatgctaataatgatcttagagtttctgacttgattacagctgatcgtacttgggattatgttgctcttcatcgacacttctgttcatatgatagtgatcgtattctgagcatacctttgagtcttcatgctcctgcagataaactcatatggtaacactctcctcatggatgctacaatgtaaagtctggctatcatttggctactaatatcagagatcaagagtccccttcatcttccaatcttaatactaaatggggtctcgtttttgcaaccgaaatttaccccataaggtaaagaatttttcttggcgtgtgattcataatgtgttacctttggctgccaatctgttcaagagacatatagctccagatccgaaatgctccagtgtaattatcataatgagtctcttaaccatgcttttttcctctgcaagaaagctaagcaggtttggcgccttctcccatctcaagttgatttggctgctgcaacttctagcagtgatggagaatttgtacattctttgttccatttttatgataattctcaaatggaaataatcctttgtatcatgtggtatttatggcatgaccgtaataactctttatttggcaagcaaacaaatctgcccaccataattgttgacaatgctcttcatttcctaaatgaattccattcccataccagtcgacaggcgcccctaccctctgctaaacctgtgatgaataaatcttggcagccccctccccatggtcaacttaagcttaacgtcgacgctgctcttgattctgctgctggggttatgggaattggtggtattgtgagagactctaatggtaatgtggtggctgccatatccaaatccattcgtggatgttttcaagtcaaggagattgaggctcatgctatctctttatgtttacaatggcttcatcactctggttatgttatccatttcattgaaactgatgcacaacttgtttcccaaagtgtcaataattaccaagtgcatcatagtcgcttccatgatttaatttaagatgttatttatcagatgtccttttttcctagagtgtcactgagtcatgtttgtcgctcggcgaataatgc

SEQ ID NO: 264269 - DNA, 741 bp, Cannabis indica
gggtcatacaccaaatatgctggagcagaaccggttacttctagaaaaccttttaaggaaaatatagaaggaattgagtcagcccttgtgagaaacatctcattgtttcaatgtaatcctactaagggatttacatcaaagccgaagtctacaagaaatgatgcaagtattgggttaacttttcacagttgaactcgtacacattttctaatggcataaatgaatggacttcaaaagaaaaagaagaaggaatgtgggaatgtcttcatggtctaaataccataagaaccaccactgctataacgggggcattaaggaataagccaaaacagtacatgagataagtagtatgctcaaaactacatcctgtacgaaaatgtttagcttataagtgccccagtttcttagcagttcaatccaaaagcttcattaaatgttccatctacaaataatgagaagactttcccaaggaagtcagtgaaatgtaacaacattgaatctaacagtatgtcagtgcttgttattggaacgatgagtttggtagaacaaattgaagagttgcaaagaaaattggtagagaaagacgccaaagttgaatatcttacaacacaagtagctaaacaagctagtttaagtaagaaaaaacaagtagaacaggggcaagtgtcaacaactttgcaaacacaatatttttcaaaggaacaatcaagtatacaggagggcaagtgtcaacaactttgc

SEQ ID NO: 264270 - DNA, 1077 bp, Cannabis indica
cttgagcttgcataccaaatcctgatgttcactagaggagaatccttctagttgtttcatgtatacctattcctctagatcactattgagaaaaacaatttttacatccatctgctccaattctaaatcaaaatgagcaactaatgccaagatgactctaagggaatctatctttgatacaggagagaaaaggtctttatatcgtcaattccttcttcttgggcgaatcctttagcaacaagtctcactttgtatctcgaaatgttacctaatgagtcttttttagttttatagacatatttacatccaatggctctcgcctcattaagcaaccttgaatgttccaaacattgttgtacctcatagaattcatttaatcattcattgtattgtaccatagttttgtattctttgttgtttcatagcttgtaaaaaatgtttatagatcatttccaactccaatattagattttaataagtacacaacatagcctttgtaaatctttggcttcgcaggactagtagatcttctaaagacttcactaacaggctcttggggagcagcatctggttcagtcgattaaataggttgtttaatagacaactcttgaacatcttaatctactagattataattaccaacatgtggatcttcaatgactggtaatggttattcaacatccgtttgaactactggcgtgttgaccattatcaatcttgctcttgaagtaaaaggttttgaaggttttgcactccttgattccacacttcttgtgctataagatagacaaaaaacttgtaacctttagactctttagcgtaccctataaagaatccacttatggtccttaggtccaatttcatctcttgtgaattatatattctgacttcaaatggacttctctaaatgcctacatggtttaaacttggtttcgaacctttccataatttaaaaggagtttttgattctacctttgttggaactcagcttattaatatgtacacggatgtctttaaggcttcagtccacacaaattttcgaaggttagagttgttgctaagcgtactctgcaacat

SEQ ID NO: 264271 - DNA, 1051 bp, Cannabis indica
ttttgttgtgactaaaagtcactaaatatttgtattatgaataaaaaattatcactaaaaataatttttggctaaatagtaatttttccccttaaactttgacatataataattttttttgctgttaaaaattcccctgaactattcagattgttaaatttaaggacttttgtctaatttcattcaattttactgtttcaggtactaaatcatgctccccagactttgatatctacctaatcatgcccctcaaacttttatatgtattaaatcatgccccctgaactttcatccatgttagattttttttactaaaattacacaaaagtctttaaatttaacaatcttaatagtttaaggggaatttttaacggccaaaaaaatttaaggaacatgatttagtacatgtcaaagatcggggggaaaattgctaattagccataatttttttggggtagtgataggtgtgttttattagttctatgaattttaagttggggcattaatgtaattggtgttggtgggatgatatatgcatatatcaagtaagtatttacgtatcgtgaaaaaacaaatctaaagaaataattaatgattaatttgttatatacacgtatcatacattatacatatataatataatataatataatataaagagaaaagttttggattttttttagagttggaaagttgagtggtcacgtgcattcatccacctctcctcacgtgtttcaattcaaatattcaacttttttctaactaaacaacctcaattaattgtctcattaattgtatttatttatgccttatttacttataccaataatattcttacaaatacccaagttgtgtggtgtagttgcttaaatgtgttaaagttaattaagtcctttatttggttactttttttttttgaatttttgagtctccatatgacaatacttatcttaggccttaaaataagcactctattaggaataggagtaagttgagaaatacccctcttattaatcaattaattaaatttacctctaattttatatttatt

SEQ ID NO: 264272 - DNA, 1232 bp, Cannabis indica
ttgaaaatagatccaaataacatagaaggagattgattgaaacttttatttgttctcttcctccattgtatgaatattggatcaattgtttcaactagtggtctacttagataaaactgtaaaactaaccaatcattggaagcaaattggatgcttgttcacgaatggaaatttcttcatcttctaggcgctcaagcaagtgctctgctatatctttcctgcaacagtcataaggggggtaaatatctacatgaacaaccagaaagtatcatattcataaagtgtaaaactagcaagtagaccacagtcataccatgatgacggagagagtacggtgtttttatctgacgaaatgcgaataagttcagatataacctcaattccattcttcctctgctcaacaatttcagaagcaacacgttgaagaacttcttgaaggcactgtgtgtctttgctcctggtcaaaaatcacaaaatatgttcaataacaaacaaagactgctaaatatactgttcaagaagcgggaatgaaaacaaaacacaaaagattacatcaagcagtattctgccatgagcataaccacagccctagctgtgccatcttgctcgtctagaaggttaattagcagcggaagcaccacatcagtctccctgttatcagtatgactattccctggcgaagaatgtggcttgaaaatgattgccttcagtatgcagacaacaccctctatcacatcttgatcagcacaatggagctttgaaatgggaaaaagtgatgtgagcactactcagaaaaggttctatccaataacatattatcctatttagctacaaaaaaattactagaatagtagaatttagttgcaataatttatttcctggtcctttcaaggtatgaatataaaatatactcaatcaaactatctcagttgtctaaaagaacatggaaattttcttaacatcactttcaggtagccacaagataaaagcaatattctatggagaatcggtaggcaagataataggccacctgttattattgacttctgttatcgtttggaattatgcgagaaacaaactaacttatcttatcaaacaacccacaactgacacgcaagtatgaagggtttgtctaaacacatcaaacaagcttaataaagccaaatacaaatggctaaaatctcaatagaactaatcggctctatcactgcaccagcaaaagttacaacaat

SEQ ID NO: 264273 - DNA, 1322 bp, Cannabis indica
ggtggcattcctaggccatatagtttccaaagatggagtcgaggtggatcctataaagatcgaagcggtcaagagctgaccaaaacctaagattggaagtgaagtaagaattttcttaggtctagctagttactatagacgcttcgttgaaggattttccaacatcgcaactcctctaaccaacttgactcgaaagacgcagaagtttgtctggtcagaaaagtgtgagggtagcttccatacacttaaggacaaactaataacagcccctgtattatgtgttcccaataacaaggataagtttggggtgtactgcgatgcatcgaaacaagggctcggatgtgtgttgatgcaaaattagaaagtagtagcgtatgcctcaagacaacttaaggagtatgaacaaaggtacccaacacatgatctggagttggcaacagtagtttttgcgctaaaaatatggaggcactatttctacggggagaaatgtgaaatttatacctaccacaagagcctgaagtacttctttacacaaaaggaactcaacatgaggcagaggcgatggctagagcttgttaaggactatgattgtgaaatctactaccatccagggaaggccaacatagtggcagacgcagttatgccagcttggcaatactggcacaaatagaaatgccactacaacaagaactccaaagaagtggtatagagatcattacacaagaactagctaacctaaccattgtctccacgccgccacaagaacttaaagatgcacagattgttgatgagttcttacagaagaaaagagcaggcctgccagagaaggaggcagaagatttctcggaaggtacatacaacatgctgagatataagggaagagtgtgtttagcaaccgacatagagcttaaaagaaagatcatgaattttgtgacaggactatcccgaacaaccaagcaacacgactcagttctcacaaagtcagcacactttgttctagtaaagtctacttacaatgcagagcagtacgctgacttgtacgtacaggagatattgaggttgcatggagttccaaagacgatagtctctgatagaggttcagtattcacctccaagttctaggagagtcaacataagacaatggggacgctgttgaaattaagtacaacatttcatccccaaatagatggacaatctgaacgaaccatccaaatactcgaggatatgcttcgagcgtgtgcactggacttcactggctcgtggagtaagtatttacctctaattacaataatagctatcaagccacaatcaaaatggcacca

SEQ ID NO: 264274 - DNA, 734 bp, Cannabis indica
ggaaaataccaggtaagttgtgcaatctcacaccgcctagggaaggtcaagtggcatggtttcgagactgtgtaggtatgggagtacacaattaattaaagagggcttaaatagattgattggttatatcaacaaggtgcatcttatttttcggtagcccatcacgaaataatttcatggttaagcgtgcttgacctgggataataatcctacacggttaagcacgattcgtgggataaatttcaaagagaaaatgattaattctactttttctttatgtacatattttatgataagagataagagatgatcatacatcttagtaattatatttttttattctaattaagtattaaacttattaataattagtgtgtcctctctatatgttttttttttcttcaaaaataatataaggtgatattttctttgataatgcgtacgtaataaaaatggtattatgatatttgatttaactttataataataaatattataattatgtaaagtaaggtttttttttttttttgtaagtaaaaagcgtacatatattagaataaaagcagttagacctcgcggtcattacaaagtattatatcgggcaaagaggaaagaggcacggagccaaacctctgatgggaaaaagcccacttagccacattatgggccatgaaattacattgtctactaacatattgaaatatacaactaataaaaaagggggaggtgttttt

SEQ ID NO: 264275 - DNA, 734 bp, Cannabis indica
atattaaatattaaatattgtatatttacttttagtgtttgggtatagtaataagggcattcctattgggtttggtgtattctagggttagatattctccccctatataaactaattctgtacacttttttcattcaatacaataaaatcaattttctaatacttaaagctcaaaagttgcttgagatcaaagcaaacaggccaatacatgaatatatatatatatttatatatatagctcacatatataattatattcctagccataactatatttatgtgtatatatgtctataaacacattctcacacaccattatacattaaaatacattaataactcgtgcgattccatttatacattaaaatacattacattactagttcgtgtgattccactatatattttttattatgatcatgatggtatattacaatttctttctttacgtgatggtatcagttatcataatatgatcaacttgtgcatctattaattcatcatcatgatattatatgctattgtccacgagggaataacttcaagaaattctcaattatataaatgttatatatatatatatatagattccgaaggataatatgaaatacgagagtttatatttatatgaaattttatagtggtgaaacacacacaaatcacaaaacacactcatttattatccatttaaatgtcgtatgtacttttggataatatatctttatatatatata

SEQ ID NO: 264276 - DNA, 571 bp, Cannabis indica
ttttcattctcttactagaaatataactttgaagaagctcctccttctctctagaggttgaacccacattgctccattctcatgggtttttttttgcaccctttcgacaatccatgcttcctatcttcttcaatggtttcttgttatgggtaagctttctatcccgctattcacttgattaagttgatttttccatgaatgcatgaaccttattcttgctttgaatgtcttttgattcccatattagattgtaattcttttgatacgcatggtagtcttaggatttgtaatgtgtaatttttagacaaaaaagatctgattttgacatttgttgtgattcttggctctttaggtcacaaagaacacgaagaatgtgttcaagttcttgaaaaaacacatgtttggatcctgtacacctcctagccggcaaggaggtcttgttcaaggccttgctgaccatggggtttggccggccaaggggggataccctaccaattaccgacatatgcttggaagtggaatttcttcccggccctagactaggtcaagggacatggccggcgctctaggg

SEQ ID NO: 264277 - DNA, 982 bp, Cannabis indica
atacgttatgaattatccattgttataatcctaataatcaatgatcctctacagatgatctacatcgagtagggacaaatttaccgttacacccttcaatgtattttatccttaaaacacttagctacctataaatgatatttcagtaaactaatacaattacttaaatgagtactcaaccatttatctctattaagccaagttcgaaggaaatcatcatttcacttctatgtccacatagaagctatagattccatgtctatgattagcgttcccactcaattgaactatgatgtccttactctatatgtcacgagaagatccattagtcgactttaacgaacagattaaagaacataaataatacaactgaactagaacccaaccatctcaggattgagatcatttgatctaagatcaactaggtgatattaaattacataaatattacggtaagtttattatatcttatccaagttcaatatcggtcccttttgatgcatacaccacacatccaacccaagcttactttaaccaatgccctggaaaggacatagcacttattcaaggtgcaagtaaactgcattgcagattattctatcagttaaatcttgtgtactgataaatcgtaggaatacatttaatcacacaatcttgattacttttcactgtgttgaaattacaataaacaagaatatcaatgtgataaggattcagatgaatttatttatcaaacaaatgatcatgaaataaacacgtgaaccaaataacacattaaacaaataatgaaataaatttgtttctttatagataaatgaatataaaaagattacattgaaatagagttttatttagggcacaaaatccaacaaactcccacttgcactaacataaaacaatcagtacatttcagttaatcctagatttgttatgtgcttttcaaatgtagtgactatcaagattttggtaaatggatcagcta

SEQ ID NO: 264278 - DNA, 1165 bp, Cannabis indica
aaatagctaaaacaatcaaaaaatcgattggaatacaaaaaacaattacaataaaacaattgagcagaaatctaatataacaaaatacggaaaaaacaaataaattaaaaattaattgacgaaaattaattacctaaataattaaaacaaaaatttaaacttcaaacccaaaacaacaaaccaactattagatacagaaaccaaaaccggttaacaaacaatatctctaacaccctttaaatattaacttatcaaatgaaagttctcaataattaagtaaaataaaaaatttacataacagaacctaagtctaaacttactaataactaacatgaaagaaaatagtctaaatttattaagagagagttaaaatccacacattataattcatcactcgttcatatccttatcaagttttggcttgaaatgtaaaaatcaaaaccataataacaaaactacaacttttttttcctttcctttttgctacaattaaacgaaattttaatgctaaaaaatatcataacatgaaaatagaatgtctttaattttagaagaatacatcaagccaaagaaaaattcaaagtagtataaaaagattgtgaaatatgctcataatgatcaaaagaaatgtaactaaagtgaaaaaagaagcgtaaatgataaactattcttgaaaatcaaagaaatgaaaaaagcgtactaaaattaaaaatgaaatcaaattacataggaagcaaaatcaaattacatttcaatgaaaaaaattctagtcaatatagagagacggttggcacaaacgataatcgaacaaaaaaataattactacattcaaatcaatgacggttggcatcaacaattgcagttaaacccaccaccacctttcccatcgaatcccctcccaagcttcactgcttgcgattaatcacaccatcgaatggcgttgttttgaccctccaatcagcctcgtcaagtgccactgtttcaccatagacgatgctcatcgtctctctggttctcgctcaaaggtttgagggagtgcattagtgatccaatacctcttctacccaaaaaaaaatagaaatatgggctttctatttttcttttgcaaatatatggaaatgtcatttccataaaaaaagtctaaaaagcttaaaatgccataaaa

SEQ ID NO: 264279 - DNA, 1386 bp, Cannabis indica
ctaccaaacttacaagaactcagtgtgcgatttaatgaagatctcaatgtaagaatacctccattgcttaaccaaaggagttctctcaagtcattgttcttgagttacactccattatctggggatctatcatcactaaatcaaaacttttcttctttgactgagttatcagcaagtgattgcaacatttcaggagtgattccagattccataggtatgttgagccaactcctttatctcgatctttctgaaaataatcttgtaggaaatatcccttcttctgttggaaacctaactcaactcagtgaactacatctttctgttaatcaacttagtggtccgattccattgtcattttcaaatctcatcaatttagaaattcttttcgtacaaggtaatagtttgagtggtatagtggattttgacatgtttcttggccttaagaacctcacttgccttgatctttccataaacaaactctcattaaatgttaacactagaataaataatgaaacgtttccacaattcacttcactagtactatccaactgtaacttaacaacttttccacattttcttaggcatcaaagaaagcttcaacttttgtatattgagtataaccctattggtgatcagataccgaattggatgttgagtgtaagcagagaaacaatggtgagtttatcacttgctggaaactctttaataggagaactctcatcagcaatatgcaaccaaacttctcttcaatttcttgaccttaaagataataatttgcgtggtgagcttcctcattgtttaggtaattttagtaagtcattatcgatagtgacccttagaaataaccatttttgtggaaacactcctgaattcaaaggaaaccaaataaaatacattgatttatctctaaatcaatttgaagggaaaatatttaaatcgcttaccaatagtgagatgcttgtttacctcaatttggaaggtaacaaattaagtgatgttttcccatattggttgggaaatcttccaaagttgaagttcttaagttgcagggaaatggattttatggagctatagaggagcctagaacaatccttcattttcctaagttgcgtgtaattgatatctctaacaataacttcactggaaaattgccattgaaatatatacaaagttggaagtccatgacaagtacaagcaatattgatgaagactttgattatatgagatcaccaacttttagcatcacaacaagttatggtacgcttgggtatcaatattttttcgagcttacaacaacaatcaaaggcattggcatatggtattcaagaatggaaaaagttcttatactcatcaatttctccaacaataaatttgatggagacattc

SEQ ID NO: 264280 - DNA, 767 bp, Cannabis indica
tttttgctgacgatgttgtgtttaatatgatttgggcgattcaattttagtaattgattatagttgagaagaaatcggcaaaatcaataggatatagacggtagaactcaagtatttagtagttggtgtgtgtaattcccatcttcctattgatttgattggtttgattcactgaaactgtaaaatgacgtcctatgaaatgaatgatcgattttctcatgttcttgtaataatttttttgaaaaaaaatacatgtatggggtttgcccattttcaattttcatataggcaagccagccctacgtgccaatgaactaagaacacttttgaccaatataataaaatctgaatgtcatttgaacttctattttgtaggacgattccttttgcctggaaccttataacagctggttacattgaacaatcgatacacggggtacaagcttctcctgcattacatcacttattgagttttatatgttgtctaaaagtttgtttattgcctgatacacatatctcctactgctacgtagcccctgtatagtattaatgacattctgtttgataggtggttctgagcaccattggtcttcttttcattgggaagctgcttgagcctgtatggggttctcgggaattcctcaagtttatctttgttgttaactttctgacttcgctctgcgttttcattattgcaattgcattgtactacattacaacaaaggaaaattacctgtaagtgccaaaatatcactctcgtgatttac

SEQ ID NO: 264281 - DNA, 501 bp, Cannabis indica
taaaagtgatctcgaggagtaaatgagattttgagggaacctgaacagggccccaacgcataagttgacatggcattgggtcgtacgcctaggttgacatgcaacttggttggcatttttttggttcctcaaataaaaatgttgctatgggaattcttcttaaaattgtgaaaaattgcgaattttatttccatagaggtatcaaagcaagccctgtgaaagagcccgagaagcacgcagcacctaggttgacacctgacctggtgtttgcactacttcaaaaacttgattttccgtcgattctaacgtcaagaaaatgtaaaaattgatgttattaaagaactcatgaatttttcgtcggtaatgcactgatgcaagattagcgtcagttgcaagactatttgcgtcaaatctacactggcgctaaccttgcgcttcgtgaaaaacattaaaataagagatgggcgaaacccatttcacaaaccctaaatatatataacc

SEQ ID NO: 264282 - DNA, 1251 bp, Cannabis indica
atacgctatgaattatctattattataatcctaataatcaatgatcctctatagataatttgcactgaatagggacaaatttaccgttcccttcaatatatttcattcttaaaatacttagctatctataaatgacatttcagtaaactaatataattacttaaatgagtactcaaccatttatctctattaagccaagctcgaagaaaatcatcatttcacttttatgtccagatagaagctatagattccgtatctatgattaacgctcccactcaattgaactactatgtccttaatctatatgtcaggagaagatctatttgtcgactttaacgaacagattgaagaacataaataatacaactgaacgagaacctaactatctcaagattgagattatttgatctagatcaaccaggtgatattgagttgaatagatattatggtaagtttaacatatcttatccaagttcaatatcgttcccttcagatgcatacttcatgcatcaaacccaagcttactttaaccaatgccctggaaatgacataacacttatccaaggtgcaagtaaactacattgtagattatcttatcagttaaaccctatgtactgataaatcataagaatacatttaatcatacaatcttgattactttccactgtgttgacaagacaataaacaaggatatcaatgtgataaggatttggatgaatttataaatcaaataaataaataaatgatcacatgaactacataacacattaaataagtaatgaaaataaatatgtgtatttattgataaatgaatataaaatattacattgaaatagagttttatttagggcacaaagcccaatattacacattccaaaaccatcatgagaatcaatataccaaagagattacaaactaacatgaatcaaaaattttccaaaagcttaaaacttgttaacggtaggtacaaagaagagaagatgagacgtatatagagagagaagatcaaagatccaaaagcatgccaggcaaaaagccaacacttggctagacaaggctgttcaacagagactactacagacatgacgatggctggaaagtccctatgtgaccagatgtttgaacagggacttggggggcaaatgttatcccaaattttgtccacctggcgtggcatgtccacgtaagtcgaagacagagtacaggtggagtacagccctgccaataatagaatagggcctccatgcaaga

SEQ ID NO: 264283 - DNA, 1207 bp, Cannabis indica
tctccccattttaaccataacacccgattccgttttcgccaatatttctcgtctttttcaagcatgtgattaagcgtcttctcctcattttgaagatctagccacacttctagttattgtaatgcagtcaaagccccaatagacttgttaacggtagttatctctccatttaacctctttttcttttccttattccacttctgtagatctttcccacatgtagaaatacgttgacaaagagccctaacaaaaccaacatctcttttttttagcccaatatttctcgatgatatctcgacattcaacctccttgcaccaagcttcttcgaaatggaagcaccctttttattgaactttgccacacttgcatccgagctcctaattggaagatccaccacctgtgcccaatggtcgggctcccaccaattaagaattttgatagtagctccttcgaatctcataaacctctcttcgttaaacaagccacgatctaacctttccataacaccacctctcccatggccattacaccaagtaatagttgttttatccgacccaaaatcaagcaacctataattatctatagcttccctaaaactctccataacccttagggctccattcctaccaccaacctttttagaagagctgataattccattaaaatccctaataaccatcctagccccactagtttcccccttaatatccctcaacagatcctaagaaattttttattgagaagcatccaaattaccatagaaacctgataggttgatattttatcttataaatatagccgatttatgtattaatattcttaaattgattctttaaattattaattagagtgactttaatttattaggctattttaaagatgaatcatgcacttggagtcatttggagagatttaagtacattttggtggaaaatagtggaagtcagcgagcttggttttacaagccagaacttaatcgcaattttgacaaccttggaagtagaactagacttggagactaaacatgaaagttttagatctcgttcccagctttttggaagatcttgaatcgtttgattccgagttggattgaagaaattatggctataaaatactaatataaacaacgtgacagaattttttttagctaacaagctattgccgtggtgagcctcagcgtggccgcggcaaggatgcgaattctgt

SEQ ID NO: 264284 - DNA, 589 bp, Cannabis indica
tatcaaggcctcgtagtggcctcattgttcgaagctgagaagtcgaaccgtagggctgcctgcagtcgcagtccggtcggggatatcattgccactcctgctccggatccattttcgttggaggctccgtccacaaatactcgaaatgcgaggatcgatggtattggcgcatttgcggttgcctcagcttcattgcattcggtaatgaagtctgccaaggcttggccttttatggagattcggggaacgtagtgtaagtcaaactgacttaactccattgcccacttgaggagccttccggacgcttcaggtttttggaggacttgccggagcgggtggttggtcaataccttgatcggatgtgcttggaaatttggcttaattttcttcaggccatcaggaggcagaaaaccagtttctcgatgatggggtaccttttttccgctcctatcatgagcttgctaacatagtacacgggatgttgagttttctcttcttctcggactagggcgtgaccgcgtgcttggagacagctaaatatagaaataggtcctctccgagaacatgttttgataggatatgaggcttg

SEQ ID NO: 264285 - DNA, 1071 bp, Cannabis indica
tcttgctcttagcttggttgaggcctttggcgttccactcagcctcttctagtttaataaactcatcagctctgtcaaggaagtctctcatagtatgggttggtttccgccttgtatccttccacagccgacttcccaccagaatgccccccatgatggcggcccgcttgccatcatcgctcaaattttttactttggttgcctcctgcataaagcgttgaatgtagtcttttagtggctcatcgggcttctgcttgatggcgaccaagtcacccaactccgctggtatttgtcgggctgaagagaattgggtatagaataacccttcaaactcatcccaagaagtgattctccttgggggtagtttagtaaaccattgttgcgccgtgtccgtgagggttgcagggaaaattcgacacctaaggtcatccctgattccttgaaggtccatttggattttgaagttctccacatgagttagtgggtcttcactacccgtgtacttgcaagtgggcatcttaaactttgctggaatagggaggtcattgatcatttgggagaaggcagaccctcttctcctttccagatccaagtcagtgggttttggtgcagtaaggtccttgaccaatcgggttaactcgtccaaccgagcttggatcaccggatctgtgactgtttgaggttgagcaatattgacaccaacatttgcttggtccctttggaccggctcaggtgggttcactatgttggaaccacgattgtctctatttctgttgagggcgtcccgcaggtctctaccccctcgggggcctacccgttcaaaaactaacccagttcttggccttcctccggcgttctgactgtcagcccttccatctgccgggggtggtacttggtcattcctacccatttggggtggattttcaggttgatgttgcctatttagggcatacggccctctggcttgataaccccccagcttaggatttggttggttgttagcccgactttcagcttcatcatctccatgaccgtcagggtagtttatatggtagtcactgttgacctcag

SEQ ID NO: 264286 - DNA, 724 bp, Cannabis indica
taatttaacttaaatttaaatttaaagataaatattacaaaaatttaatatttcaatttgtgattatttcattaaaaatatgatccctctaatttgttaattttttttatttgtttttaataataaagtacataagtgaaaaatctaaattcatgtatatgagaacaaatacaagtacagaaggtgatttgtcatcatagcaatacataaattttctaaaataataaaagtgattatccaaataatttactagagttaaaagaaaagttcattagagatttacatatctaaagtcattgaccctagatcaagagcaatagcctttttctatagacttctgctcctatcataatgcacacttattaaaaaccataataaacaaaaataaaaaagagcatatcacaaaagtcaaaattatctttcttaattcattaaggtaatataaaactaatagtgattagaggaatttttaaaaatattatttttttagggctttttttatttttacacttctaaacatttattttttgtatttttacgaaattctatgtataaacccctattgctagcactgcaacttaaatcgcaacaaaaaatcgtatgaaaacccctattgcaactagcgatgcaaccactttagaaacctaaactgtaaatttgaaaaaaaaaaattaaagaaacagtatatgcggtaatttccctagtaattaagtctataaataaa

SEQ ID NO: 264287 - DNA, 536 bp, Cannabis indica
ctgcaaagtcacaagttctctctggttcagatgtctcctctttacaagatgtgtttactcgtgttcttcgcacggaaactacctcttccactcctcttaaatgcgctttagtgagtcgtaataattctacaccggaaaaaaaactctactccaagtgaatacgaaagaagtaattcacaaggacatgataatcgaacaccaaattctgagagcatcatgtgcaactattgtaagaaaccaggccacaccaagtttgagtgtaggaagttacaattcaagaatcggcaacaacactctgctaatattataagcactagtgatgcaactgacaaatcggtccttatttctgctgatgaatttgccgagttctcaaggtatcaggatacacttaagtcttcatcttcttctgtcactgcgattactgattcaggtaactctaatggatgccttctttccaaatcatcaaaatgggtcattgattctggtgcctcagatcatatgacaagtaattactcccacttctattgttaccttag

SEQ ID NO: 264288 - DNA, 515 bp, Cannabis indica
tattcggatttaggttttgtcgacctgttgtatgcgttgatgggtctttcttgaagactaggtatggtgggcaaatgttgtgtgcagtggcactggatgcagggagccatatctttccgatagctttcgctatagttgacagtgaaaaccacaattcttggacctattttatgagaaaattgaaagaaacgattggtgatgttgagaacttagcctttgtgtcggataggcatcaaagcattgttcatgctttggagatcgtgttccctgatgcacaccacggtgcatgctaccaccacattattatgaacgtcaaccacaagttcaagactgacgtcttcacgaatcacatttacatgtgtgcctacacgtattcaaaattagagtttcacagagaatttgagaacattcgggcaatgaatgttgcggttgcacagtatcttgagaaaattggatttgaaaaacgggttcggtcgtactttccaggggtacgttacaatgtaatgacgagcaac

SEQ ID NO: 264289 - DNA, 662 bp, Cannabis indica
atgttcattgaagcacaaatacacatattaactgacagaaaagagatgaaaaatagagaagagaagaaaagaagaatgctgaaaaccctgagcagtatgtctctagtattgcagttgatctctctactctatatctgaactctcactttttttctctctgaaattgcttgctgaaatcaactctctgctgctctttatataggtattcaggtccctaaaaaggtggaaaaccgcacctgtttaaattccattccgatttgaattatttgaaaaacctcacgccagatattccagatatttctctctgttgacaaagaggcgggccgcggcatgctaaacccatgccgcggcccgtgtgaccatgtggttgcttcttttgactttttccaagtaggcgggccgtggcatgctaataccatgtcgcggccatgccacggcccgcgtggctctctgcacccaacttccacatgtttttatctttttccgaatttgattctgatattttctaccgggatattttcatgcgatattttatcatttttctattgatatttttcaactcttcatctattttaaatctgcaaaattaaaagataaaagcgtaaaaatgctccaaacataatttaaattaaaccgaaaaaatgtgctaaaaataacctaaa

SEQ ID NO: 264290 - DNA, 852 bp, Cannabis indica
gataatactgcttgcagactcagtcaattgattttaattaatcaattttaattccaaaattagactatgtcctatttatgaattttcactaagcaaggacttaattgtgaataaaagaggttttagggtctgtttgttaattaagagactttgtatggtctaattaataaataatataaatgacagttttatttgataattaattataattattaaataaatagtttttggatttataggattgaattggaaaatatggtattattgaaagaagaataactggttgaaataaagtggcaaaattgcaactagagatcggtcttttagtggcaggccactctagtgatattttgcccaatatttagttcttttttaatccatataattcaaacctaagccttagttgaaacactataaaaggaacatgatgctctcatctcatccaatttgatcttcaacaaaaccaaacctagtttttatttcagacaactagtagatgagagacaccttatatacagttttcgaaccctcctttgtttttcataatcgacctatagtgatagagtgtcatgcccacacatagcaagtcaagtactcaatctgcggaagatggtggtaaccaacccgaaggagagaaagagatccaggctcaaatcttgataatacgctgcgacagaaaggaacaaggttaagagatctgagtggaaggagtgattatattctgcagcaactaatgtaaggttttctaaactcttatgtgtttaatttcattgttttagagatattcatatttgagatgttaattcaacatacttgttcgtaaatctagatcttggtaaaatattccaaaca

SEQ ID NO: 264291 - DNA, 865 bp, Cannabis indica
tggcactctcccctgtcccgaataagaaggaacaagagaggagccatcatcctcattcggagtaatgaccatggcagaattagactccatagttgcctccttagctaagcccgattcctcaagagtaaggcatggaccgggcttggataaaaagaagggaggggagtcactttgtcggagctttgtacccacaccacggtacggagcagagagaccagagacaagttgaaggaccaaacgactctcagataccggagccctgacatttttcaattgatcggccaaggactttagtcattgacagtatgtcgagacattggggtgattttccatcttggtggttgaaaagtcatgctccagagtgaccacacgggaatgtttattgtctttgaaaatatcacgcaaacagttccaagcctccattgccgtagcatcgggttcaaggatggtgtgtaaaagatcattagattttgtggcgtaaatccacgacaagactgtggcatcaagagtagcccacatgtcaacatcgtcctcctcaaccgtggccttctctttgtctatgtgatggagaaccttgtttgaacgtgcatgaaccttgaacaactccgcccatgttgagtattgcacgttttccatctcggaatagtaggaatatgattcctaatgttggagagagcaagagctggatgaaaagttttagattgagtcattgtttccagagtaaaacaaacgacaaggaaggtagaaaagaggaagaacaggggcagaaagtcacagatagggcgtagcggaaagtgattaagaagaaaaccctatactactgataccatgaaagaatattttggttaccattcccattaacaat

SEQ ID NO: 264292 - DNA, 626 bp, Cannabis indica
atgatcttaatccattttgtagagataatctttgtggtgattttggataatgatcttccaagaaaataagacttagggttttctaattttctcccttgatgggggaagatgagaatagaaattggctcttgttttttggggaccgctaccaatttataaccccatagctaggttattaattttaagtatttctaatttagcccctcaataaattagaaatatcacttaaggtatctacacatttagcccatgacactttaatacccaatgacccataattactaaaatgatcactttattttggaccaaataacttcaaatagcaatacaataatatacatttgagcccatttgaggattttaatccaacaatctcccacttgggctacatatgttttcagatagtgtataaccttataagcgcttaactttttctatcataattataggtatttcaaaataatctcgttcattgattatactaacataggatcaaagcgactttcgcaacatttaacgtagctaaacccatcaatagtcacgtatatcaatataatcaaatgacatagaccgatcgtagatacgtagcatgaaaattacatacaaatgtgatcttagcatgccta

SEQ ID NO: 264293 - DNA, 504 bp, Cannabis indica
ccccttgagtcactgggtttctcccagccgtttctggaggtatatcgcttggcccaggatgcgtgacttattcgcatttttagtattatctctactcgcatattgatggggcggtcagcattcgcaaggatgctgaccattctatcaagtgcgactttatagtttaatgcgggtgagatcacttattttccttttcacacattcatcacgctgaaaagatcttctatctttcagatgagcgacttgtcggatagccaacagctcggctctggaggccgtgcattcgatggtgaagttgaccaggaggaagacagctttctcccaacctcgatttcagaagaggaggccgcaccaatagagctaggcccgatgtcttctgcagacatcgaaagaatggtgcaggaacttgccgagcctcggaccatcgacattcgagatagcgaatccacggtgtcggcccgcgactaccttattcactcgaggcatgctcctgacgtcgaggtc

SEQ ID NO: 264294 - DNA, 564 bp, Cannabis indica
gatgacaactaatatatattgtcatatattacatattattagtttattacacgtatttaatctatatattattttatcataaataatataacaatcccccactagattaaatattatctctttagtaataaaatgtaacttttgtaacatttatttaatcaatcaaaaatattatatcaaaatataacattccctcactttgattaactaaatacacactttcaaagaagtcttgcttagctgcattaagtcaaattttttaacttgaattttttcttagtgtagttaccacaaagtttgatgaaattttagttgccgtagaattgaaccattattcatttatcacaaaccggtgataacacaaacacccttgctaatgctagctcacttgagaccacatgtcttgctcttgcaccgttattggccatatatgccaaattccaattctcataactcctaattctcataagaggcgacaccacctctagtccatatgggtggagttttagtgtttcaccactctttagacacttctcatgccaaaatatagtgttcactttgtga

SEQ ID NO: 264295 - DNA, 766 bp, Cannabis indica
atattcttttctaataagttgttttgttcataaactaaattaaacaattatcagtaagtacttacttttattatgtgagagaagagagggtgataaacgtataagtttaaaattttgacaattttggcatattagttaataatttttgggataattacataatgcaccattttttgtaaaaaaaaattatatttttacgtttacagaatttttttatatatattttaacgattttccatggaaacaacacgaaaacaacaagaaaacaacattaaagtaacatctaaataacatcaaaatagttaatattaactatatctctctctgaaaaaattatatgtattaattttttttaatacatatatatttatatattagttattatatacaaatatatagttagtttttttaatttttaattgattggtgatctctaattaaataaagcagaaaaaaaaaaattaaaaaaaatgagagaatttaaagtagaacaaaattagaaaaatgagagaattaagaagaaaatagatatttagaaattataattataattaggctaattagttaatttttttcctccgaactttgacatgtactaaatcgtgccccctggacttttttggccgataaaaattccccccgaactattgaaatggttaaatttaaggacttttgttaaatttaaaaattccctggactttttttgccgttatatttttcaaaatatctacacttatttactcattattttattgtttaataaaat

SEQ ID NO: 264296 - DNA, 499 bp, Cannabis indica
tcattctactaattttaccctattcaaaattttactctaactttccacaaaactacacatccatctacaaaaaacacaaatatattatgtttaaaattatgtcttagttatgtgagtgtgtgagaataatttaggtatagtactcataaaaagaaatatatttgaattaaattttatttggatgtaaatttagttaatatataaaaaataggatatttttcgacttctcccatttctatatcaactaaatttacttccaaataaaatttgattcaaatatacatctttttatgaatattttaaattattttttaatatataaattattaatattaggtggactaatgaaaatttgccaggtgtacacttgtgtcaccgtggcagtccactttagcacttaacagaccaaaatagacggaaagagtatagaggaaaacgattgtggagtttgggaagtttagccctaattttttcagtaagagggttaatccgtaacgaa

SEQ ID NO: 264297 - DNA, 1278 bp, Cannabis indica
acaaaataaccatagagaaggaataagaaatatattttatagtctccatcttccacacccacgaatagaactactacaatacccaaaaaataatcattaactccagcaagatggagcaagaacagtgaaatcgacgttaaaagaataaattatggagaacaaccgtaaaacaacaactaaaaaaaaaaaaaactaaaaaataaacacagtatactgcagtatgaaatttataaaaatatacagtaaaaaagtaaaaatattaaaaaatagcaaaagtcagtataccatgtaaatttccctaaataatcatagcttagttggttgaggtgtatgatatattatacaatgtcatggattcaaattccatagcactctttttaatttttttattttatatatatttctaagggccccaaaatttaattcgccttaagcccatatattctcagggccggccccgagggtataatagagacatcatctataaaagtgggtatatattaaaaaatatagaaataaaagtaaaaattaaaacatgtaaagtaaagtaggtatacaatataattttttcttttaataattatgtgaaaattacaccgtttacaaattttaattaaacattttaaggaatatgacatttttctttgttagtaaaaagtttcaacgaccaaaaaataggagcaacaaccactctaccaaggtaagggcgagagtttattcaaatatagtattcgctatcaacaaattctgaatacaaataagattccctggccagtgacaaccaaattacacttttacgtcaaagtaagtttgggcaaggtatggacaacaccatcacaagatctattacaatgaacaaaactaacaatttggagcctattacaaagaccaatgatatcatctaaaactaaacccaaataagtaatgatagaagcattatttttaattttacgcacaacattcaaacaatcagattcaataatgatgtttccatacctaaaagaaaggcattgaatcaaaacgttgtggatagccaaagcttcaaccactttagaaacaaaataaccatccaaatgccaacttgtcgaagctctagcaactctcatcaattcatcacgaatttatatgaccaaaccactacaatttcccatggaactaataggaggatctgtattgactttgagatgaataagcggagaggtatccatttgggtaccaggaccaaccctgagttaatttgggccttaaaaaaacaaatttttgggtcttttttttttt

SEQ ID NO: 264298 - DNA, 1122 bp, Cannabis indica
aattgaatctaaatctataataatttacagattaattgtttacattgaatttatggtacatgaggaatcaagagataattagaagagtaaaatggtatttagaccaactctaattatgaattaataattggagggcgagctacttatattaattatatcaatgaactacaagtaagaattctataaatataattttatattgtcaaggagtacaatttcatatttatagtggagtaataatagaattaataaactagattattctagtgatgagattgataataatcttggctttattggagctttaaaatataggttgatggtctccgagtcacttctatacaacagtgtacatgggaaggttttatttggtgaattaatttcgagtaagattaatttctattggaaataaattctcaagggcaaaatagtgatttatgaaattattatttcaatttttatgaaaattatgaattgtataattaatagtatttaactatttagttttattggataaaattgtatcaattagttaaatataatattattcttaaataatattaaagagagaaatatattattttagagaaaataatatttattttaatccttttgaaataataaattaataaaaattaattaattattatttattggtagaataaaaataaatcttatttatggcaaaattaagaaatcaattttagaccttaaattatgactcacacatgtagggtgatatataaaggcgcatgattaatttgttttaattattttattagttaaaataatttaaatcaaattaagttaattatctttcaattactaattaaatgtattatatgataattgtttaattaaaggataattataaaataaaagatctagtgatatttgatatttaattattagatatttatatttgaattctaattcaaattaaattagatatttacttttattttaaataaaggattaaaatgttttatttacaacattaggatatatagtatcataaattagtaagcaattaacagacagaaaaggcataacaaaatgaagaggaaagaagaattgatttttctctctcacgcctacactctctcttgtctcacacgccca

SEQ ID NO: 264299 - DNA, 710 bp, Cannabis indica
tcatgtaattcatctttattccatatttgtcttttttttctctgtttatatatgctggactgcactttgttttctggttcaagaactttggttttacaaaatctgctatcaactttgttgttgcttatcgttgatctccaaatcttattagaactgcacatgtgtgttcttcttgatagctcttattatgaatgattctgtgtttcaattttttgaagcctttaaactccatttccagtttgtgtccaaacatactatgttgtattcttttgtgtaagatttcactactttgtattgaaatgttttctcgattgcaaagtagcatagggtacttatcaatttatctttgtccttgtaaatttgtcccttttctattgtttcatgtcgtttgtcagtgattgataatcatttctttgttgtcgacttcttcttcttctttctggttgttttcaagctactgtaccatttctgctgccacaagctttgtgtagtctgtgaagtcgaaatattcatctactgttggagttttttctctgttgttttctggttgttggatggttgactctgatgtcacagaacctgtctctagaaaaaatgtattatcttgaactgatccgattgtgtgtgcagatagttgttgctgggttgtttccagggtgatgcaaatcttcctgtgctgagttgttgtcatatgctgccatcatcatatt

SEQ ID NO: 264300 - DNA, 523 bp, Cannabis indica
taggatgttaatgaaacatacatggtagtaaatctagattctcgtaaaacatattccaacaactggcctcaaatccatggtaatgatttactttcatgaaatatgaattaaaacgatgatttgtgttgatttgaatggcttcatgtggtttatgtacttatgtgatgatagtttagaaatcgcaatgtatgttactgaaatatttttatttcgatctggaattattttttctggaaaatagatgaaaaattaataaatttaggcttttacagaacctaatttggattttttatgaataagttattatttgttgaatttgaacaaaaatatcaagatttgaatgcacacacgcgcgcgcacgggccttggagccgctcggacacgcacgcccattcagacagaaatgacctagatttctcggacatgccttgtctaaacaggctgcatgtgttgagcattctcggtcaggataggctgcgtgcagcctctgtctcagccattccttccccttccgcgcgcgcag

SEQ ID NO: 264301 - DNA, 537 bp, Cannabis indica
agttgcataataattctcaaggtgtatttccaagtgatatacaaaatgtgtagctagatgatgaagaaacacttggaaaaacaatgaagattttgaaaagtgtgaggaaacctttgagcatcaaatggagcctacttcaatccaaaataataaagaaaaaggagagaaaacaaaaaattcaaatttgttgaattctgtctctacccaaggtgttgagaaattatttgagcaaagcgttgaagaaatgctaattccaccaccatagctcatacaacaagtaattgggtatcaatatagtgagaaaataagttgaacattggagctcgcaaattcacatctcgccaagcttgagggcgtccaaaacatagacccctatgtgagggcatatgccactctctatgggcgaaagccgctctttgataagcacttctccaaaagtcaagctagtgactttaaatcaagctcttcttaggaggcaacccaagtttctcaactttgtttttaatcttataagtctagttgatttcctttgaaaaa

SEQ ID NO: 264302 - DNA, 702 bp, Cannabis indica
taaacctaacatattcctaatcttataattttaattaataaaatatattttaaaaaataacaaatttgaaaaaaaaaatgatatggttagcaaactttgaaatttgaacaagattattttaaaagataatattttaatatcaaagtaagatcattcaaatttagtaaaaaataatatctgatcttataattaaaataaataaaataatctaaaatttcaaaataatccataaggctcctttgttagaagtcaaattttcaaaattcaaagcctactaatatctgaaattaattaaaaaataataaaaattaattttattttgacaattagatttttgattgaaaattcagattctacacaaaattctaccagaaattggcttttttttcaatgaaaaacgatttttgaatgaaaagttatgaagaaaacaagtatggtgcacaggggtatgcattgcataccagagcaaggatcagccgagaaacaaggctgcgtgcagcctcagtggccgagtaacctcggcgcatgcagcctcttcaaacagaggcgtgtcccagaaaactcggccattgctgtctgaatgggcctgcgtgtccgagggttcttagggtcgtgcgcgtgcgtgtgacattcaaatcttgatattttcattcaacttcaaaaaatcataactaattcataaaaaatccaaattaggttctg

SEQ ID NO: 264303 - DNA, 525 bp, Cannabis indica
aaacttggccggcctaggccaaccccgtacttgggaatggctggccaaggtttgctggacatggctgatcttcaccatacactctcccagggtatggtcggccagcccctatcttttcaaaatctgcagcctccccaaggagggccagccaatcaagtccccataacaatagatccttctgtgcaatcacaattggaccaacttagggacatgatccagggcatagctgacccaaagccttcagacattgaacttgatcggtcaaggaaatcaccattctcagcatatataaatgccttacccctactgaagttcaagatgttggtatggaagatgtataccagacaagaggacctactggctcacatcaaatacttcgagatgcagctcgacctccaaaaggtcactggtgatgtgtgttgttgcatatttccaaccacactatcggagatagcccaacaatggtactttaaactcatcccaaggagattcaactcctggactgagttctcacgagaattctac

SEQ ID NO: 264304 - DNA, 739 bp, Cannabis indica
atgcttgtctttcatcttgcttattctaagcttcataaaattttttgccctaactcgcgaagatttcaaacttttgagttttgactttttgtcgaatattttcatcctttaatctgttgagtactcctagtcgacatatttttctgtttaatgttcgatatcctaaccaaacactcatctcgcgtgttgtcttttgtagataaaagcaggtaagttttggggaagcgaacactgaatcgacaatgatctacttcaactcttgcacaaggatcatccttgtcttcgttctagtctgccctcttcaagtggcggacattttggttcaattttttcgtccagcaacaggatgatggcttgtaccaaacaaacaatgcgtaaagtcaacacgtgtaataccctaagtaaagaaatggattagcaaaaccctaattagataattatgaataattgaggaattatattattatacagttcaatatatgagaatttatttgattaattatatattaataccccgttggtgagctaggggcattttagtaattatgacccgagaagggtaaattgatgaaattaatttaattacgtgtttaatggaaccatattattatatattatgcctgtgttgtcgttttaggtgtgttcagacaggttggcgcggttgttgcgttttatgccctaaataaaactcatttcaatataatcagatttactgataaatatagatcagaaataacat

SEQ ID NO: 264305 - DNA, 650 bp, Cannabis indica
catccatgctacacattatgcttttattaaaattttagtggacgtattatgcatcaagctcatacaaaatcctacggtcataccacacccactatgcttatcaaaaaattcttgttacttttatacaaaaattctatggtcatactatgcaagccatggataagttcaaaacacaaaaattccactatttgttacaaattcgaatcagagcatacaaacacttcacatttaagattatgaataatacactattccatgaacaccaaaaatatcaagaacaccaagaataaaataatattctaaatagtgaaagaaagactagaaatacttaccaacaagagagacttcttagcctttcaccacacaaagctctcctccacaccacttgaaaatgaaagaagacaaatgacaaataaaaattagtggtcctacttatatagtacaatacaaaggagggaaaatgagtatttcaatgaaccaatacacttcctaaacctacaatcagcccatacacgggttgcatcagattttttgatgaatgtatatatgcacacactcatgtgatcttgcaaatcactacaaatataaattgtctacatcaacaaaagtcactttaagtggaatgcaaaaagaaaaggcattacattacc

SEQ ID NO: 264306 - DNA, 1260 bp, Cannabis indica
gtccattccagttcaagattcagttttagttcctaagtgtgggagtgggtcttggtccgggtgctggtttgagtttgagtttttgttcgcgttctggtctaagtcctagatctagacaccgactacgggtcggatctaagcattgagtcccagatcccaggtcccgaggtgggtcctatgacaaggtgtgggtctggggccgggtccccgatcccgatccaagttctcaggcccaagttctggtcctagtttgggtgctcaattcctaggtctgggtcctgcatctatgtttgggtcttaggtgccagtttgggtcaatgttcgtgttccgattcgggttcgagtttggtccgactctagggaccagtttggtttgtatcaaagtttgggtcccagtcccagtctgggtcttggttttgggtcctaggtccttgttcttgggtcctggtttcagccgcgattttttggtctgggtctaggtcctggtcggggtctgggtctaggtccccgtcttagtttaggtcctaggtcataagtcctggtctagttccaagtcctggtatgggttctggtctgagtttgggtttaggtttgggtcctgttacagtcctagtcctactctaatttcggttccaggtccggtatctggtcggacctgaacctaggacctgatcccacaccaaaactcggagctagacatggatctagatacaaacctggacatgaacccagacgcggacccatatccagactgggatcaaaacgtggaacctggatcttgattgagacccagacccaaacctggacccgtacacaagacttggactcggacctagacaaaaacccagacctagacccaaccgttgaatcaaatcaggacttagaccccgacccaaaccccgactcgtacccgaacccaggcacgaagtcaaaatcggaactgggactagcatccgaacccaaacatggacccagactgggaccaagggcccagacctggaccaggatctggactcaaaccaagaactcgaacccagatctggacccagacccggattggaaacccgaacccaaactcggattaggacttgaaccgcgatcgggccctagacttggaccggaacctaggacccaaacctggacccaggacccgggcttcggaactggcactgagaccctggacttgagcacaaacccagaccctgaagttggacccagaccaggacctgggacccaaagtggaactagactaggacccga

SEQ ID NO: 264307 - DNA, 877 bp, Cannabis indica
aaaaaaatccttaaatccaacaatctcaatagttcaggggcatttttaacgactttataagttcagatagtatgatttggtacatgtcaaagtttaagaggtaaaaatcttaattagcttttttttttattacgagacaattacaaatatttacgtacactaaagatgatcaaagattacatcactctttttttgtattatgagtgccaaaataaagtttcactactataaaagtcagaattcgcgatagtcctagaaatacttttttggggacccgtcactaaaaaaattaagtaactgtttaaaattgtcgggaaaaattagtattcgcgacggtttataacagtaattacaagaataggcgactgtttgaattagaattcatgaatttattaggaccgtcgcctatactataggcgagggttttaaaccgtcaggtataagggcccgttaaaaaatcgtcatctacttctcgccacatttctcacgtgcccacctacttcttttttatttcccacatgtccacctatttattctcacctattttttctctatttcccacaccttaaaacgaaaatcttaactctccaaaatctcacccacgcctctgcaccatcgccctcctctctcgttgtctttctccctctctcgatctccctttatcctcgtctttctcgtccatcgatctccacccacccctcctctcgttggtctctctctcatctccatcgcatatgtcggactaccaccacctcccgtctgtctccctctttctctttctctctctccgaactcggtataaatatatttatttatacttttttatttattatatatatttattttgttattgtataaatttaatgtgttttaaagt

SEQ ID NO: 264308 - DNA, 953 bp, Cannabis indica
agttttcacttgatctcacatgagatgactcctctttgaatcaactcacttacatatccatgtcttagactaatatgtctagacttcccattatatactccactatatgctctagccaatgttgcttggctatcacaatgtatcgatattgtagatacatcctctttaataattggaatctcaattaagagatctcttaaccattcggcctctttcccagtggcagctagagctataaactccgcttccattgtggaatgagaaatgcaagtttgtttcttggacccccaagaaaccgcccctccacctagggtaaatacccaaccagttgtggacaaattatccccaaggttggctatccaacttgcatcagtatatccttctaaaattgaaggaaatttggagtagtgaaggcataggtttttggttttctttagataacccaaaactctccctattgccttccaatgatccacacttggattactagtaaacctactaagtttactcaccgcaaatgatatatcgggccttgtacattgggcagcgtacataaagctccctataacacttgcatactccaactgagccactgctctaccactatttttaactagtggtttactatgatcgaatggtgtgttggcctctttaacctttatatggctaaacttattcaacactttctcaatatagtgtgcttgccctaaagcaaaacccccactatgccttgtaactttgatacccaaaatagtatccacttctccaaggtctttcattttaaaggttgaagaaagaaacctcttagtttcttctattcctttcatgttatcactaaggattaacatgtcatccacatataagcaaacaattatcacataatttttacaagtttttgaatacaaacacttgtctccattgttatgcctaaagccatttgaaagaatagcatt

SEQ ID NO: 264309 - DNA, 661 bp, Cannabis indica
ttttttgtttttaagtctttttatgatatttgatatgtaatatatatgtaaattagatttttaaatcccatatttaatgttttatttctttaggtagttttatttgtcacgggtgctggaaaaatcgccggagtttgttatcggtactggaaaaatcaccggagtagctgtcggtgctggaaaattcatcgaagttgctactgacgttgaaaaatttatcgaaattggcattgccaccagaaaaattactgaaaaaataccaagaaactggtttcttgatgaagaaatcggtttcttggtattttttcggtaataatgctaattctgacaacttttttgacactgatagctacacgggcaacttttccagcaccgacagcaaacttcggaaaagtcatcggaattggcatagtcgtcgaacaattaccaagaaactagtttcttggttatttttctagtgattttttcgacgacaatgccaattctgactacttttatggagtcagcagcaactccgatgacttttctgacaccggcagctactccggcaactttttcgataccaacagcaaactccggaaaattcgtcagaattggcattgtcgcaaaagaaaattaccagaaaaatcaccaagaaactggtttctcaccaagaaactag

SEQ ID NO: 264310 - DNA, 2924 bp, Cannabis indica
gagagagagatatatatatatagaaagagagctcaggttccacattgaggaacaaacctgaaaccttactatatataatatatatatatatattaccatggtttctggggttgattattttgttgttgttgttggtggtggtggtgaggattatgggacatgttgatggtgtttccaagagcagccatgttcaacatctcagtatgagaaagtggtcttaaacccaagaaatctcgtgtcaaaccttccccattatgattcccattaccaccaacaccacccccgctttccgcggccgcggtggagttggtttttccgagatgagaaggatcttggccatctttttttggatcactattgagaatgacaccattgaaagggtcgtgattatgatgatgatggtgatcacgaaacccaggtgtggtactactagtgctagaggtactgataccaccagtagtagtagttccagtagtagtagaagacaatgaactcatcatatactcctgaagtagactagtggtagtaatagtactgttactaccactacttttatcattattattattcccaaacccatgacctgttgttagaaccgtctgatcttgatgatcacgtgatgacaggttgagcccaaagttattggctccagaatcttggtgggtcctcatcatcattaccggcgaggtagctgagccagcagccaccgtatcattattattcttattattagtactgttgttgttgttgttgttgctcatggttgcgccaatttgagctgctttctgaagcaatgccgtggcagacatgtgagccgagggctgcggttggtagtgatgaggtggaagatttgggacgaggctgctagggttagggtttggggaattgaggaggtttaaattttcttggtctaacgatcttggtgagaagattgaagatgaggaatttgtgagatcgatttgggttgggctacaagctagccatggtggaaggttgtgatcttgccttatgagattgttattattaccactgggagtagcagctgtggttgcagtagtagtgaaattttgttgctcttttttgagggagaaggaatggactaagtcttggtgatgaagattatgatgatgattatggttatttaacaattgggtttggagatttagatgagataagattgctgaagaagaagagccaagtgggtttgttccgactgatcctggtagtactggtcctccatttatagctcttgcactctcctctgctaaagcgtcacaaaaggctctatgggtgatgaaactgtctctcctgaaaataaattaatgagacaaaaatttaaaataaaataaaacaaaaaagaaaaaagtcacaaaggtctaggacaattcagcagtaggttgactctctctctcttcttttgcagtattgctactctttctggatatattcatttttttttcttttgtccagaaagcaacaaaggacagattatatctatataggggttgtattgatgaccaggtgggctgtaacattttccttactaagctttctttgcatactcttctctctctaggttgctgcctattattgtgtgtaaagaaaaataataatagattaaatttaattgtggtcttaatatataaaaccaagcaacttctagtctatcttttaaattaattaactctgtataaatgataatgataattagtgtggttaattaatttaattaattaccttgagaaaagggttccacagtcacatctgtactccctggtgccacaggtctttgaatgagctttccaatcggattgaacagcataacgctttgagcacttgtcacatttccacttcttctcaccatgttttctacaaaaatgcttcttaataccagtcaagtcgccaagagccctcgacggctcatggtggacacaactcgcttctgggcacacataaaccttcttcttcacctctttgcttgtcctttgcttaagcttccatggcaaattgtgtcctcttctgtgaagttgaagattttggtctctttgaaaccctttgttgcagatctcacatatgaatctatttgttgccataagagtcttgggagacaaggcaatcacttctgcatcagggtctacaaatacacacacatatatatataatcaaaatttatataaaattaaaataaaaaaatagtaataatgtaatcttatgattttctctgacctgggtttcctggaaggtttctcttctttttgggcggtggttgagattgatgaggtggtggtgaggcaaaatattggtgtgaaaagccattattggtaccaatttcagctctgttacctgaagaactaacacttgtttgatcaccagatgctgctgaggtcaaattagacatattgttctcatccattactgctacaactctttcttcttgttgttggaatagcatcatcttatatgatctatattctttgtttttgtttttgacacatgcaataaattaattttgaacttatattatattacatggaaaggaggagcatatacatacacatagctagatcttggttttttggttttccctgatgagaatgaaaatttaaaggttagtactgttaggatctaattgttaaagacaaaaaccaaacaaaaaagataaattaaaagctaaaaaacaaaggtataaccggagagagaaaacaaatgaaaacccaaaagaaggcaacaatttttttttagttgtctgaaaagagtagtagttgtagtagtagtagtctcaagctaaagaagttaaactggcttatatatataaatatatatacaatcacaccttgatagtttcttctttgtttggctgcagcccaagagacaagttttgatttttcaaagctcaaaagaaacaaagagaaggagagagagag

SEQ ID NO: 264311 - DNA, 754 bp, Cannabis indica
aataaccacctcactatctgttcatgccatctattcaatctacatttaattacaaaaataatcctaaaatttatatacaaaataacaataaaattaatttatataggatgtacattatatatattaaaaaaattagatttcagtaaataaattatttgtttaatttgcaaataaatactttcttatttttgttttttctgcatcgtttttgtttttctgccataaaattatggtcacttccaagtcccaattgcaaagatcatagaaaccctttcacgaaaagccagagaagaactcaagcaaataaaacaaacagtcacaagaaaatgccttataaacatagggaatgctaattaatctcaaagctaaaccaaacacgcaacaacaaataccccaaaggcacttttcattatcactaaagcaaaccacaccaagctagtacatgctttgtgagactcagatagatagagcatgaaaagtatatatatgatagagatagagaagagaagatagatacagaaagattaatttatttctatcgaatggaactaccaaagcaaacatacaataaattttaacaaattagaaatttttccagaattagaggacaagaatattctgcaaaagcaatgtgacacaattttatgacctatttctcctagcatatactaactattgctattgaaacagcaagatattcataaaattttaaaggctaaagccaaagctttggttcacctcacagttgattatg

SEQ ID NO: 264312 - DNA, 508 bp, Cannabis indica
tttttatatttttgtgtgtgcttcgggctgtttgtagcccaaagtggatacttattgggctgtttgaaagtcctaattactacaagttctaattgatgattcttaacagagtacttctatgttatgaacttgaatttaaaatcaatgaacacagaatttacaagcttcctcagcattggaaacgcattccaaccgagtagtgcttgggttcccttgaactgggtacagtacctttcactaaacaatcaattcaattacaatatccagttctgattcttcaaatcaaacaatgtaatctaaattgacttttgtataaagttacctaatgcttgaacaacctcaagctttgagatctaaacacatttagatctcaaacacaagaaacacacagctgaaccaccttcagcacagaatctgaactcccttcagatcaagcagattcgaactccatcttcaacctcaggaagatctctggaatttcaatctgcacatacaagaaacaaaaaca

SEQ ID NO: 264313 - DNA, 3640 bp, Cannabis indica
gcagggcgacgagcaatgacacgaaacgcccgccgcggcggaaaaatatgggtacgtatattccagacaaaccagttacagtaagaccgtgtagtggaaagcaccactccgggttttgttggatatatatttatatttatatatattatgtataaatattaaatagtaccccacaccatactcttacttgctaaattaattattatttacaaataaattatatttatatatatttatgcattgccacttcaattcacgtaagtttaaattttgagttttcccatgccaatattactaaacaatatatttatatatttcccatattaaaaaaaagtgtctaatcatgagccatgcactatctatgcttgtcacattctttaatccccacttatataatatttatatatatatatatataatcagttgagcaaactctctaagcaggtttttttttgttctattcaccactgcaattctggcagtatgatagttatgaaaagtgatcggaatctattttcaaactgcagtccaaataaaacatcacataaatgcaaaacatcgcggattaaatttcccataatattgcgcgtaaaatacttttaagataaattattttgcaaacatccaaaacaaaaccttgcatttcattgtggtaatttggacaagaatataatgcaattacacacctttatgtggcatgataaataatattatgacattctgagtcttgggaacttcattattgtttctaacaaaaaagctaatatcaaatattctggtaatcaagcttccttggttgataaaattctttaccataccaggattatatcttgcagtgtattccatgtatttcaataataacctctaaatattaggctactagcactgaggatctcatacgctataaaccagcaaccattaatgaagagtaggagttgagcaacaaaatttttctacacttataagcagtagtttttggaaccatattcttcatagaaatacataccaagaaaaagacaattcttccaggaagatagccactgatattgtttacctgtagataaatttagaatgattaaaagaatactagtcacagtataaatgttgagatgcaaccaaaaaatattaaccttaggtgtaaataacaattcaaaataaaataaatttcaaacagaactgctcaatttcaaaaatcaagaacccacacagcatagtcaacgaaaattacaaagtcgtactcttcattcagcaagatattattttaacttatggatatccaaatacacgttggccataagaaaaccatttatatggtaaatgtactagaatcatgcaactgtcgcacttacttgtatttgtcctccatgtccactaaccatatcaatcattttgatatatgatccttcttcaactggttcataaacctagtcaaagaggtaaaatcgacatcattataatattatatgaaacttacctttctaaaagacttaactcctatagaacgaacatcaaagcattttcaggaactaccttttcgtaattagcaagccgagttttgaagtctctcaatccagcctcaaaatcaggcctgcaaaaggccgagaaattagtatgtacataaatgttgagaaggacaaacaactggttccacagtgcaatcatactcttctgcatagtcaggactctgttgaattttaagacgtatatttctttcaatgatccgctcgtcattgcaaattgtctccaggaaaataatctacaagaaaaaaataatgatgaatttataaatgtgcaccaagcaattgatgagaaacttttaaaccacctctacaaactttgctcatggtaccttgcattttccttcagccattttcatcagcatatttcttctgtgactataactgttcgttgcatcaaatattccaacctaaaattaattcattttgtgggaattaaaacaaaagcattacatggaagccataaatgaatcccaacatctaatatcaatgatttacctggccgccttcttgcatccaggaaaccatgtcatcaaatgccagggctgctacctagtaccatgtgatacattaaaactatttacaaagagaaaaggttaacgtggtgttacattaccaagcatccagggaatcaaatttactataggctttaacacccagttggcaaaaagtggaatggcaaacccaatttatgaaggtaaacatcaactaatgactcattcaactatgcatatttaataaatttgttcataaagatggcatcgtgaatgtaagtcgagaaatatattattcgttttcctcctcaaatgacttcttatcttgcttccctgtgtttgcataagcttccccacagcccacacctacccccagctgtctttctaaaaacatcgagctatactcgcacattttcaaagcatcaaatgcatctggtcctagagactagttctaacaacgtatttgcaaatagtgaagaaaacaaatagatctattctcaagcaaaatagatgattccctcattcacaatacaactaaagctttaagaaagcacatgtcttcctataaatgaaaagaaaactattaaaaataaatcaacttttctttatttttttcttataatatatacctcattacgggcttcaatgccttcagggttatcagctcggaaaaagtcagcagactgcatcaacaaatatctcatccattaagaaatatctgataacctgacaaaattaatgtagtcttcccttgatctatttaataaaaattcaactaatacaagttgtaagaaaaagtgagcttgctggtcccgcaaagagtatgactgatgaattatcaaagaattgatcactcataaaaaggtagtaaaatgcttatctctaataaaaacctctagcaatagatacctatgaaagtttgaacaatagatacctgattagctccatgcttcaggcgccgatactaccaaaagaaggaaacaagttattcaacttatactaacttcataagttaaactacaaattttaagcacaaaaaattacgcaagcaacctttccaacattgaaatgttttgtatcatgacccagccagcgtaggtatctagtcagtttagctgcagtaaaagttttaccacgagcaggtaaaccaacctgaagtaaagaaacatggttagacattattgcactcagcaaactaataatttacatttaaagcaccaactgaaacccggtgatattggcagcatatcaaatttctgacttttggaatgtgaaaaagttatattgaacttcagctttcttaagtttatgactaagaatacaaaaaaagtaggtgagaaaatgtttctgctattgaattctttttttttttctttttttattttatttcataaatcaggaaagagagtaccaagacaattgccaaatgtttatcctcctttggtccaagcatttgatcagctactgctgctgctgcaacagctccagcagctgctggcattgaattctaacagccaatagaaacagggtgaaagaaagtcttaaataaatcagtaagtgcaatataaatattcataggaaaaaaaagaaaaaatgtaatttctacacaaaccttggtttctgtgtcca

SEQ ID NO: 264314 - DNA, 2001 bp, Cannabis indica
ttttattcattattacataatgagaacaatcaattcttttaaactattctttggtagttttcttgatatgccattcttgaataagtttgtcaaaacttttctgctggcttccgccaactccaccagcttgacttgccatgtccagaattttttctgctctcagcctcagcaactcacttcccatgaattctctaactctctcaccaatctcatcacttttaatctcaccacaacccaacccccaactctcaacccaaatccccagcccactagcacggaccacctccgcattgatcccttggtccccatgtaatggccaagccaatatcttaacaccatgggctgccgcttccactatcgagttccacccacagtggctcataaacccgccgatggctctgtgacccaagatttcgccttggttaacccactgtttgaccaccaatcccttccctttaatcttctcaatcaaatccaaaccaagtacttcgcttaactcattgtcatcttccttgtccactatcatatccttcactacccatatgaatctatacccacttttcactaaaccttctcccacctctctcatttggtttctgggtagagtcgtacggctcccgaaacaggcatacactaccgacccatctggctgctgatcgagccaccctgtcggcgttgaccattcagtcttctcgaattcaaacggtgggaatggtccgacggtgaataaaggcggcagagctttacttactttcccgccattaacagcttccaccgactctttttctaatccttcgaaagaatttaccaagatcccattaagtctcgacagattcggagagtcctccattaatatctgagcgaaaagggtattcgtatccagaagcagagatgggattgacgatttggatatcggtgaaatgcctggaattcgtaagagaccatcttcaaaggggtttgattctgagttggatgattccaaaccagaggccaaggtcgggtagtaggagataaacgaaagcattctagccgaagacgagaaaagaacgtagcatggaagagagaggctttgagcgatggggataagaggggatactaaagtcacgtcgtgtacgagagcagagacaggcgacgaagttgaggatagaagaggacggaggaggtgagctgagcgacgaacggcttcgaagcgtagccaaaaaagggtcgctggagttgactgtggcagggtccataggaaggagatgaagctgtaaatgagtgacttgaggaaatgcagagagaaattgagaggtgagtcgagactcggctagagagacagttgggttgatagttatgagtgtgactcggcagtcgtttcggcggaggagcaaggcggcgaaacggaggaaggggacaaggtggcccattccggcattgggaaacagagccacgtgggctgttttggggttgtggatatcatcagaaagagtcgacatggttgggattagaataggaactagcaaggatgaagaagaatctactgatgtagatgaatgcttgatcattaattattgagaaatggtaaagggtaagtttgagccattatttgtcattattattagtcagttacaagtcaatatggctagaaagtcacttatctatctatctatctaactagattagtttaattttgagcattgctattagtaacaactactaatgcctagcaccttcttaacatgttaagttacgattggctagcgatacttcttaaaagttattatattaaactacatgacacatgatacttagttggaccaataacaatactgatacataggaagtactaagcaccactggtgcctttagtatttctctttaatttttctaactacattaaattaattttcaattgtaaataaatatttaaatttaatatttaatggtaataatatttaagttataagtttagaatttttgtaatttctgattgatgcaagttattaaatttttattttt

SEQ ID NO: 264315 - DNA, 1391 bp, Cannabis indica
ctgctattcaccactcagtcaaaagccagaactctacaaattcgatttcagctccaatctctgaagaaaggaaacctgtctatacacgattatatgatgaagatgacaaaccttgcagaaaatctctctgctgcaggacaacttatatctgatgaggagttgattctctacattcttggaggtttagggcatgattatgaccctgttgttattactttaacctctcgtgctgaccctataactctgcaggaagtgcaatttctattgcaaagtcaggagatgcgactggaacaactaaatattcctactccaggtgatatcaacactcctagtgccaacctcgctgctaactctcgaaggcctggcaacttcagcaatggtcctcctggattcaactctcaaggaaggggttactcaccacgaggtcgtggccgtggcagaggaggaggaagaggaaaccgccctgtatgtcaactctgcaatagagtcggtcatgttgtgtccaaatgctatcatcgcttcgatatcaactttcaagcacctacaccaggccaaggacaacagccaaatcaaaattccttgttgggacagcagcctcaaagtccaggacagcaagcttactactccgcttcgtctgctaacacacatcaagatagtgcctggtatatagatagtggagcaacaaatcatatcacctctgatggccaaaatctgcagcacaaatctgaaaacaaaggtacaactcagttattaattgcaaatggtcaatctcttcccattgctgaaataggaaacagtgctttaaatataaatgacatatgcttgctgctaaacatatgttctgtgtgcctaaagtaccaaaaatctcctctctatctctcagttaactaaagataaccatgttttgttgagttttattctgattgttgtgttattaaggatctgtctacgaagaaggagctagctcggggaatgcttaacaatggtctgtatcaacttcaagtgcctaagtcctgttttactctcctaagaatcgagtctgtgttttgtttctgagtctttaaattccaagaagagccttgtatcaaggtctcaatgtaagagtcaagcaagtgaaaatcatcaccttgctcagtccatgtctgtccagtctattaacaccagtgatcttgatctctggcatatgaggcttggtcatccaagcttgaatgtaatgaaacatctattaagtaatgaaaaggtttcttttactaaacagccaactttttgtgatgcctgccacattggaaaatctaaacacaaaagctatcaatcatcaccaaaaactgccagcaaaccccttgaaatcatccattcggatgtgtggggtccttctcctattctatcaaaaa

SEQ ID NO: 264316 - DNA, 805 bp, Cannabis indica
aactattggttagctttcacgaagtgttgtaagaacataaataatacaattgagatcgaacctaaccatctcaggattaagatctattgacctaagataaattagtgatagcagtccaatctgatgtatgttaaaaaactttatcactcattaaatatgtaatatcaatattcaactccatagataaatatattacatataattataagtgtaaaaaacatagatctaaagaatacttttgttgattcaaagagaagaaaccaaatagcagaaacgtaccttaatccatagatagtgataatcttaatccatcttgtaaagataatctctgtggtgattttgtaactcatcttgaattatggtgtaatgtcaaagtaaggtccatgcttagtttgctacatataagttttatgtttggaattttgtaattgggctatttttggtgaagcttttcttttaaaagctataataaagtaaatttagttttcaacatacatataaatttagatttctatatagatgcaaaatatttgttattagtttacaaatttatttttaaggatttttctttaattggacaatttaagataaggatgaatattttttttttggattgttttaagtttaaatatgacatactaaaaataaaatactaaagtttgtctttcattctaaattgattgattgaaatatgatgtcgccaaagcaatttctcttgcgtagattgctcatgaggaatgttagaggtttgtgtgtgtatttttcatgtaagtattgatcggcccaaaggaaggttatacttatt

SEQ ID NO: 264317 - DNA, 1899 bp, Cannabis indica
gggcatattctcagttttcatcatagataaacgtaaaaatatttttgggaatcgaacggagtcatctggtggccaaaaactggacccaacgcctaggttgacatctggcactaggcccaacacctaggttgatattttgtcaacctgggctatttccaatcattttcccgaaaagtattctaggcattttttccgtcataaaaaatgaagataaagtgatctcatggagcaaacgagatttccaaggagccaaaacagggccccaacacctaggttgacatgacactgggccctgccctcaagttgacatgcaacctggttcgcttgtttctgctcctcaaacacaaattctgctttgggaattcttcttaaaatggtaaaaaaggggtgggagaccttgttcgaaatcttgaatgtcattgaagtattaaaacaagcctcgagaaggattccgagaagcacccagcacccaggttgacacctgacctagtgcgttgggttctacttatcagaattcgatttcatttcgagcattcaattatttgttcttagtaaacgagagctgcaacttgtaataggataaattcacagtttaatatttcaccctttcaacaaggtagaatatcgggaaaatcggagaattttgagtcttcctgatttcacaaaacagcgacatctacgagaacttgtgaacagcttcaccagaaaattgaatttgactaagtggtgtcaacacatcacttagacatcaaaaaatacaagtttgggagattttggtactcacttggcgtccaggttgacgtcatgtcaacttgggcgctgggtgtcagcctagacgcatggtgttgaattaccttcaatagaatggtcataactcactcaatagacgcgattcaactgtgattcgaaaatatttcaaagatacatcaagtcatgtctcccacccacacagaaaattttgaatatttctggtccaaaattatcctcaacaaagttgagatttttccaacacataacccgaaaatgatccaatgggcgagattaaaaatctaaatattgacaattttcaccaagagtcaatttctaccatttgatcatcatgaatcatcatcaatggtcaagatcagcccaaactaattttttttcatattttttgtatttattaattattattttaaaaggttctcctttcttataaaatgagagctcctttagctcattattcacattctgaaaagtccccataaggttagataatctttctctactctagaatttgagcccgaacacttagaaaaattgtttgtaattctcatagaataaaaactcaaagtagatgtagcttcatcactatcacctcacagggaatagactactataaatttgttgtgtctctcttacttatacttaaatatcattacattcttgccagcatagcgagcgtgtgatcagatatctgtgtctagatttttgcgttaatagtaatgatgatcaatagtagatcaccctaaaccttgagtgattatgaactcatgttcatgttattagtttctttgattctgtaacgccctaacaattaggcacgctatgatttcctaatgaacttaacctaaccccgctaaaccaggattactagaataagagcggaatttaaactttaaattatttacgaaatgaaaacataacttataactatttaattttacaaaccattccaaaatattacacacgttttgggatcccgtaaaatttttcacaaaacaatacaagttacttttatatgccgacctaaacggcaaaataagagaatacaaagtacatcaactggtagacccaacccacgttatctagtatggcctgaacatgtacaatccaccgccaagtcctcgatctcatggc

SEQ ID NO: 264318 - DNA, 1557 bp, Cannabis indica
tttcacggaccattaggacggtaggcgagcaacaacgttgtaacagtgcctagcctccccttggtttccttctcacgattcctatcccagcttctcgaatggggaatttcagacacaagtgccttattaacgtgactgcaccaaaatccaccagggccggtccgccgaggattgcattataagctgttgggcagtccaccaccacaaatgtgcagtatttgaaagtgcttggggtgtgtccaggcacaagctgactgggagcctcacttttcccatttgggataagtgttgttccattaaaccccatgagctgggaaccgcttggtgaaagatctcagtctgttaggcctattgcagtgaaggcctctttgaataataaattcaccgaacttccgttgtcggttaggactctggccacaatcttattggcaatgggagtctctatgaccaaggggtcatgatgaagaaaacgcactgccttagcgtcctcttctgtgaatgtaatgggctggtccattaaccggggtctttgagctgggagttgagtaacctcccaaacctcatcgtgtttcacggcccctgcgtaatgtttgagctccttacgggtagttcccccgatgtgaggtccttccgagatcatcgccactctcccgttgggtcttggtggtaggccaggaatatgctgggcatctccggggggagcaactggggccaacgctcctgctacaccccctggtgctccttgaggcaaagctcctgctgcctgaaccggattgagatgaggcaaccggtttttgatccactcgtagagatgccccaatcggatcaagttttgatctcgtccttgagatttttgcattcattggtgttgtgcccaatgtcgttgtggtactcgcatcttttattggggtccctccgggagctgtctttgtataagggaggcggtctccggtagtgcgtgttttgcctggtagcaaaatacacacgctcttgggagtctgttagctccgtgtactgggtatattggggagtatacccccttttctgtcgcttatcctacgtccggttgctgccgtttgaggaccttttcctccgagaaccttgagaaggtccggctaaacttgtggccagagcggaatgcgacggggcttgtccattcatccccgagggatttccaaggtgagaagatgcgggggccaaggcctggccttgactatatctgggagtagcagaaaattgtatgccgctcatcggtggagcggctgctggcaaggttcctgggagctgagctccgggtacatatcctgctatcccggtgggatagtatcccccataggccactatttgggtctcttccaggttgatgtatttttggactctcttctggagatcttgaaggttggaagatccttcttgttgtaactcgttccagaatggagtccctgtacggatgcccgcttgaagaagtgcgagctgttgtccgtcatcgactttcttagtttttgaggcttcttccttgaacctctttatgaaattcttcaatgtctccgtgggcag

SEQ ID NO: 264319 - DNA, 544 bp, Cannabis indica
agacaatagtttgccccttgtggaactctttgtaaagacaaatttgagaagttagatggccaactttgctttttctttatttaatcttttaatgcttcatacttttatgtttgaacttcaatatgtagttgtttgcttgcgtttcattcacaatttaaacaatcatattttgatcatgcacaaagtactttaggggtttccatttctcatatatctctttgacgttaagtagttaatagcctactttacgcgcgagcaatttatcatctgcgcaacactcgattcacgagcagtcattgattccgcctcgcaataatcagtagtaatctgtttcaagcaaacttgaatatatttttaatgaccttgtcactttgtatatatttttattgcttacatgaatagttagatcttctaaccacacgttaggtttaagtacttttttcaagacacattgatgtctcgtttaatactttcctttagtgcaagccgttagtattcagctttaaatgcgagttatgagctagttatatctcatttataactt

SEQ ID NO: 264320 - DNA, 497 bp, Cannabis indica
actatattttgcaattcaatcctataaatgccaaaacttatttaataattataattaattataaaataaaatattcatttatattatttattaattagaccatacaaagtctcttaattaataaattgatcccaaaatctattttcttcacaatctagcccatgcttagtgaaaattcttaaataagacatagtctaattttagatttataattgattaattaaaatcaattaactgagtctgcaagtagtatctcaactagtgaggggaccatggacctatataaccgagctttcaataagtagatctagaattcaccaagtaaattccctaacttattaatttcgccttgcgccactatagatttagaattgaataacactctcaattatatagaacgctctatatttaccgcaatatagatacgttatgattatctattgttacaatcctaatagtcaaagatcctctatagatgatctacactaattaggaac

SEQ ID NO: 264321 - DNA, 933 bp, Cannabis indica
gagctcatcttttagcctttttcaaggcctgatctctgaaatcccttagctccttcacctccacagtcaggttggctgtcgactgcaagtctgcctgatgcaactcctctaaggacttcaccttggcagccatctcatccatagcttccctggcttcccgaagctcgcgtttggccctggctgcggcctcgccctccaccttcaacgcctcctggtgcctcgcctccgcctcagcctccctttgcttggcctcctctcggaactttgcctctgcaagggcctccctttgttgagcctcctcctggaacgcccgcctttcggcagacaagtcttgcaggatcctcacggcctcatctatgcccccaaattcggacatgacgaagccatggtcgatcagggtcttggaaaggcggctggtctcggtagtaatctgaaaaaagaaacaagagtgagattagatgccttagacaaaatatcaaaggagggaataaattacaagtactcaccgcggccatggtagagctgatgtcttggacttggtaaatagagttcaaggaggcacaagccgcatatcttttggctgggaactaagtcaggtgggagacaaactggctggtcatctccgaggcaaagggagctagggtgggcccaacaaagcgattgaactaatccgttaaagggtccatgttcaggtcccaaggatttcagaaggcgtcctcgtgtaaagtgttctgctactcttcccgcagaatcttctttaaggcctccacctcagcgtgcccccgactatactagtccagggcgtagttgtgcttggcgacttggagattttacctctcctcatccgcaggaaccggggtcagcacaatgccgtgcgacacagtgtattcctccacttcagaaggaatcccggagtcgttgctcaccgccgga

SEQ ID NO: 264322 - DNA, 820 bp, Cannabis indica
aagtttcttcctcctttttgagcggagccacttgctcttcctcagcctcatcttcaggatccaaaggctcatgagcatactgtttggcccttgcacctcccttcaacttagcttcacacttaagtttaataagctcatcctcctgatgagctcccttagcccgtccagtgctggatttcctcttcttctccttaacaggccggggaatgaaatccttcaggtaaagcccgtactccacagtggtcaacaaagtgatattccgggcagcaccccacagcagagcaagcttctgagctctatcccagagggcaagtgtgaagggagggcggtgatatacagggatctgctggaaccgagtgtaggtggtgcctatgccttccaccataaaatactcatcaataaaatgcccaatttcgctaacggccttatccccagtgcccgtcaacaacttgtagtctagttgagagaagtagaagtaccccgaccttccttgcttcggggtagacttcaagtcaaaaaaccaactaacctcatggggagaaggcatatcccatttctgggaggcgtagagaatgaattgggcagacatatacttattgccattaggagtgaattgggtcggaaagaggcagaagaaatctgcgacattcttaaagtacgggttcaaaggcagtaatgccccttgtttagcatgaggaccaggcacacatccccctctcagggtttgtggctctattgttataagcgagaatgtaacagtctaactcgcccaggtaaccatcttgatcgagatcctgtaagcgtgcctcagtgaccttgg

SEQ ID NO: 264323 - DNA, 3239 bp, Cannabis indica
ttttaatatataaagatatctatttagaccattattatagagcactaaagtatatagtattactatgaagtgatgtcatataattaattaacaattctgtataatttaatattacacatttaaaaatgttaggtatcatagataccctttagcatttctcatccatttaatatcaaaaatctctcattttgtttatttagttactacaaaaaccacttcagtgacccactgccactagcgagagtatacggcgcaacaacttccaaagcgtctctgcctttttcaacatgataattatacaaacttattcttctgacttcttgaattcccacactaaatcaaatatataaacatatcattaatctttattcaacaccgctttgaatcaatacgtataggtgagacttgagagactaatcgacacaattacaaagatggtggtggcagtgtacttagtttcatactctgatcagaccatagaagcaacagtcaccaacgaggcttccataatcgaatactggtggaacatcaatgtccttgactccattaatattgatcccaaaccacaaaagattataggtctcaactgcaaatggggtcttaataacattaacccaaaaagccacaaaatttctattatgcagttctgtgtaggcaccaagtgtctccttctccaactcaaccacataaacactttcgtcattactcgaattttgaagaggtttttcatgaccggttccaacaacatctttgtgggaattggagttgaagatgtcgtttctaatctacaacatgagtatggaattttatgttgtgatgatgaagatgagatgttaatggagagggtgattattgatgtgcgtagtttggctaaagaacgttacccttttagctttggtggaagatcggagtggattggcctcaaaacacttgcttatcaattggtcaagcttcctaggtccaaacaacgtaagaataataatgttgtttattcaactcttgattttgagtctttgaagcttgagaaggagattgttaagagtgcttgtattgatgtttatgtttcctatagaattggtcacaagctaattaaggaaatctaaatgtacgtttctgatttgatcgattccaagggtcgtcttttactctattaaactgatctttatttaaagtatcaattttagtagcttcaatgttacaaatttagattatgcagatatatatatatttatatatatatatttcaaatttctctatacattccgatgataatgacagtattttttttttttttatttatttacaataaatataggacttgaaaaaaaattaactagaaattgtttgctaggaccataattaactagaagttttaaggatataaaattgaacttttgaatatcaaattggtacatatatatgcggtatattagttcaggactaatacaataagagtattgttattagacattaatagtgcttattacttttagatatatcgctttacgattaactaataatatttcttaaaagttattatattaaattatataaaatttaatttttatttaatcaatattaatattgacacatagaaaatgctaggtattggtttcttttagcgtttcttatatgataatacttttttacaattttttttttttgataaatacaattttattgttttgacaatagttaacaaatattttagttggtcaaaccatgtcaggctgacacatttgttttacttgccacaaataaaccaaaagtcttaaaaaagaaaaaaaaaacagatatattgccacacaacattgtgcatgagagaatagattatctttacaaatattatagctagctcacgtgtttaaaacaaaacggtttttaaggattagctttttaattataagcaaatatatatcattttccgttagttatttgataagaccatatggtggttttcaccgtttttatcatggctttctttttcattgtcttttggtctttttggttattatatccagttaattatgactaactcacacagctgcacacgaatggtgatgatcaggtttctaaactctgaactcttctatatataaccttatttttattgagaagtatgacatagttttgtgagagaacaagctcttaatttttcacgtgttttaaattctataagcagggaataaagtaatcctataagtgaaactgaccatatggcacaaagagacaaagatcatcatcttgaaattgatctcgaaagtggaagaagaacaacctcatcatatgaagatcatcaaaatatgaaagcaattatattttcaaaagttctacgtggtgttttgagctttgttattggatcaatctataatcgtcgaaataggctgatcaatttacgtaccaatttggcaaaatctggctattgtaaggttaacaaatatgagaaggtcgagttagtaatagataacattaataagaaaataattgagaaagacacaagtatatatggtggtgatcaagaatgttcgtgtcataagaacaaaaatagtaaaatcaattcaaagaggccgccgaggcctccactagggccagcattagatgcttatgatcgaaagttggtgagagagattgtgcaacttcaactagccaagaaatcaaagagggcatccatggaaaagagaagaacaaaatcagataaggcatcatcttcatcatcaaaaaatagtgttaatagttgcttattcacaattattatcccaattgtgttcttcttaattgtgttaatgtttcggtgtaaaactccaagtttgtggtccattattggttttgaccaatttttacccttttataattaataccattggtgtatcttgagaccttgactctatgtattttattttattatagtgggaagtattacttaattaattttataattaatgaattaattctatatttcattattagtatatcttatcaccattttaatttgaatttagattatgttatttattttggagaatacaatctcgtacgtgatgatctaaaatgactttgtatttaaatttaggctagcttataatgttagacttttatttgggcttacattaaattttattggttttattaaaacttgggttgattggatagttctttgctgtgttagcccatgttgttggtgatcaattgttaatgggcttagcatctgtgagtaaagtctaggtgaagcagaagtgtgg

SEQ ID NO: 264324 - DNA, 1101 bp, Cannabis indica
attttgtgtcataatttttttttataaattttgtaacatgtattttttttttgcaatcttccatagttccacgacttttacttccagtgtctgaacattacactggtcgtgttacttggcgaggcagtagttggtattaccccaaagtaaaagccaaatttgtggaaatgcaattgttggaaagggtaaatgaggaatcccctttcaagaatttttttgagagagagccattagcgttttcgggtgctcttatccatcagctcttcatgcataagatcaaatcagatatggatgatgaggtgcatttttacattgcaaagaagagatgccgattcggccgagctgagtttgccttagtgactgggcttaatttgttatgtggaccgactgaggctgaggttgacgagaaggcgacgtcaaaccgtttgatagtagaatattttaatggggatccatctatcagcattggtcgactgcacaacgtctttgagagttgcactaagaaggatgatgtttataagttgggtttggtgttgttcgtgatgggtgttctgactgggaaagaagagaagaccctggttcccccatttatcattagaatggttgaggacctcccttttttctacgattactagtgggggaaaatttctttcaacaagttgaaagagacttggagtaaggactttgtagaaaagaaaaagcatatggataagaagattgaaaagggaacgactcagaaggagtcaaagtattcggcctatggatatgctgtagcattgcagtattgggcttatgagtccatcctcgagcttgctgagaaattcgcaatcagaaaatcgcatcgccttccccgaatggtgaactgggagagtaaggatgccccactcgggaaagaggaagtcatcagattatttgcaaaaaaagtgagtttgttaattcattgcatttgcttacgttcatttatttattttattttaatttaagtctaagaatcaatttgttataatttgcagttgacagtgtactcagttttatgtccacggagtaatgaggccgagtttttgagccacgtcattggaggtgaggcgcctctatttgtgg

SEQ ID NO: 264325 - DNA, 700 bp, Cannabis indica
ctcgatggatcgctcaaataactgtaactgtctatgacgatatgctctcaaacttactcgatcgttgtagatcaagactaagcgacacactgtggagtaaatcttacacacgtaccctaattagggagtattttgaaaagatcatacggtccgaccaagttgcaaaaactagctactcggaggatcgctcaaataactgtaactgtctatgatggtatgctctcaaacttactcaatcgttgtggatcaagacttagcgacacactgtggagtaaaccttacacgcgtaccctaattagggggtattttgaaacgatcatacggtccgaccaagttgcaaaaactagttactcagaggatcgctcaaataactgtaactgtctatgatggtatgctgtcaaacttactcgatcgttgtggatcaaaacttagcgacacactatggagtaaattttatatgcttaccctaataagagggtattttggaacgatcgtatagtctgatcaggtagcaaaaactagctactcggtggatcgctcaaataactataattgtctatgacgatatgctctcaaacttactcgattgtggtagatcaagactgagaggcacattgtggagtaaatcttacatgcgtaacctaataagggagtatttcaaaatgatcgtacagtctgatcaagtagcagaaactagcta

SEQ ID NO: 264326 - DNA, 413 bp, Cannabis indica
tttatttatttttttttatttttttttatattaaagttttattgtctagctttttgggcatttcttttttatgttagtcataagtcataacgttaatgttgcggcctatagattggtttagcatgcttaggatagacaataagtttttgtagatggaaggaatctcaatttggcctttgagcacttttttctccaacttataacggttacccttacaaaaatatatataatgacaattttgttctttaaaatatatataatgacaattttgttctttaaaatatgttttacaaaactaggcggaaactacgtgcaaagcacgttgtgtttcattataagttcaattttttttacattaagatgtttaaatattttaaagtattacattaaatatctaattcataaaatattag

SEQ ID NO: 264327 - DNA, 671 bp, Cannabis indica
tacttatatatatgtatatctcaattccaagtagtcaaactttatccccacgttgcagaaaatgggtgggtcacaatgcatcatcgactacacttgatccaataacaagctcttcaatcattacttttgggttaactaatctatagtgcattgttagatgtcggaaatgtacactcctctacccatcccatgatgctacataactacatgttactacttattatcacgctctcatgtgtcttagtgtcttggacgattttatgacagcttttgcattactcctatattatcaacttaataatactatgtatatatattattactttgggcatatagaatattatatttggagagaattgaaaattcgctgaaaatggtagattttgtgaaatcataatgattgaatcaaatgtaggtggtggggtttgtcgatactagagcggctttaaaaagactactaataaaataatatttcgttattttgaaaaaaaaataactattttgttcgatgatcgatcatcacctactcccacgctatatatatctatgtccacaataaataaaaatcatgtaagagtaaacaaaacgaatgtgtatgtatgagcttcttctataatatctatattttttttgttagtttattcctaactcggtggactcatctttaatcc

SEQ ID NO: 264328 - DNA, 774 bp, Cannabis indica
tcattctaatgctacttcaactgacctgcctcaggttcgctctctagtgccaccaaacattgattcaactaaggagagtgttcctctactcatcttatcaaagtctagtcgctctatcattcgtcctactcctcttgaggactatatttgtgagtactctgctgcttatcctatttctctctttatcccatatgataaattttctccatatttttgagctgctatcttaagtgctaattcagtttgaaaccgacaactttcctccaaacctcaaaaatgcccgagtggctacaggctatggacaatgaaatcgatgcacttctaggaaataaaacttgaattgttatctctcttcctcgtggccaacacttcattagctgcaagtgggtttataagattaaacataaatttaatggtgagattgaatggtataaagctcatttagtagccaaagactaccatcaacaactaggtatcgattacctagaaaaaaattctcccgtaactaagttcaatactttaaaagttcttcttgcccttgcttccattaatgattggcaattatagcaaatagacattaataatatttttctccatggcgatttatacaaacaagtttacatctctcttcctctaggatacacgccaaagggggagcttcctttgaatgttgagtgtaagttggacagagcttatatggtcttaaacaagcatctcgttataagtatgccaaacttagctccactttacatagtgatgatttcacccaatcat

SEQ ID NO: 264329 - DNA, 637 bp, Cannabis indica
gtaatgggttttatttagggcacaaaacccaacacgttccacttaggttggcccacatacttgactttggacttgaggtaagaaaagtattaatcaccgtatatagttaacgttatgattgttacaatctcaattatgatcgagggaaaatatgaaacgattattatcgttgtgactcgattatgatcgagggaaaatatgaaatgattatcatcgttgtgactcaattatgatcgaggaaaaatatgaagcgattatcatcgttgtgactcgattatgatcgagggaaaatatgaaaggattatcattgttgtgactcgattatgatcgagaaaaataatatgaaacgattatcatcgttgtgactcgattatgatcgagggaaatggtatgaaacgattattatcgttgtgacttgattatgattgagtaaaagaaacggtcattaccgttatgagtaattactcttgaaactgcgaataggtttcttacttatcgtttgctgtatcgggcaacgatagtgacatacataactcgtggttagcgagtggtacgggtactttatgaagtaccgggattgtgtgattgcaattttgagaaattgattaggcatatattatgtgataggttgtaatca

SEQ ID NO: 264330 - DNA, 4284 bp, Cannabis indica
ttttttctttattattcttttgttatccatagagaaaagctaaacaggttccaaatatgattttctaattattttatctctttaatttgttggtactattgtcatttttgctgatattaaatactgttgatgttttattttgggtgtaaatttgcgtcattttcaggaaccaagcagtgtcgaaaagattatggaagtcgatgagcacattggatgtgccatgagtggattgattgctgatgcccggacacttgttgaacatgctcgggtggaaactcaggtgattttgttgctcatgttcattatcgtagtatgtgttattcttattcttgttttttatattgatgtttgaacttcaatgtttgcagaatcatagattctcatatggtgagccaatgactgtagagtccacaacgcaggctctttgtgatttggctctgcggtttggtgagggtgatgaagaatccatggtaataatgattcagaaattattattattattatctatgttctcattcttttctttgtttttttcaaccttttgcttagttttttaaattttattttgggcatctctagcttgttgctgctgatgtttttggccatcttcaatgcctattgtcgtattttgttgcaattcaaatcaaccacctgctttaagctttagtgttttattcttatagttgaaccatttaatcaatcatcaaaatagtttgcttttttggtttattctgcttgattgtttagttggttcagtttctgattatgatttttccagttgtacctgttgttatttgtggttgtaagagaactgttaagcaaacaacatcacttgttgtgagatacttagtaaaagtttagtttgcatagttatatgttgtgatctctggcaaagctcagtcttatgaaaaattcaaatcataacggtcaagcttttgatccaaaactcgtttttaatgtgtgttggtgtactcaaatctgtgctttatatcaagttcttgtgaatgtgaagtatgccacttgaggatagctcaagtgattaggtgagatagtgtgtgtgtttttgagtggtagttggttcaagcctgtgaaccccataaatatcttatttaaaaaagaaaaaaaggtagaaaataaatctgttatgctgctcttcagagtcattaagactaaaaaatggtcctgtgtagtttcctttttaaaataataaattaattaaataattcaaatgaagaccctacaacttgttctttttatgtttgctaatatgaatttttcttcttcttaatatagactctaatgtggtttattgaaaccatttttctatcttttctaatctgttactaaattatcacatgcagtctcgtccttttggagtttctcttctcattgctggtcacgatgagaatggcccgagcttgtaagtgtattgatatccatagctgtaacctgtaacctgtaacgattattgaattattaagctgtaattgcttttaaagctcaacgttaggaaaaaattgatgtagggaatcacaaaattttcaaaagaaagaaaatatcgaaggagaaaacaatgtgtttcaaacatgacaccatagaatgtatgagtttttttttagttgaagtaagagtcacaaaggttttatttgtacctgtagatactataccgatccatctggaacattttggcaatgcaatgcaaaggccataggatctggttcagaaggagcagacagctctctgcaagagcaattcaacaaggtaaccttatagactgacccttaatgcaactcaataatgtacttgtgacgaggaaacactttttcggtgacattttgattgttttgctacgtttgaagaagctttggttgtgtttgttgattttgtttttaaaagactaaatgctggataattttaaacccgaaaaatattatgagaagaccccgttggagaagatcaagatgctatatctgcaaaccgaacaagaatattagaaataaaagttggagaagatcaaacgatagaaccccgttgagtcatttttttccaatttcactaattactaattaagcgaggattttgctaaaatatagtattttgattttggcaggacctaactctaaaggaggctgagaccattgctctttctattctcaaacaagtcatggaagagaaggtaaaccattatatttggtatcaacttcattttactacctttttcgttgaccttaatttaagacttaatcgactttgattctggcaaaacaggtgacaccaaacaatgttgacattgcgaaggtggctccgacatatcatctgtacacaccttctgaggtagaagccgtcattactcgcctataagttctggaatatcttctgcttaccgacaatcgcttctctaaatttgttgtctttgcttccctaaatttctgggaatggtgatgaggatgatttgcctttgtttctgattggtgttcttggttgttggatatgatgcaaaggcttcaaaaattgctttcaagttagaaaattatacattattctggatctttagaacaattaacattttgatacgattatatgttatccagtgaaaaaaaatcaaaccttgaacaagtttgtgttttaaacataatatttacttaaacattgaaaacaactatagaaaaagtatgagggtcaccaaagtttttgttatttaccatcatactaattataaaatctattttttaacccaacaatttacaatatttatattattttagaaaatatctatatttaagtggttgtataaaggagccaacccaactatagctattttaggaccagagtatttagttgttgagagattgaattaaatgtgagtgtacttgatatattgtgtgccacatactacatttatatataaagatttaataattatgatatggttttactttaaccatataaatagattgtattttatatatgatggtattctttaaatgtaagtgaaagaaaaaattttgaaaatgttaatttgatatatttttttaaataaataaataaataattgctctgatacctaaaaaaatttactctcatacattaaagaaaatgtaatttacattatgaacatctcaaacacatatatttagttatcgatgtgatatcttaactactcatatttatgtgtacatgttgataaaaataataggaaatgcttaataaaaaatcttcacatatttaattttgtgaaaaatgaaataagattttttttttaatgataggtgacgttactaaaattaattggtcaactattacgatatttaaaattaattcagaatactctgtcactgaatttttttttcgaataaagccacatgtatagaaatggttgagccaacctattaacactcctcgttgaaaatggtcatagatatggtattagcattactacattgctcaatccaaatgctcaaattcctttcccaagttaacaaaaaaaaaaaaaaaaaaaaatacctcgttgaaaatccttatctccatacatcagtatacacgttgagaaaacaaaaacagaatcctctcacatttaatttctggacaactggattactttttctttcaaaataaacgttactacattaaattgatcatttatatcatattaaaaaaaataattaaactacagttgaatctgtgtatatatatactttcttgaagcataaacacagaacatctataaccagaattacagtgaaactaatctcttgcttcaaatagcgagtgtttgatatggaagagcataaatcatttatgaagaaaaccattaactcaatcgtccactttattaaggtattttcctcttcctcttaagacttgtattttataagaaaatttaagtgtaactgtaattttagattattcatttcataatccaagtagtgttatttcttccaatcaagaatgcatgtgccatggcatatcccattattattatcatgattttattctatttcttcatataattttattgtcaccatctaaaatcatcttttgggtgtttgttttgaatttttttgaggaacaaaatggtttaaaccacaatcatttttaagttggtaccagaacaaattttgggtgatatctcattatttcgttttattttttaatttttaagttacttatcaatctaaaattataatggtcggaataaccaccataattactttcagtatttattttatttaaaataaaattcgaaactaattaataataactctgaaacaaatttattttaca

SEQ ID NO: 264331 - DNA, 577 bp, Cannabis indica
tatggtaaaaagtgtgagatttacacttgaccacaaaagtttgaaatactttttaaaactcaaaaagaatctgaatatgagacaacgacgatggctagagttagtcaaagattacgactgtgaaatcctctaccatcctggcaaagcaaacgtagtggcagatgcacttagccggaaaggcccagagcaggtttatgagttgaaagaaatctctccaagatttgcttaggatatggccaaggctgacattgagtttgtagtcaggaagttggcaaatatttcattgcagtctaatttactggaaagaataacgattggccaacagaatgatctcgaattgattgaactcagaaagaaagttgagattggtgctacaaaggatttcactgtgactccaagtggactactaagatataagggtagaatttgtgttccggcagatgatcagatcagaagggaaatccttgatgagatccatactactccggtattcccctacaccccagggacaacaaagatgtatcatgacaccaaggcaatctattggtggctgagaatgaagagtgatatgttgaat

SEQ ID NO: 264332 - DNA, 1100 bp, Cannabis indica
ggtaagggcaaggctaaggtgagtagccgtgagagcgagtagatggagattgtacatgtcagggcagttaggcctagagcgtacgatcttcgggacatcaggtcttatttctatagtcactaggcgacaaacttttgtatatgcatagtgaaactttagtaaatgattttgtaaacgggatcccagaattatatatgtatgttattttatgtttgcaagtaattaagcaaattttttattaatcatgattttcaataaactcgttgattagcaatgagctgcacagtcagttaaaaaaatcacgataacacgcctaaaatagttagggtgttacactctatgtattccatgatataaatatgctatgagttatccatttgttataatcttaataatcaatgatcctctatagatgatttacattgagtagggataaatttatccttacacccttcaatgtattttatccttaaaacacttagctacctataaatgatatttcagtgaactaatataatcactaaaatgagcgctctatcatttatttctattaagccaagcacgaaggaaatcatcgtttcacttcaatgtctggatagaagctatagattcggtatctatgattagcgctcccactcaattgaactaccatgtccttaatctatatgtcacgagaagatccattggtcgactttaaccaacatattgaagaatacaaataatacaattgaaccagaacctaaccatctcaagattgagatcattaagatcaactaagggatattgtattgaatagatattactgtaagtttataatatttaatccaagttcaatattggtcccttacaatggtgttaacgcagaattttcgttaaccaaatttgagcctcacagtagtgatttcacacagaaaaaataaaagctgttgaaatgaaaatatgagcacagggtttttttacgtggtcttgcagttaaaattctgcatagtccatgagtcaatcttattcagatttgtgattgtttttcagggcctctcttgtatgagttttttcgtccccttttttgatcttctttgtcactattcataattacatagtgg

SEQ ID NO: 264333 - DNA, 1198 bp, Cannabis indica
ctttacatcattgtctaataagataatccttttttttattattgtctaataagacaatattttttacattacataatagtaatcaccgtattttaatcatgatatcaatcgattcacaatcgataatagttgtgtctcaacataacatgctatgtagcacaaatgtacttttcttatctttaatccagattcatacatgtcggccaactcaagtggagaaacacccaaaaatcttggtcctatgtcacaacgacagtaagctagtaagtgtctattccaaaacactgcctaatacttacataaaataatctaggattttctatcgaacctcttggtaagaacgccctaaaataaaatacatatttggctctaaaacatataccatattgtagagctcgttgcaagctttgaaacaatatataaaaggtctacaatggacactcgagtgaaaagttatggccagaatctaaaattcagcatttctcgaaaactgaccaaacaaaattctggttggtaccattcggaattcggattcgtaccatccggaattctggttctgaacaatttgaaacacaaattttctcaacttaaaaccctccaaactaactccaaatctaaccaaataattccaaacttcactaaacatttatataacatccataaaaaatccaacgaaacagaactcaaaatcatgctcttaatgaaaagtgtcattataagcttaagctttgagctttaaaaactcaaagttgacttcacctctctataacattaaaacctatcaaatgagcattcaaaacacttctaatctaacccagaaacaaaaccaaaaacttacttaaaccccaacaactatagagccaaagtcaaccaccaacctaaagcttttcatgaaagaaagaaagtcaaaacatacctcaaacttctacttcaacttagcttaatcctaatagctattagaggtgcagaggagctgattcttgacagaagaaatcaaagaaattggccccttcttgtttggttttggctagcttgagagaagaaagagaaagagaggtgaagaggggttttcttttgtttttttcaagcttatcatatatatatatacatgtaaactttagttataataataataataatatatacacgtaaactttagttaaaaaaatattttatcatttcttaaccactaagaaat

SEQ ID NO: 264334 - DNA, 1294 bp, Cannabis indica
aaaaattaaaaccagtttcgttaagaacataatgaaaaaaaatacaatgcaaaaaatataatctaaaaatgacaccaattataaaactagtttccaacatataaatttatatgaatacttaatactctaatttctaacttcatactctattttgacatttaatttcttacttgcttgataaaaaatcataattgatttgagcattcaatatgggataaatatctccaagaaaatcacaaactaaaacaagttttataaaaaaaaatattgtaaaaatgattccaactttaaaaactagtttcatcaacagtaaaataaactaattatttcactaaaagcagcaaaaaaaataaaataaaatcagtttcatcaacatcatactgaaaaaaaaaatacaatgcaaaaaattataatctaaaaatgatacaaactttaaaaatcagtttcatcaattattaaaagaagcagaaggaaaaaaaaaatagtttcatcaacaagatgatgaaaaaaattataatctaaaaacgatactaactttagaaatcagtttcattaacattaaaaaaaaactcattatttcattaaaagaggcagaaaaaaataaatttcatcaacaacataatgaaaaatacacaatgcctaataaccaaactttaaaacgataataattttaaaatccaattttaaacatataaattttatatcaatatctaataattaaacttctaactattttggttaacttcattctcgaacatacaatatagagcaaaaataataaaaagaatcagaaactagaatgagagaggaaaaagaaaacaaagaaaatttaagagacaaaagtagaataaaaaccacaaagaataactaaaaaaatagaagaggaaaagaaatcatatataaaaaataataaaaatagaggtggggttaaaattatacactctaataatcaaataatactctaagcaaacacaaaatccactaaaaatattagagtaaaaagaaaagatagagaaataaaaatcctaaaatgcaaatgtaaaataaaaaataaaaaaaaaaagataaaaccaattgggctagaaacaaaaacaataaaatttgagtttggatattagatttacaaaaatgtggcatatcaaataccataaaaaaatttaaatatgaaaaaatgtcataggagagtagcaaatttatataaatgccatatttttgtaactttagtatcaaatcccatatttcatgtaattttcactaaatcaactgaatgagtctgcaagcagtattatctcaa

SEQ ID NO: 264335 - DNA, 833 bp, Cannabis indica
acattcataggagccaccacttttccaaataaacccaaagtagataaagctttcagagaagattcactgggggtcaaagagatagtggtttcaagacaagtaaagtaaagtattttcctttaagagggttggtggcaataatggcctccataactacccgacagcaaaagacaagagaaagtagacaagagagggaatccccaaggtcaaaggcaaccccacacaacaaaaaaaggcacactcagaagaaaatacgagactaaaagaccaaacaaagaatcccaaccacccttaaaaacagaaccaaaagacaacacaacacctcaaacagagaatagaccagaagaaaacacactcaaagcataaaaagatcctgaagcaaagagtaaaaagaccactaaaaacaacacacacacacacagtaacagtagagaattagggataaaaggcaaaaggtaaaaggaaatgagactcaaaaaaagcaaccaaaagaataccaacaccaagggagaaggaatagtagatgaccattccttttccataatcacgcgtctgaagctgattaacttattttagatttttttagagttccatataaatttatttatttatttatttttaaaatattttattctttaaaatctctaaaaataattaaaataatatataatgtatttttcaataaagattcataataaaataaataaataagattttatgtattaaatttaggctaattagaatttttgtcctctgaactttgacatgtaacaaatcatgtcccctgaacttttaaggtcgttaaaaatgctcattgaactattgagattgtt

SEQ ID NO: 264336 - DNA, 2581 bp, Cannabis indica
agttaattatattttttttaaaaaaagtttgtcaaaaattgagctcgggcactactattttgtactattttaaaaaaataaatagtctaatttattatttaacaaaataaatggttcaatcgataatttttgcgtaaaacataaaatacaaaatagtattgacgttttttttttttttttttatatggtaatgttaaattatagtcacaaataacctcatatgtaccatttcagagaaaagaaactgagttgtttagggtacaaaaattaaggttaatattagtgcacttgaaggatactaaaagtttaggatactgtttcaagacttgttgttcatgcaagttattaaaaagaaaaagaagaaatttgttatttatataaaagtttcaactttaagaaactcggttctcaaaatgataggcaagttgcaaatttgaacactaaacaaatgattatataaaaacgtaaatcatgaaaaacagtattaattcaatggaaaagtagaaaaagcaagcaaccacttaatttagtgtcaagttatttgatagttagattaggattatgttgacaagaaaactgagttgtggtgtgatgagattaaactatagagaaatgacatcctttttgtacaataactactttcattgaagcctaaagaaagctatgagatgatcataaacaacatccttagcattttgtcccattacataatcagcatgggcataatcttttgtgtactgaaccacaagcttatcttggtcgtgttctttgagactgtccagcaaaagccttacatctcttgtatcagagagagcatctctccctccatagctgacaaagagaggaaggtcatttggaatgctggtcttgtagactggtggattagactgcccataatgtttccagttctcatcttcggttccatagttaaacatcgtaatcgttccatctcttatcactatttcaatcaagatagatccacaccaatcaaattagtctctccatcagatcctaaacagtctttgggccttctaagcttattgagaattgttcttagtacttgtctgaaatgttgcttatattttatgtttaaaagtatttacaatggttgttcttggttttatctaaattaaaactaacttgattaaaagatcttgaagtagaacttgcttactctgagccagatggatcatgtttttggtcgctgtcgactgaggctcgtggtctagaaaaatatctactatggaagaattcagacagcaatttactcctgtaggacgaagactcatgtcaaaattggacagtatattttcctgatcataactaaacaagaagattgggacaaaagtatactacctgtgaacgaagtcaacaaatcggtgcagtcaatgcctggtttcttgcagatatctctaataagtttcattacagcttctctatttattaccacagggaggagacagaaacagttggaaacatagttcagtcaaaatcaatcataatattgaaatagaatgcaagaaaaatactgtcgatttgagcacaagatcaaacaaacactcgtatgcataacgcacataaactactgaactttgcaaaacaaacataaggtgatgtatgtgattttactagatgacatttgtattgaagcacaagtaagtttcttaccacaaacatttttaaactgtatgtatgaacagaattgaggtgggaaactcaaggttctaaagctatgtcttaccctcttggcacaaattcgtgaatgcctaaccagtataacgtctgtttcaagataataataatagtagttaaaaaaaaatgttactctattggataactgaaataatttgaagagtgagtcattgtttcacctcagcaataaagttctcagcagcatttcttgcaaggggtgaggtcagctgacccacataagcaattgggctaagtagagcagctgatctcaacatacttaacagctgttcttttgagaaagaagccaaagccattaaagttccctacacaagaaatttcagagtttgatgttttagctattgtatgaagcaagttaatcccaaaagaaaacagactataacaaatcaccagtgaatgcccaacatagtgcaacttctgtcctgtttgatcatgcacataatggagtgtagctgggagatcataagccaccaattcatcccatgaccaattccaataagactaataataataaataaataaataaattatcaacaatgcaaagtaggaaccaaaaagggtaacaagaattgaggatggttattaggatgtcaagcaagaaaattaaccccatcatctggagtgagcgatacatggccacggctgtattttgttccgcgagtattggctatccatacatcaaatccattatctgccaagagcaatgccagagactggtgtggaggaagtagcaaccatgttactccatcctatgtaagtaagaacgattccaaaaagtgttgaattccatactactaaaatttgatcaaaagctgtttcattagctttaaaaaagaccaacaaaaaaaaaaacaaaaaaaaaaactaaacc

SEQ ID NO: 264337 - DNA, 546 bp, Cannabis indica
ctttcttacagctcactactataatcatattttgatagttgccgaaaatttcggtcaacaatatgttaagtgtaatttaaatacattattttaagttcaacaccacttcaatttactattttgaaatattttttaccaatattgtattattttataatattcactttcttttttcattcatagttcaatttttatatatttattttttttttgccaataatcataaacaaaatataaattttatataaatctatttagattattatttattatgatttctttgaggtttttaatattgttatttaatatctcattaggcatttagttgaagcaaatgacaatagatattttgtattttatttacataattttttagatttttgaatttagaaaattcaactaaaatagtttcaaatacctccattcattctcttcttaattctcccatttttttttttaattttctttattactttttaatttcttaaaaaaaacctcctaacaataataataataataataataataaataataataataataat

SEQ ID NO: 264338 - DNA, 548 bp, Cannabis indica
attggttgagttgggacaagcttacgacacataaagttaatggaggtatggggtttcgcgatgttcgagatttcaatatttcattacttgccaaacaagggtggcgactgttgtcttgtgaggatactctagctacaaaagtttttaaagctagatatttctcttctggtacgtttctcactgctactttaggcaataatccgagttaaatttggcgtactgtgttggaagctcaggatttggtttgctctagagcaaggaatttggttggtgatggctctcgagttagcatacttcatgagccatggcttatggacgatgttaatccttatattgagacatctagcccgagccttcaaggaaaaatggtgaatgcattgatgcaaattgataaattggaatgggataatgaagtaatttcagatgtgttaaatgatcgagacaagaagctggtttggcgtattcctcttacagtagctggtagggaggccgattggtattggctaaaagatgggaaaggcttgttttcggtcaagagtgcctatagg

SEQ ID NO: 264339 - DNA, 1022 bp, Cannabis indica
cagtcggttttagttttttcggagggtttattacccaaaaaaaaaactgaccgttcaatggtagttttaaccgttagcgattttttcggttttcggttccaatgatgttcagtatgtcggtttgaacgggttttttagttttctagattttatgctcaaccctaatgcagatctcgtcccaatctcttcagcttatgtcaatttcggagatcacgtgctatctataggagtcttttactttatcctactttacttgggtcatcggtcatatacctcatgagggttcctatcctaaagatagtccaccacacataagtcagtcttcaagggcaaaacataatctctcacaattgagaggtcgagtgagagtcgaaccctttactcaaacaagaaaggaggtcaatataagactcctatagaaatatcgtgttatgatttggtagttactaaaagcattcccaatagaaaaatgtaaaatatagctcattagctaaaattgtaaagaattaggtaaaattacacctccaacaagtgaggtaaatggtgagctaaaatagttcataactattcttttagctatatatggctcaatgagagcactctcatcagcttgtctactatattctttaaaatagttaactaaaatttcactttttttattttatcttgcactacattagcttctctattttttatttatttcatttaaatattatatttttattatattatattattttttaaaaatcaaataaattagtataataatatcacacatatattaaaaaatgttttaataaaactaatgttttaaatctctctctgggatgattttcgctgccagttgggatgattttcgttgccgacaaagtctcaccgtcaaaaatagaagtcacaggcctccccatcgttctctagagtcaaggcaaccataaccttcgttatgtttcaaacgacaaacttcgaggttcctaaagctccttttatcatttagtcacagttaagatctcgacgagtagaaa

SEQ ID NO: 264340 - DNA, 512 bp, Cannabis indica
ttccaaccactcccataaagttgaggatacgctcgatcactgtgagcccttgctcagccttcattacatcaagacctcccagaaacaccggaggtgcctgcttccgaaatctttcatacaacggctccatacggttgccaacaacaggttgttctgctggcaccgctggaactgcaacgacctgagcaacttgaggaggcacggcaggaggaccctgctgcctcaatctctaaatctcttcatcttgttggcggatccgatcttgcatttccgcaaatctttgctcccagtccgaaggagcttgtggtggacttacagggcgaccaccctaagctctgccacggccacaatcgcgaccacgaggattttggggattcctctgaccgcctcggtctcaaccatgttaccctgacttcgtgtatttcacggggcgtccaattataggacttagcctgcgatcccataagctaggcaagttagacagcgatcaaaacttaacaccgctcttgagg

SEQ ID NO: 264341 - DNA, 3766 bp, Cannabis indica
cttttttatttatttatttacacaatttttaaaatacaataaaataaaaatttgtctttttcggccaagttttgatgggctagattttgtaattgacaatggtgacgtatgttaccaacttaagctcctgcattttagcctctctaggttttagttttaccagtagataagtactggctactactgctgtggtactgaatatagtaggcattagtaggcctctctgtgaatgaatgatgtatagtacgatctcttacaccaccaataaatgcttgccacatcgttaccatcacacaaaatagatccaaaaactcactccaaaacctcaccagctcagcattaaatttataactattcttttgacaacgacttcatattacatatggtaaagtcgaatttataaattcttaactctagtagatcacccacttggttggttcgttaaaaactgtcccacttaaccctcccttttatagtatttaatgtgctcataaattttgtttactaaatttacagatcaacccttagagctagcagacgatatttgggggtcggctatctcatcgccgttcgatgatgatgaagccgaggactgtgatctggtctacatttcagaggttttacgagtttcgaactacatacaggaagactcagatattttcctattggtggagaagaatctgtatccgaacacctctaaaatctcaagactccaacgacgacttatcttcgataccataagtgagattctgaaccgaaatcggcagttgcctccgtggaagatcgtaactcctgtaaaatctcagtcggatcaagtgtcactgagggacatttggtctgaatttaggaaaattcgtgagagagaggagtcggaggatttgttcgaggtgatctgtagagttatgaagaaggatttggcgggtgacaccgttcatgggtggggtgattcccctattgaagtatcggaagctgttttggacattgaaagactgatattcaaggatctaatcggtgaaaccatcagagatctagcttcattttctgccatgagctattatcaatcttcaccctcgtgtaggaagttggtattttaaaaatagggtcagaatttaagaaaaaaaaatgaagagagtaattttggagcgttttttacttcacttcttttctactttgttagattagataattgcaaatcgcgtacgcttgtgaaattagtccaattttagctatgacatttgaaatttgtaaaaagagaacaaaaaaataatttagtgtttaattatatgtttggtgatggtccacaccgttacaacgaatggaagaagtaaaaggtccacgtgttcgtttgtggtttcagctttggagtccctaattagtttaaagagaaacccaaaagtttttgggtacttgcttgttagagtaaacaacaaattaggaaataattttttttttagaagaaattaggaaagaagtggcctgaaaagaaagacactattttgatactaaccactaaattgtaaatagttttagagtttgaaaaatgagcacaatgtaactaaaaacatgttttcaatgattgctaaaagtttccaagtgctacacatggtggaaaatgtgaacaaatatatttttgtcaacttgaatgctttcaccgtaataatccttaattttaaagtggttagttgtaacaatgagtttcgaaaagatggtatagaaatcacctatatattgtcactttcgtttcttttttcactttattctccgttataatgaattgtaccctcagtgggctcatatgttcactgcatgctttgtatttataagacaatttttcaataatgctatggtgaactttcacccatgtgtgtctgaagggttcaaactatggttggtgataagagaacttctacaccataaaagaaaatacgggctgtgcagtatgcaattatatgtgagcctgaggagtgccttttggttgtagctttctgggcctacaggtccattctgatcttcacttttccaatgtaagacagtgtggacttttaacccggtagaatggccatttttttttagtttatgagcccatctacatctctaaacacagctaccaatgtaggttttgcctgttttactagcaaagatttatgctgccatcgatgcatcgtaagtaattaaaaatatgaaaatgagtctacacccacgaacttgtcattagagttaaaaaatattgaggtctctcatattgtcccctcttaaggacacaagctttttttatttagtgtttgagatgtagattgatgatgctctagctagggcacatgccaatttcctttctttttcaattcaatggtgggggcattgtttaatgagggctagtaacttgtttcttacctgctcaagtgaacaaaaagatacaaataaaaaaccaaaaaaaaaaaacacaaaacaaatgaaagaaaatgtagttcataaattttgtccaatggtttggttgtgtcatgatcagtactgatgagtctttgtctccttcattggggtccccttagtcagatgtaaattttgactaggcaatgggagttcattattgggtgagtattagtagtgggtgtactaccccaatcaaagtaaagtaacccaggaaaatgtcatattatggtccttaggccaattgcattcataccatgtgaactggctctcctgcttctttatttcattacccttttccttcattttcaatagtgatttagtaatgtttaattttctttagctacaaactcagtaatttttctgtttattaattatgaatatttatataataataataatatagtgaaaagaattttttctattatttttatttttaagagtttcacggcaactaaaacatcacacgtacggctagataacagtcctaaagcaaatttaatttaattagttttttttaaaaaaaaattaaaaaattgatccctaacttcaataaataataataagtttggttacaagatcagaagatacaaatttaaattaaaaccattccaaacattctctttatccgctcctaatgctttttttcaagactatgagcgaaagtattgtttcccttgagaagataacaagctttacattagaaaaagatgataaataggatacaacatattgaattaagttagaaagagaagatctatctctccacttatgtttgattttaataacaagaacttcacaacctgatcaaattgaagttagagataacttaactgcaacacaccatttaagagtcctgagaagtgcatgagattcagcatgaatgagagatagagcattgtgcatagatgagtaacaaccagcaacaacatcacccctgccattttgaatgattgcaccaaaaccaagcttcattgaatccttgttgacacatgcatcaatacttagagcatattttccaggtggaggcaaaggagacaactctaaagctgaagcagagatgttatgagtatcaatattagagcttctttgagcatttaaataatcctgcagtaaagagacttctttacttaaactgtcaaaacctgctaaaaggaagtctttaatatcacaatgtatattattattgtaaaaatgagagaatctggcgtgattccaaatattaatcactctagaacactctagcagtgcatgagtgacgatatcaatgtgatttgagcaaagagagcagtacgggttgtgtaaagcccgcttagttaatttggaaattagcagttgttta

SEQ ID NO: 264342 - DNA, 1047 bp, Cannabis indica
tgatttgttttgctttatcaatccagagcaaattatcttcccacattcactgttcgagacctctatcccagccaagttttcagtctttccagtctcgtcctcatagacatgtgcgatcgatattaatatcatatttactaatgtgagttttggtgcggaacttaactttcattgataaccaaaaaatgattcaaagtttgggaatgtaaaacagagcaagaaaagaagaagaaaaagagatggaaatgaagaagatgagaataatgactgctcaactctcaactattgaagcagtctttctatttatagagatcaccgtacaattaaggactcgtgagtgagctaacaaactcaactaactgaacagaaaatacaaaacagaaataactaacataacgaactgaaaactaagtgatcattttcatcatcaatacaatcatcttctacttgacccggatccggacccgatcctttagtcatgcactcctttccaagaaatgctctataaatggtttctactttcctcaatatataattgctttggcaaaaccatgatctgagcccaataaaaataaattgagatcaaaactgaattattaaatgtgactcttctcatattgtcatgtggtaattttatttttattacatttttaattttcatataataaaaatgatattatatagtaaaaaaatcttaatttgtaaatatcattggaatcaaattaattatattttaataattgggagattattataactcaatagaattactgttacaaaaaattcaaacgtacaccaaaaaatataaaataatacttctgattaattataacattgtttgtaaaatattaatttatgtaattaaaacttgtttaatacattgattttactctttaataaaattgttagttactgcacctttgaactcgcgagcacatgtaataattaactcgctagtatatatatgaacacattaattctaattgaatccaaaaatatttttttaacttttcatgcatatgtagatcgcttcttataacataattt

SEQ ID NO: 264343 - DNA, 598 bp, Cannabis indica
aaaagtcgaaggttgcagcttcaaaaccgctcaaataccgagtctctatgtggcattacaaaaccctggttacccaccactggcacaggtgttggtggtaacacttgatcaacaggggcagccggtgccggttgccttaatcgtcccaactcttcctcttgacaaagtatgatacctcgcatttcttgaaacatctgctgccagtcagcaggaggattagcattgccaaccccccacattatccctcagattctgcggaggtggaggcggtgccggtggattggtttggtctacaccaggctctacaagctcgccctatggtctagatgattaaagagggtccattctacaaataacccaataatcaacaaccacagcaagtcaggcaccaatcccacacttacgcacgtattgccttaaaccctaacttaactatttattccatatacataaacacttaatcatatagcatttaaagcatggcatcacataacacataaatactctagatgcttgcatactgcgtaaaatggaaagcggtaaacacatgattgcataaacagtaaagtattgactctcaatacttactgcaccatga

SEQ ID NO: 264344 - DNA, 1623 bp, Cannabis indica
tctaaattcccgaccactcccgacatttccaatgtctaataaatcgtcccaatatactaacatgctaagttgtgattaaactgagccaaacaccgagttccatgttactggtcaccagaaatacaaaattatgaaattaactatatgacataaaatgcatttcagaattcgataataacagcataaataattatttaaatatctataaataattttcataattaaacataattaactgctaatttccaaattaaactaagcaatctttacacttctcatggtggaaatgctgtcgtgtcgttactgcctccctctttgctagggccaacaccagttgtgcagcctatgatacggcctgcaagccagggtactcagaggctcggtagaggagtggggtcagttgcttgacaaggggctactgaggcagccaacaggtgcatagagagagctctccccttcatggaagaggatctgaaagagcttggccacggtaggccagataggctccactctaaaggtctttgagatctttgtcttgtaagttgtggtttcagctctattcacctttttggcactctataggctggccgaccatgaggcttgttgcatgtggctggccgtccttggatgttgctgtgaggggctagccagccatagcaatcccaagggggactagccagcgagtgttgtggttttgatattgatgttgttttgttttgtttttaggccctgatgaagctgagctcaacacgtgatggctcctagggatccttagatgcttttcaggagcagatgaagaccttggaggctttccttgtagtgaaggacaaagccatatctgagctggaggatctcttggcagaaagacaaagaatggtttttggcttagagactatgcttggcactagaaacataaagaacatcgcacaagctaccttcatctttgggctgaagtctaaccttgataagcacaaggagaaattgagggaggctcttgatggccagaagaccataagggaggagtatgctgacttgttctccaaactcacttatgagttcaagttctgcaacctccaactagtctgtgatacatgggcaatgaggcttttgtggatagaaagttggcctatggaaaggccctttatgagagctagatggaggtagaccaggtcgccgcctatcgagaggggtcatcataagagactcatgataagggcctggccgacccacctgtggaggaggtggtcggtccagataatgaccaccaggttgaccaacgtgttgatactggggctggcctagactttggcgatcctaatctcgcggcttcaaatttagctcttcatgcccctgcaaacatttagacaatattttcattagtggcattcaaaattatgtttgtataacatagacaatatttttatgttccgtatagcctgtgcattttgatggccggtggcttttagctttagaacactacttactttaatgttccatgtggcctgtggccttcttagaacactactttattgttgggttttataccctaaataaaactcatttcaatattatcagatttacttattaatatagatcagaaataacatttaatgttgcatggtt

SEQ ID NO: 264345 - DNA, 634 bp, Cannabis indica
ctgccaaccaagcgaaccaaatcgctaaggcagccaggttcttctgtgttcgataggttgggatcaacccatgacctaagggacgacctaaaaagaaggaggggaatagacgaccagaatactacaacgaacgtgaagttcggagcccatactcaaatccccgcttagaaagacgctgacgtaatccaacccgaccagaatgccaatcaagtcagcccacccgtacaggcccagctcggcgaactgacgaatatgtttcatggcatggtcgggcagcgtaataacgatcttcagttagaccgtgcacgcaaaactcctttctcaccagagatcaatctcctaccattacctcacaagttcaagatgccaacatggaagatgtacactgggagagaagatcctctttcccatctcaagtattttgagatgcaaatggatttacaaggggtacgaggagacgtatgttgcagaatcttccctgccactatgtcggaggctgcacatcaatggtatttcaagttggctcctggaaagtttagttcatggaaaaccttctcttcgaaattccatgcacaattctcttcctcacgccaactcccattgcatctggtagattaggtcgaagtaaaacagc

SEQ ID NO: 264346 - DNA, 844 bp, Cannabis indica
attgtatgttacttgtttgtattcattattttatataaccggttctattttagtaataaccggttctaatttaattataattagtttgagttattttgttttacttttttattctttgtgttacagaaccggttatatttcaatgataatcggttctatttttgtttatatttgagacatctacttctggtgactttttcagtaacttttttcggggacaatgacttttccggtgacttttccaacgacgataacttttctggcaacttttctgacggtggtaactttttcggcaaaacttattattgtttacaaatatggtatttccatctttttttacaaaaatatgacataaaaaaaacttatataaatatatatataaaaaaaaaaaacaagaaaatccataacccttagctttatttatttatgccataaaaaaataaactcttaaaattttctcataatgtaattttgatggtttgagaataaatttgtattggtttagatttggaataggtggatatgtgattaatggtttgttgtggtaatgtagtgaagtagtgatgttgatgagtagttgttgatttagtatatgaaatgagtttggcttagaagatagggttgtttgagaaagtagtaaacttttattgatagtttggaactttggttttttggtgtttttagcttctcaacccaagcttgatatttatagggagctaaggttgatactacaactttctagatttttcttatttttgaattacaatttaactttctaagatattctagatttctttttaagttttctttagcttacaaatatagtttctaggtaattctagtt

SEQ ID NO: 264347 - DNA, 540 bp, Cannabis indica
accagaacaactcaaaacaacagtagaacacttgtaaaatactagtagaacaccagtaaaaacttaacacagtatactgcagtatgaaacttataaaaaaacacaatagaaaagaaaaaaatactgtctgacagtatttttgtaaaaaaataataaaaattagtataccatgtaaattttccttttattttggcccctaaaatgagtagactctaagcgcgggcctaacctgactatacctagagccgcctctgcattaggctaatgcatgaaagagtcaaccaaacccgaatcaatgctaacaacaggattgtaccccacgaactgatcatgttggatgttttgcaatttattctgattaatttacatattgctgcaaaattaataccatgtgatttttaggttgctttgtaaaattataaagttaatttctcattgatttgcatattgcatagcatttactgtcgtattactttttctgttatcttttcatactatttttttccaaaaaaaaaaaactgtaaattaataattttagaa

SEQ ID NO: 264348 - DNA, 997 bp, Cannabis indica
ctaggtgtgggtgtttgagttcgggtgtgagtctgggtccgggtttgtgtataggtctggaccctgttctgcttctaggttcgggtccacgtccaagttcgggtcccaagtgcgggctcaagtttgggtctgggtcaagatctcaatccagatctaagtccagcatttcgatcctagtctgggtattggtccgagtccagattcgtatctgaatccctatctagggtcgaagtatgtgcttgggattgggtcccagattcaggtccaagtccgtgtctcagttccgatctgggtacacgaccgtgtccgggcccgagttccagtcggagttttggtctaaggctaggtctgtgttcggttttaggtctaggtccgggtcctggtcacggtcctagtctttttctagggtcctggttcgggtttggttcttcgtctgggttttggtcctagttttcgtcaaggccatgttacctaaatcccgagtcaagatcaagatcactgtcatgggtctcggtctgattctggttcaggtcccaagtcccatttctgagttagtgttcgggatcgagactggggtgcggttctaggtcctcaccctagttctgtgtccttagtctggttccatgtttgggtccgagttcaggttctggttgggtctatgtctgatttcccaattcgggtctatgtctgatttggagtccgggtgctggtctggttacagttcttgatctaggtccaatttcaattatgattccaagtccaagtcctagttccagtcccgatcaacttctagttttggttcaaattttgggtcacaggcgacgggttcgggttcacttttgggttttggactgggttcaggtccaggtgtgggttcgggtccttgttagggctcgggtccagggctgggtcccaaagtcaagacactgactacgggtttgtccaagccttgggtcagatctggatcccaatctctcgtcccagtctggttccattt

SEQ ID NO: 264349 - DNA, 671 bp, Cannabis indica
atgactatattaaaaaactacaaaccacaaagtaaagtagtgttagatgtcttccggtatactcaatgcaaaccactaaactctccaagaaattggctactaaaggtttggagcaaaatttttggtggggtagtgataaagataataagggcctttgccttaggtcttgggatagtttatgtcttcctaaagctcgtgggggtttgggatttcataagtctttggagatgaactaggccttcctggccaagtggggatggtatctgttgaatgatcataaattgttatgttgtgaaacgcttagagccaaatacatgaggggagaagactttctcaatagcttttgcaagggatctgattcctaattctggaagaatgtagtcaaaacaaaacatatcctcaagaaaggagcatggaaagtaattaaggatgggaataatactcgtatttgggaggacccctaaataagccatggtcaggagtttatccctaagccaaagagggtgccaacggaggaatatacttgggttgcggatctcctaacttataatggtaattgggatatgcaaaagctagactatttttatgaagtagatacggtatccgctattcttaaaagtgggtgcccaaatggcaatggaaaagactagtgggtttggactaaggaagca

SEQ ID NO: 264350 - DNA, 909 bp, Cannabis indica
ccaaggcctccaacatatttatgacggctcaaccgatcccaactcatccaactaacacctgctttctgaaagaatcaatttgccaccaaaatttttccataagacgctccaattccttacaagtatccaagggtaacaaaaaaacactcatagcatagctgggaatcgattgcgcaaccgctttcagcaacacttcctttcctgctcgagataaaattcgcccttcccagccctgaattctctttcttattctgtccttcagaaaaccaagaatagcattcttgttcctaccaaccgaataagggagccccaaataagtgacattctcatccgcctcatatatatcaagcatgtggcagattctcgatgataagtgctggtgttgtggctgtagaaaatagacgacttgttgaaattaatcttttgcctcgaagccatctcataagtgtacaataattctttcacattatgcgcttcttcctctgtagctttacagtagatgtaactatcatctgcaaaaagcatgtgtgaaataactggtgctcctctagcaattttacagcccgttattaaactactttgttcatagctacacaatagacttgagagcccctcagcatagaggataaatagttaatgttttaacatgaaaacacaattaaaaaattctctataatatatcttaattcaaagttagaaagtattctaattcaaagtttatctctctatatatatataaataaagctgagaattgagagatgacatgttgttccaaacttatttatttattttttccatttattattgtacttttgttaaaaaataatggtaggatacaatgatttttcaaattttatatttttcttttgtttgtaaataattttaatttattacctttcaaaaaaaaa

SEQ ID NO: 264351 - DNA, 1651 bp, Cannabis indica
taaacaactgctaatttccaaattaactaagcgggctttacattaggacatttaagtttccaatgtctcttttctccacaaaagaaacactttcctttccctttaactttggtagggaagccttcttctctttgtcagctattttggtagccttggaagtctcatgatttgggttgttaaccttcttctttttccttattgttgttggcaacaaaagtattgtttgctttagctagagccgcaccactagaagtagaagctttacctcctttctgtggtcctcaaatcagacttttaaatgtcttaagattgttgattaacttgtgaaagtccgtcaacacattatttatatgatagtgtaaagtgaattgaagaaaagctagagatagactgttaaggatcaaactcccttaagtttctagatcaataacagttccatggacttcagcctcttagaaataacctgccatctggagatggtgatcacagacattctaattaggcttcatccatgcgtttgtaaacatttttgttgcattaaaacatgcttgatccgacggttttccaaataattcacttaactgatttataatctgggagctgtgaaattattagaaaaccttgacttcaaggtatctatcatgctaaacaacataaagaatagagctttgctattggctttctcccgatgctcatatctttctttaattgtcttattagcatttttgcctagcacctcacttttgtcatcagttaagacaaacaaagaggtctcactattgagagcaatattaatgttatctctccacttgatgaagttagctccagtgagcttattatcagagaggtgtaacacaatgggatttgataaaggtattttgatactacaaatattaaagaatagaaatcattaaatggtttaatataattctattcacaatttggaaacaataaaaatatcaaaagaatacaaacatatatctcatatattgtccaaggctttcaactataatataattttcctatttaggcgagagtcaaaaatattattggttgaacagagtagttagctcttctaatataacatacattttagcaaccttttatttaatcaaatgtgaatctaacatttttcgtttaggccagagacaaggtcattcacattttatgagctgtcaccattatttcgtatttataaacctattctaagtagtcatctttagggatgagtctactagaaagaaatttatagaatacttatttttcgagattttactttgttaaattgtctaatggtaatcatccattagggggacgacaagcgcctcgagatcttattaaacatcagtcatacaaaactgacaatggagatcgaatatctcttatttaaagcatattattttatgtaaagaatatattcttttagaaatatttatttctaattttttattttaccaaccatatacaaatattctattaaaattaccaatttagttagctaaatctgaatttcaattttaatatttataatatatattaaattatctgaaaataattatattttccaactttagtatacatttatatattctaacataaatatcaatatcaaaattttttaaatattgatatactaaaatataaaatttag

SEQ ID NO: 264352 - DNA, 557 bp, Cannabis indica
tcctagaaggacttacaatctatgttccaaaagtaatttgtgtctgcccgcgagtataatttggaaatgggatctatcaccaatatcaagcaacaagcaggagatactctaaaaagttttatccaacaaatgatagaagtagctgccaaaaccagagtaaccgatgatatgaagcttgtttccttgtaattcgtgcttgcagctggctccctattgtggggagaaatatagaggaagagggctaaaaccctctctgaattcatggccaaggttcaaggcttcattagcttagaggatgcttagccttcggcacaaaccccggtaacctctgttcctgcatagacctcgtctgccactgctcctagaatgttatacactcccacaatctacggaacttctgagtttgcacctgtgcccacacaaaatcatttctctgggtacggagcggcacaaaacaaatgtagtgtggcacctgtataatcaaaagcatgggtaccaaagcaagaagtgagtaactcctgaaacaagagagggggaagaggtttgaggcgagggga

SEQ ID NO: 264353 - DNA, 899 bp, Cannabis indica
tagggtctcgatcttcgagctcactactcattctgtaaagtaaatccatctaaagagagtagagagagtttgaaagtccagttactcacactaatcagtctaaaacttgtgttagattgcagctcaaaaaaaatcaatggttgaagatatttcgatcatttaattatatcgtgtatatatttatttgttctatattttcatatacaattatatatgtttcatattttcattcacgttttaaaaaatgacctattacaaaaataaataaataaaaaataataatattctgcgaacttttttttttccagagcatcgtatgcatattgttctggatatatttgatcataattgatttgtcccatacatatggatttgtataaatccaatggtatacattaatttacgtgaaacggtagacggacatatgatttcatataggccatcatatacataaaatatataaactaaagcttttcttattttagaaataagaataagactttatgtaagtggtgtaataaagtaacagaagtaattcaatgaattatttattagtagtactactagtaatgttttttatttattattatatttaatttttatttatgaattatattaattgtaataagccatatacagtattttgaataattcagtttatatatagttttgatttatattatatgcttttaacctactagccttgttttgttgtgtctttcttgtgtaccgcattttaaggtgggattccaccaaccatatatattatttgttggaatccaaatacgaaagcaccaacttcattttctttagctttgtccccccaaacaccaatgcctttttattataatttttattcttttttaacttagcgataagttcacaagtatatatgatga

SEQ ID NO: 264354 - DNA, 5584 bp, Cannabis indica
attctttttcttctaatctttcgagaaaattagtcgcacaagagccgtgctaaactaataatggtaatactatgactggtgaccattgatgtctaatctttaagcagcccattccatattcaatattcaaaactcaaaactacaaggagcaacttcaagtagattttatgcaattaaatcattaagactatagcctattaccaaatatgaaataaattctagccaaagtctaataagctttcataggcttttgattcaaacagaatatatgatgttcatataagccttcacaatgattattcagtataacattatttgatcccaatctataatggcaaatgcaataataaaattggtatgaactagtaggctgagacaatcactctaacccagatataaaatatactctataatcaacaagattgaacaaagcaaagcaggccacatcagtcgaataacagattaaaaaaaatacatatcaatatgtataaccagatatgcaccaaatagatatcaatatgtataatttcaaatgcaatcaaattggtatgcaccaaatagatgaaaacgattaattactgcaatctttatgtgagcctacagaaatattgcataataaggaattagtttgtaaacaggaatacattcaaaaattgaacaattctaaaactaacacagaaattttaacaaaactctttaacataactgattgcagaacccataaacagtttaaggtgcaaaaagaagaagaagggtcaaatgaaaaggtagacatacataggaggcaacggaccttggtaagcaaaggtcgaaacgccttgtcgttgcttgtgctttggattggctgtgcagagcacataaacacgtccgcggcgtttaactgttctacaaaattcacacattttcttcactgatgagcgcaccttcatgttgattctgtaatagaaaccatcaatcacacaatcaggatacaaagcccagtagagcataatagcaccaaatcagtctgaaaataaaaatttataataagaaagcaaaatcccctaatcatatgctcaaatcatgttggaatttgggataagatgcatgggattccatctcaaaaccaattagcaatgagaggaatagcctattcatcttatacatgacaatttgtttccacacattagcaatgtgagattaactctaatataccctcctcaagtttagacttagaatgtgtgggcataacgaacgacctttaacagactacatggccgaacgtgacatttgaaagaatcacacaaagccaaacatcgagaaatttgtaggtgtacatgtcgcgaaatttgtagattttgaaacatgccaaagctcccaatactgaaaattggcacacattagccgaaaggtccaaaatagaagttaaaggggaaacaacaaaagtttttttagtttggctcgtctttttggaccgaaggcactttgggctcacaacggatcacaatgggctttgatatcatgttagaatttgggataagatgcatagggttctatctcaaaagcaattgggaatgaaaggactagcccattcatcttatatatgacaatttatttctgcaaattagtaatatggtactaactttaataaatcacaaaagaaaaccttgttgtgacaaatagaactcagaagataaagggacatagtagttcatgctaaattcaatactcaatctaggaccaagagggtgtgaaaattttctacgatggtaattagaaacctcaattgggataattattcagacctaatatcaacataagtgaaacccaaaaaacaaaattcttcttagctacagtgaatcactaatctcatttcccatgcattctcaacaccagaacagtaagagagaaggtaagagacaactcaataccagcatatacataataatgcattcatatataatcacaaagtaaatacacaataagtaaattaccattattttactaaggaacaataaactaaagtctttaacgaaggaaaccgtgcgaaacaaaagtataagggttaatataatctgtaatttccaggaaatcaaaaaccgtattcttttttcttttcttccattaactccataagatatagatacggtggggaaagaatagtagaaaattgataaagaaaaaggaaaaaaaacctgaatctgcagacgaaggatgggttgcagcgagcaggaggcgactgtgcgagaagtttgcagcgataatcggtgcttggcggtgaggaactcacagggcggttgctttagagagatattgaggactatcgaatagggttcttgtttaaatgttttagtgagtgaaggtgcacacgaagaatatgaaatcagcagtcataatttataaaatattaattttattaggaatttttacacaaaatgataattttttttcttttagaaaagataattatatagatcataacaattatattataatcttaagtggaggtggataatcctccaactaagtacattttgtatccaccgtaagagtaaattagccaataaatagacttcaatatttgcaaatcgatatacatgagatacgtgggaaattggatacaagaagacgaatatcatttaatttgccatggaaagtcgaacgataattagccacatgttgaagaccttgaagaatcattaatgagtttgtttcaataaaatggatagaaaaatcacagcgaataagccattggaggctgtgaacaatggctaaagcctccatttcctctaatttaaaattacttgagattggttttgagtaagaagcaataatgttgctagatgagtttcttaggatagcaccaattccaataattccattagagggaccaatggttgcatccgtatttaacttcagtcggcttgagcgaggagctagccacttctatttatctttgctgcgagaaacttccattgcaatctctaattgtggtaacagagaaagggtagctgatgatttatgcactcttctatattcagttaagaactttgtaacaaagctgagaattaaagcagcaggcttagcttttttaccatgaacttcagcattgtgttcaaaccggatacaccagagaagaataatgaactgctcaaactgatctttgggaagctttgttgatacatgaattaaaaaatctttgctactcatcgttgaagacaggtgataatcgaacaccacatcagtagattcccttacttctttagcacggctacactagaacaaggcatgataaatttgatccactatgatgttcacaaattatgcatcttggatccgaagtaatatgccttttattaagggttgcagcaactgacaacactccatgaaagactttccaagcaaatattataactttggatggtattttcaagctccagaatgattgccaccaatgattagcagaattggagggacttatttcatcttgtgcagccatgttcgaggcaaacttgtatcatgatttaacatcatagagcccagttgaggagtaataccaagtaaaaatatcatcagatggaaacaagcttaaagggatggtgatgatgcgatcgatatccaattggcaaaagttagcacaaagtgttgtgtgatcccattgtcgttgagatgtaatataatcaacaactagtaatgatagattacatcccataaaaacaagaggtttgaagaaagagtgctcggtatccaaggatcaaatttgcaactgacacttagaccagtaccaattctaaaccgaaggcctttctgtagcaagtctttaccccaaacaatgcttcgccatgtcaaagatggtgaccgcccttcttttgcctctaaaaatcatccttaaggaaaatatctatgatgtagaattttgccaagaagagatccaggattgtcgaaaagtctccaagcctatttagctaatagggcttggttaaagtgaatgaaattcttaaatcacattcctccatgaactttttccttgcaaagaaaattcaaattcttccaatggatagaattaccccaggcagaggacccccacaagaagttggccattaaactttcaatttgttgacacaattgattggcaacctaaaacagctcataacataagtaggaatcgcttggacaactaccttaagaagaacctctttaccactgattgagaaaaactgctctttccatgaattaagtagtttccagatgcgattagtgattccactgaagagattcattttatcgcgactatagaaagagggtagacccagatatgtctcatggcaaggttgaattggcatgccaaacattcgttggaggaattattgatcagaaacactagtattgggtgaaaaagaaagcacacacttcttaggattaatgacttgactagaggcacgactgtataattcaagacaacactggattgagcgagcagaatctcaagaagcacgaaagaaaagaacactgtcatctgtaaagaataaatgagagattgatggagtagatcgggaaactttcagaccatggagagcaccattagactcctcttattgtagaagagatagaccttcagcacaaataaagaaaagatatggagataaatgatatccttgtcggatacctcgactaggagtgagagcaccatggacaacaccatttaatagaaaagaataggagactgattggagacagtgaaggataatctcaacaatttttacacaaaaacccatctttaacattacacgactaagaaaatgacattccaccctattgaatgccttgctcatatcaagtttcattgttgcataaccctgtcgaccacattttcggttctttagagagtgaattaactaaaaagcaatcaatacattatctgtaatcaatctttggctgaggaaagcactctaaaattcagaaataaccatggacaaatgtggctgcattcgcaagattatggttttggatataattttttagagaacaatgcagatgcttataggtcggtgttgtggaaccagcttaggcttttaaatctatggtataagtgtgataagtgttttgttgaaactagatggatcccctccattattcaaaacatcaaacatagcttgggtaaccatatcacccacaatatgccaataattagtgtagaacattaccgacataccatccaagcctgaactcctatcactcctcattgattttagagcaacataaacctctttagatgagtaaggagcagatatagcagaataggcttcaatagagatagtcgatgggattgcagcaagacatcagtagagcatacttatgaaattccttggaagtatatctcaatgacattaagaaaactaggaagacttttttgaggttgtccatttgtgcttcaagcattttgatcttattattgttgcagcgtgcattcactcgttggtgaaagaaacgagtattatagtcactcgattttagtcaagaaatttgagatctttggtgccaataatcttcctcctgagatagtagctcatccaagatagtttctgttgggaatattttacaagga

SEQ ID NO: 264355 - DNA, 1104 bp, Cannabis indica
tttgcaacatatggaggatgagaaacaataggttgtggaacaaacaaaaaccagatcctgtcaagatgtttcaagagctcaaatcgagggtaacataaaggattgagctattttagccaaacaaaatttcagagaaagatagacaatggattttagtttgttgaataatgtaaatgtatacaaaagaatcaagtgttgagattatcatgtttagatgattatttaggcccttgttaggtgctattagtttgtaaacaaaatgtttgtgagccaatacatattctgattcataaaaaaaatgtaaatcatctattgaggatcattgattattaggattattacaaatggataactcatagcgtatctatatcatggaacatatagagagaggaaactctacctcctcaagttttgagccctataaatagtgaggaatgttcactgggcaagggaccgaaaaattataagccgatacgcagttaagctaaggctatattatctaagaattatatattcagagatactattgtaagagctataagaaaaggaaacttcttccttgttcttaagtcaatacaaataacgaggattagcctattaccgaactgcttggggctgaacctctataaaattcctgtgtattattattgccttcttatacattctcattacgacatatcgtttatcgcttatcaaaaatactcattgtcattggctaaaagcgaagtcaacattttggtgctttcattgagagcagaatcgtagatcgttcttttcaacattcaacacgatggtgcaaactcgtagaggccagtctgacccagcaaactcacagacccagggagttcaagggttccacccgctgtcaatcctcgacagacgggaagcgtggtgaatgatgggacaactcctgttactgaaactgcgcctgctgtgtaagagactgggaataacagttccgcacgcaaccaaattgcaaaatctctgtgctgcgctcggactcatgtaggatcacaacaatactctgcatcataagcaggaggagttatgtgccgcaataaacctcgcgtttgacgaaaagaggcgtatgttcgccgaatggag

SEQ ID NO: 264356 - DNA, 602 bp, Cannabis indica
atttattaatttatttatttaataaagaatgattacattattacataattaataataataattacccatttgaagacataggcatgaccttgtttccaagtataagggatgttcataccaaaaatggcagccaccaaagaatatacagacaaacaaacagtcccagaacaaaggaacagctccagctgaattagttgatttctatgattgtcaagctgaatatttatgtaatcttcagtgtcatcaatgtattcacgcagctgtatgtaattaacataatcatatttcattatatacattcatttcattcacttcatcaaattaatcaattaatgagtataccatacagtatacaaaccgttgtcaacttgtttagtgtcccatcaatttgcataaaatatgcctgaaataatattagtccatacaaaacaaagttattgagattgacaaatctgagttatatgataatcctaatggtattggtatatatttagttaattacctctagcagcatttcaagctcttcaacatcattctcctgttgaatactagtacttgttctggatgatatctttgagcctattgtattatttgtatttgta

SEQ ID NO: 264357 - DNA, 564 bp, Cannabis indica
ttcagtacatcctggcactaccaggatgtatcgagttcttaaaccctactactggtggtgcaggatgaagaaagatgtggtggaatttatatctcgatgcttaacttgtcatcagatcaaggctgaacatcagagactagcaggtttactacaaccactgatacttcctgagtggaagtggaaggatgtcaccatggactttgttgtttggtcacccagaaccacggggatgtacaatttgatttgcgttatggtagatcgatttacaatgtctacacattttctaccagtaaaaacaatctttacactggatcagtacgtagagttaaatgtagaagagatagtgaggttacatggtgctccaaaagtccattatatcagatagagatttgaagttcacttaaaaattctggcatagtcttcagcgggctatgggtaccaaacttaaattcaatatagccttccatcctcagactgaaagataatctgaaaggacaattcagatactagaagacatgttatgagcctctatggcagaaaatgtagatctcctattcattggga

SEQ ID NO: 264358 - DNA, 709 bp, Cannabis indica
catgacgtcaccaccatgacctgggaaaggtttcaggaactcttcaacgccaagtattataacgaggcggtcagaagcgccaagaggaaagagttcgctcacctgacccagcgagagaatatgagcatgacagaatatactactcagttcgaccggttggcgaggttagcctcgggatttatgccaaccgatttcagtaagaaagaaaaatatcttgatggacttaatgtgaagatcaagtatgaccttatggttactaccgacgacaagaccacctatgctgtgatggtggagaaggcagtgcaagctgagggcgcagttagatgtatgttggaatcagttaggactccagaatgtggcggggctcctacccctcctgcgtcaggtttcagcaggggaggtagtggttcggccatggactagaggaggaaatcatccactgcatccggtggctcgaggcagaacaagaggttccgagggaaccagaatcaagacggtcgtcagggtagtgttgagacccgttattcctactggagtgtctcattagtaagaggcatcctccgggtgagtgtttaggtcaaggatgttcttgtgtggctgccagaatctctagtaaattggatagaccgtatgatagatatgaatcagggtttggaaccctattacctggcggagagttggttatctccaacaggtggattaggtctat

SEQ ID NO: 264359 - DNA, 608 bp, Cannabis indica
aggtatttttacccaaaatacgacttaggtatttatctgctacccggcataaaacttaggtatttatgctgcaaattactcaagtaaaaaatatacataattatttatcttttgtttgaacaactaaataagaacgaatatataattaaataacaaccttattatatatgcaaattaaccatacatcaacatattgttttaacccaaaaaaaaaaaaaacttaaaaatagcaccaaaacaactcctttataataaagaaaaattaaccacaaatcacctatacaacaactcattatattaacaaaaataaatatataactaaaaatcaattcattacaatataatttctaacaaataactaggaattagaatataatgagtagtgaggtcttagacggacgaggttctggtgagtatggaggcaaagagggtggagctttgatcaaagttgggctctagtggctgtcattgtggcttggtttgagaaggaagaagaagggagatagaagaatataaggttgggctttgctagaaattagggatttttttcttttctttttaggtggggtaatattaaattaggctctaaaattggatttttttttctt

SEQ ID NO: 264360 - DNA, 580 bp, Cannabis indica
gggattaaaagttgcccggtcagtcatgatgtctgtaaaatgaaaaacaattccaagtttaaagaccgcttggttggtcacgatgtcttagaaaaggccttatggctgaataagatatataaaaaataaaaggataaaaggagaagtatttaaacagctggagtcctaggctcttggtttgggtcttctaggctggtaggagttggaggatctgttgtttgaacgggaggtatatcagcatttgggccggaggtagaagcagccacctcaatttcactataaaccacttgggaagcgcagaactcgaggtacatgtccttggcttcacccaagtagtagaagttttcttgaggattagccttcgaaaagtcatagaagagctcaagaccggctatctccaaggcatgaactttctctcccagcctcgttacctcagccgtaagctcctcctccttagacttcttctcctcttccagccgatgaaggactgctcgaagggatgtcctttcatcttgaaggctgttcatttcagtagataaggtctcgaaggtctcttcaagtcggtcagaagcctcgagat

SEQ ID NO: 264361 - DNA, 1366 bp, Cannabis indica
aaccatgcaacattaaatgttatttctgatctatattaataaacaaatctgattatattgaaatgagttttatttagggcataaaacccaacaaatatcatgatctcttttgaaattcttcattatctcaagagaaagcaaagtgggaaggatgggtttatggcgttgaacttgaccttagtaaagcttatgatcgggttgattggcattttctttgtgctatgttatatcggttggggtttgatgacaaatgggttcgacttatctttggcagcctctcttcggttcagtataatgtggtgagtagtgggtatacgcttgggccaatcactcctagtagaggtcttagacaaggtgatccaatctcaccttatctctttcttatttgtgctgaaggtttatcggctctaatcaaaagttttgaggctagaaaattaattcatgggtgtaaagtggcgaatggtgctcctattgtgtctcacatgatttttgcggatgatagcttcttgtattgttaggccacggaatgtgaagtagcaaatattcagcatatgcttgatgtttttgctaaagcattgggtcagcaagtcaattttgctaagtcatcagttttctatagttccaatacgtcgagtcacatgcggcaaaccatttgtaatagaatggggattcgagaggctgatgagaagagcaagtatctgggtcttcctagtactattggaagaaataaaactgctgcctttagttatgtggtggataaagtccataagagggttcaaacttgggacaacaagttcttgtcgaaggctggaaaggaagtgcttattaaatctgtggttcaagctctccctgcctataccttgaatgtgttccttcttcccgtcagtatctgtgatgatgtggagagagccataagtaagttttggtggaaaagtaacaagaacaaaggcatccattggttgagttgggacaagctgtcttcccataagatgaatggaggtatgggctttcgggatttcagagatttcaatttgtctttgttggcaaagcaaggttggaggctgctcacatgtgaggatagtttggttacaaagattttcaaagcaagatattttgctcatggtaactttcttactgcatctctaggaagcaatcctagttatatctggaggagtttattggaatctcaagaattggtggttgctggtgcgagaaggctggtgggagatggctcacgggttagcattcttaaggatccatggcttaaggatgatgttaatcctttcaatgaatcttctcacccgagcctaaccaacaaaatggtcaattcattgatggaagtagacaagattgagtgggataatga

SEQ ID NO: 264362 - DNA, 506 bp, Cannabis indica
aaaattttcattgtccactaataaatatgtataagtaaaaaacgttacctacacttatattggagggaaatttttttagcattggcgcctatatttcccctatctttattataaaatttattttttaattaaaaacaatgctgatatgtacaatgatgtgtcaaaaattatcctacatgttacaattctaacttacaatatactgtcatatcatataatcatatcttatatgtcactatatacatatttctaaatattattatgtatatatatctaaacattacacgtattataaaagattaaaacaaattaataaaaaaaaagtcaacctaagtaaaagaaaaaagaagcatatatagaaacctttaaacaaagaaaaaaccctacacttcaccattctgacgcctccacttccttcccaaatctctacatccttctcaaattttgcttacatgaatgaaaccatgactctcttgaaggctctctcttcatataagaggtatttt

SEQ ID NO: 264363 - DNA, 656 bp, Cannabis indica
ttagagaccactgccatagagtggcataggtcggttactacacaaggaagaggaattattggtaaattttcagaattcctccatcttttttttctcccaatacaagcctcacctacaaaactcttattcaggattacttgaaaattccttctactaatcaccttgacaaataccttggattacctcagtgttttggtagatccaaaaaccattctttcaaccccctgtaagacagaatttagtcttacctttccaaatggcaaggtaaatttcctttccaaggaaggtaaagaaattcttctcaaatcggttattcaagccatccctacctattccatgtcggtctttaaactcccaaactctttctgtaactttgttgataaggagatggctaacttctggtggggatctaagaatggagaacataaaattcactggaaaaattggcgatcctgtgaaactctaagacttctgggggccttggttttagatccctaagacctttcaaccaagctatgcttgccaaacaagcttggagaatccaaacaaaataatccttcctccttgccactcttttcaagtctaatactttctcaagtccacctttctgaatgcctctttgggcactccccctcttatgtctggcagatcttgca

SEQ ID NO: 264364 - DNA, 623 bp, Cannabis indica
atccgtacagggactcccttctggaacgaactacaacaggaaggagctgcaagccttcaggacttccagaagagagtccaaaagtatatcaaccttgaagaggcccaaatagtggcctatggaggatactatcccaccgggatagcagggtacatgcccggagcaccgccctcgggtactgtcccgaccgcggctccaccaatgagcggcatacagttctctgctactcccggatacagtcagggccaggccttggcccccgcatcatcccattttggaaatccctcagggataaatggacaagctccctcgcactccgctccaaccgctagcctggcaggtccttcccagggctcgaggagtaaacgatcctccaaaggcagcacccggacggaggagaaacgccaaaagagggggtacactccccagtacacccagtacacggagctgacggactcccaagagcgtgtgtactttgctactaggcaaaatacgcactaccggagaccacctcccttgtacaaggatagctcccggagggaccccaacaaaagatgcgagtaccacaaagacattgggaaaagcaccaatgaatgtaaaaatctcaaggatgagattgaaaa

SEQ ID NO: 264365 - DNA, 543 bp, Cannabis indica
gggtgttttggtgagattgcagcttggatgagatgaaaaacaattgataccacacttactcgtgtcaccagaatgatacaaagatcaaaggcatgtaagtttaagaagaagatcatggctgcttgtcttgctagcttagtgtacaacctatggaggatcaaaaatgaggccatgtggcaaggtaaagagcctaattggaatagtatagtgaattgtataaaaaaaaaatgtaaagcaaagagttgtattagtgtggcctaagaaggttagtaaaaaagaggaagagtggttttattctttgtaaactgtatagaagattgaaggctatggcatgattgtcatggtgcttttaggttgtacaaaaatagttaatttgtaataacactcattgattcatcaaaaaaatatatataataaaataaatttttagtaaaaattaatttattatagagtctcttaatcaaaatagctttttttaaaagttgggttgtaaaagctttagcttttagctatagtttttcaataaattcttgggattatttc

SEQ ID NO: 264366 - DNA, 1747 bp, Cannabis indica
tgaaccatgcaacataaaagtgattactgatattatattaatatgtaaatttgactatattataataagttttatttagggcacaaaacccaatagggcattggttaaagtaagcttgggctagatgtatggagtatgcatcgaaagggactgatattgaatttggataagatatgataaatttaccgtaatatcatttaattcaatatcatctagttgatcttagatcaaatgatctcaatcctgagattgttaggttctagttcagttgcattatttgtgttcttcaatctgcttgttaaagtcgaccaatggattttctcattacatatagattaaggacatggtagttcaattgagtgggagcgctaatcatatatacataatctatagcttctatctggacatagaagtaaaacgataatttccttcgagcttagcttaatagagataaatagttgagtactcattttagtgattatataagtttaatgaaatatcatttgtaggtagctaagtattttaacgataacataaattgatgggtgtaacagtaaatttatccctactcagagtagatcatttatagaggataactaattattaagattataacaaatagataattcatagcgtatctatatcgtggaacatatagagcgttctatataattgagattgtaattcccaatctataatggtgcaaggtggaatcaataagttagaaaatttacttgctaaattctggatctgcttattagaagctcagtgatatagacccatggttcccataatagttgagaataatgcttgtaagactcagttaattgattttaattaatcaattataattctaaattatctacgtcttatttatgaattttcactaagttatggcttgattgtgaagaatagggattttaagatttatttgttaattaagagatttgtggagtctaattaataaataatataaatgaaaattttatttgataattaattataattattaaataaatagttttgacttttataggattaaaattagaaaatatgacatttgtgagataatagataaatagttgaaaaaatgacaaaaatacaaattagtggggcccacatagggccggccacttatcccttattttttgcataatttttataattttttattccatataattcaatcctaaccctaagtgaatcagtataaaaagaaaagaatagtctcataatccaactaatgactctaaacctagtttacatcttgtaagacaactagagagttttgagactttttcttcttcttcttcttcctaatttcgaaatccaagagttttcatcacataaaattttgagccttagtgattgagtgcatgcccacccatagaaagttagtcctcaatcatagtgtaagactgtgaagaatccaaccaactaaaggagaatcgggcttagatcttgattatactctacgacagaaaggaacatcggttagagatctgagttaaattagtcgtttaattccgttgtcaactaatgtaaggtttctcatactttatatgtgtttcagtttcattgttttagaaattcatatttaggatgttaagaacattcttgttagtaaatgtaggtcctagtaaaatataattcaacaactggcctcagagccatgaaaataattcacttttaagaaatatggattaaaacgatgtatgtgtgatttgtatgtgattcatgttgatct

SEQ ID NO: 264367 - DNA, 1239 bp, Cannabis indica
aatggagagcaccttcaaaaatagtatcagtaaccaactaaacattacagtgtaaagagataatacccacatccttatttggcgtggcctcccaccgttcttcaacggtggcctctgatatgcaagccaagcaggggtagccatttgatatctagaagtaaaactttgttatgtaagcttgtagattcaatttatgtaagttgcaaacaacaaagaccaattaatgaataaaaaaatgtttatgtttattattgtgtctaaataacttgctaacaagattaaatttttaaacgtattcttttttcagttccacatgcgtacacccaagaaaattccaaggtaaggtctatgaaacctggtgaattataagtgagggagagactgtaagtttgcatgttcacttgttgggcacccacactgtataatgcctctaaatatcatagagaacttatgcagagaaattttaacaattagaacgagctactaaacctacatgtaagtcaggggtaggcatacttcagcttaacataaagaaaagtaaatatggaacttacatgtcaaggccataagaagatagccaagattaaagaccgcccggtcaatcgcacaatctatgataaaaaaacaacagggccaaacaatagtaatgttcaaaaataaagtgcctatatgccaagagtacgaacatgaaggccctagggctgaaaataagtagtgttcaaaagtaaaaggccataggccatatagaacatgaaaacattgtcgatattataaaaccataatgctaaaaattaataatttgaatctacatgtgtacatgtgctagtggggctaaactggaagctgcaaagtttggatccctggagtgtgagctggccacctggtcaaagctctggctggccacctcctaagcaggtggaccgaccatctcctcatcatagtacacctgaggatgacccctctagctggacggtggtccaactcgcttccaacctactcttaaaaagtggtttcccttgggccaatgtgctctccaggaaagtcgcgtcacccatgtatgaaagatcaactttggatttatgtaacttgaactcataaatgagttctgaagataaggttacatactcatcccttatggcctactggccatcaaaggctgctctcagcttctcctcataacctgtgaggtcagcctctcacctgaagatgttagtgttggaagttattttaccaggaact

SEQ ID NO: 264368 - DNA, 888 bp, Cannabis indica
aaatatataaatataattagatgactattggatgataattagatcagtttgattagttatgcattggatcggatgtcacatacaatcgatctgatccaattgaattttcaaaatttacatccaatacgatccaattatgattagatatctgattctattgaatcgattggaattggatcgaccgattgtaattagattggatgactttctacacacccttactcttatatgtcaatattagtattggtccaattaaatattgagtctcatatattttaatataataatttttaaagaatatcgttagctaaatacaagacatatgtgtagaggtactaggcactactgatgtccaatagtaatgctggtgtggaaaaagaccccatgtggggatgtttgttagtcaatatctctgtttgccacatcattataaagaaggataagtgttttatgagtagaacacgtgattatttctttagcttttttcttaagaaaaaaattattactccttaaatattttcaaaaggatctctaacataaagataagattattatgtttgattttttttttttttttctgaaattaaatggtattccaaatcaattttttcaaaggaaagtcaataaaattagagattatttcacaaatacacaaaaataacaaaaaaatttcaaaaatatgatttcacggaattttaaatattacgatttttttattttatttacagatattacagtctttttatgttgtactcttgttaatttgttgttgattttttattatttgtatgctattttttgttgttattttgattttatttagatcttattttcatgttagttttatgtaattttcttgttgttcgtgttatttttatagaaaaccgt

SEQ ID NO: 264369 - DNA, 997 bp, Cannabis indica
atttttttctttttattttattttgtttgttcaaaaaaaaaaaaattagaggcatatgtgctttggtttggtgattttccacattctaatacatgattgatagtgtgcatagcttgttgaaaaatgtaaatattgtttgagcttgtgactaattcttgtgctagtttcattttgattgagatatgtctaattttgagcacaaatgccttgtcatttaattgtgtgtgatttggtgaaagtttgtgtaaatatgtaattttgtgatctcacaaatcttagaatttgtttgattctctcttgaggagaaatcttaggcaacgcttaactaaggacatgatttaggctctctttggaccatttgagcctttttagccaacaatagtattatttatccctactcacctttttaagcataattgttccctttatttctttactgcatgtaagtctagccaaatacaaatctttctaccatataccctttgagcaccttactattttaggatatttgtttgttgtgtcatgaaggggatgggaggagtgtaattttagtagagtggtaattgaatgagtgtttccattgtgtcattttattattctcaccatgcattggggacaatgttaaattttaagttgggagagagttaccatattttgtgtatattgtcattattatatttgtattgttagttattcaaaaaaaaaacaaagattgtttaaaattaattttggagtgtgccaccccttgcaaaaaaaaagcaggattttttttttaaaagttggaagttccaggtgttatagcattgcttcaacattcttgagtagagaggcacaaaaaaaatgctatgttaaggcattgctataattcttgggagcacgttattttagaaaattttgggacaataaataataacaatattaatgctcaaattttttgtgggatattatttggggaagtaagtgtgaggtctcattttggtcttagaaaaattaaggt

SEQ ID NO: 264370 - DNA, 1250 bp, Cannabis indica
aaaggcaaaaattaagttcaagagtactcaatttttatgggctagccaaacgggcctaaggattttagtgaagacattttatctcgatttttagttaaaaaccgggataaaaaagtttatgtgtgcaaccgaaatatataataatattgtttcaagtatatcatagaaataatttttgctattaaatagtatattaatttgaatgagaaaaaagatatagttcaaaaaaaaatgagaaaaaaggtatgggatatattatgagatattaagtagacaagtgcaaagtgttgtaagaaaaaaaaatagtaatttgattcaatgtaatttgttcaacgtgataaatccatatgagtatgttccattaaaataataatgaataaataaataaaacaataaattaatgattgtgttttgttcaataaatacaaatctcttctaattaactaactaacgaactaatcaactaactttactaagtgttttgactgtttttctactttgaatgtctatcttgagctttagcctcttaatgagtatttctttccggtaaaaggttgaaatttaggctcaactttcttctctgcctcttcctttttcgattctttaggagtttcctacaaaattcaagaaaccattaagtaaatttaaagaaaaactagatagtgaaaagaggtatgacataaagaagaagaaaaactcaccttttgtgtaggcgtacggttggaatttgacccgaaaacaagctttccttgagatttacgagcaagcgatggagaactagaccctacagaaggctgttttgacttgccatgcccaacaacatcagattgcttgtcttttgactcggaagaagaagtggttgcaatttcgctagtcgaaggctttccatttaagcgccttgataacccggtaaaagggctaaatttaggttcttctttagtaggaacctcttcatctacaaatgacaaaaataataatgaataaaattacaggaataaaaataatttcttctatttcaaatttcaatactttaaaacgcaactaaacaaagctagaatagaataaaaattaatccattttcgaggtaaatgaaaagcaatcataatgtctaaattgaattaaaatgtattgaagaaatatataccttgagtagaaggcttgcttgaaggaacatgttcgataggcctttcgggttccttgtagtccaacggaggagcaaaatctacctcacaatccgtttcaataatact

SEQ ID NO: 264371 - DNA, 1114 bp, Cannabis indica
ccttgtattctatttttccaggattttgttttattttttcttccttttaagcttaatttgacctcaaatgggttgactttgtacgaccgtattggacacgtatacattagtttggtttccgtagattcgattacagatttgttttagcagtttatttttaggaaaaaaaacaagaatatacaagaaaggcaaaaaaaaaattattaaaatatggccatttcaacaattatacacttcaccaataaaaaacttataaaaataccacttcctcttaactttcagccgcatgaaacagaacaatcaccaaaaaaaaaagagcttcagtcgttcaacccgacaacacaaccgaaataaaaccaaatcaagaggaagaccactattaattccggcaaaatcactggaaaaaagacagaaaatagatcgaacatgaaattgatgaaagaaagagcaaaaaaaaaaaacaaatacctcctaatatcaaatttcagattcatataatgtagatttctaacaaatagatttggagttccccatcaatccaaatcaggtttaatccaaacaaaagaaaaaaaaataatcaataatgtatttcatgtgaaataatgaaaaaataaattaattaagctttgaatataatatctagacaatttgatcgatcgagtcgagagatcacactatatatataagagcataataacacttttcttccaccaaaaaaagtcatcaaagtttttttttctaatagaaaggccaaacaagtaggtccaaaaatggattgtagtgaaatccctgaaaatatatatgagataaacaacatcaaaatgaatgtggccacattggggtcgaaacacgatccggcgatcgtgtttctccatggcttccctgaggtttggcaatcctgggccaaccagatgcaatatctgagtccccagggttactactgtatagctccggatctcaggggctatggaaaaaccgaaatccaagtacctgctgatccagagtcttacagtgttaagaacatcactgacgacatcgtcgctcttatggactttctgaagatcgaaaaaattttcttggttgggcatgattggggagctttcatggcttggag

SEQ ID NO: 264372 - DNA, 617 bp, Cannabis indica
tttatctatgctttgtacgggtatagttgccccccaagtgactgagcagacttatgactcttggtcacttgtattgcacaagttcaattttttgtctgtttggcttttggatttgagcagaccctttgtacacattttaaaggtaaattcataacttgctatagaaggaaaaatgattgatacaattagactgatgattaatatctttattcatttattggtctaacgattttgttatcgtagtaacttacatttattgaattatgtaagctgttacatgatctaattgatctttagctaattaaaacataaaacaattgtattttctaaattgtacattagatatggtcattcgacttgagtgccagtcattttatccaaacccttaagtgaggtatggtcagaaggccatctacttaagagtagatgtttgatcatcagtacttgaaggggatcattagaccttgcacacttacaggtagtattttctcaaatgttccctgttccaataccttggtactagaataagctccatgttgtcgtcatactgtcccagtttgtatgctttagaatttgtgacttcaactacttgatatggtccttcccaattaggtctg

SEQ ID NO: 264373 - DNA, 1216 bp, Cannabis indica
gacgacactataatcatgaacaaatgtatacatatttatatatgttctggacttaatagaatttataaattaaacataatcatgaaataaatcatgtgaaccatgcaacataaaaacgatttttgatctttattaattagtaaatctgattatattgaaatgagttttatttagggcacaaaacccaacatataggcccatggtccccgtactagttgagacaatacttcttgtaagactcagttaattaattttaattaatcaattataattttaaaattagactatgtcttatttataaatttttactaagcaatggcttaattgtgaagaaaagagattttagggtttatttgttaattgagagactttgtggagtctaattaataaatcagttaaatgataattttatttaataattaattataattattacataaataattttggcatttacatgattaaaattgaaaaatatggcatttgtgaaataaaagataaatagttgaaaaaatggcaaaattataactagtggggcccatctatatggttggccacttagtgtataatttaccattattttatcattttttattccatataatttaatcctaaccctgagtgaaatagtatgaaaggaataggatggtctcattatccaataacttaacctctcataacctagtttacattctgtcaaacaactagagagtgattgagacctccttcttccttcttctattttgtatctccttcattgttcttcattaaattttgatcctatagtgagtgagtgcatgcccacccatagcaagtccagtactcaatcatagtgtataagactgtgaagaatccaacaaactgaaggagtgtcgggctcagatcttgataataatctacgataaaaatgagcaagggttagagatctgagtgggaggagtcattatattccgctgcaatcaatgtaaggttacttaaactttatatgtgtttaaattctattattttagaaatttatatttagggtgttaataaatatacttgttagtaaatctagatcctggtaaaatatatttccaacacgttaatcatagatatggaatctatagcttctataagtatttagaagtgaaatgataatttccttcaagcttggcttaatagagataaatgattaagatctcatttcagtaataatgttagaatactgaaatat

SEQ ID NO: 264374 - DNA, 580 bp, Cannabis indica
tcctatcaccactccattaactaccaagatgaagaattcccaccttattaaaagtgggtctccacgactacccttcccaacggtataaattttgatttcttgctattaaatgaagaaataaccttccccaaaatgatgaaaaaatgaataaagaatagagacttctatataatatcacatcgagtacagaaaagaaaataattaatgaagcatatggaataaatgcaaccccatttattggaattaatatagctcacttcaataactattgaccacccaagttttttgtttccttgtttttaagaccagatttaatttcataatcgtttatataggttaaattatttgcgggcggtcgcggtttgaattttttctaaatcgcggtatatggtgtgatttgagattttaaattattaatatgcagttcaaaccgcaccgcaccacacattataaaaataccaatttttatatttatttaaatctaatatgtgaatgtccaatccaaaatccactaattattgtattattgaaacttaattttttttcatatttattttcaagccttatggtatttttgata

SEQ ID NO: 264375 - DNA, 696 bp, Cannabis indica
ctcaaagtggcaaagggagaggtgcagatgctaagggaagaggtgaagacgcaaaaagataaggtgggctctctggaactgaccgtggtgcatgaaaagacttgtggaagagtcacgttgatgttgagaagcgcctgaggaaggaattggactcatgggaagccattgttctgaagtcctttgtatctgccaaagctttagctaggttggctgctacttcttatcaacgaatgagggattttatcaaggctgttgaataggcagaagcttgacatctttattctgtggagatatcttttgtggccactcttaataggctatggaaagtagatcctgcagtcttgaagttgcttggaaatgaagaagatgagtacttggctaaggtacaggccatggagagtggcacctaccttgtgtctccttcacttgagtttgatgaagaatctcgagaggtttactctgctaaagttatagaattttcttctgagaaggaggctcacacttattatgatcaacctccaagttagtcccaagatccaagtaaatcttgatatattatctctaatttcctcttttcttcttctttttttgttatggggggctttttgtccctttttaatattagtggagaaaacttaaaaatgccttaaccgcgaggttgtttgtattagcttagacatattctcttttgcctct

SEQ ID NO: 264376 - DNA, 1674 bp, Cannabis indica
ttaacaggaacatagatgtagatggatatcataataaaggtgttgtatataataataattatatatgacaggaccgatgtgtaattaagctttctttatcgaagtagtcattcaaaagacctaattcatatcacaacaataatcaattagtaaataggcataaatcttgagaaatcatgaagtcttgttcatgttattagtttctttgattcactcattaaagtttcttagagaacatgattattacaactttttttttttggatatatgataatatggatggctggaaacttgatttacaatatggaatcttgacttccataatggatcgaatattaattcctttcatgtgttagttttggaattgaaaagttgtgcacaaatttagatcggatctaaattatactttcactagtgaattaatggtactaaaagataaaaaggtaattagaagggcaaaatagtaattttaccaatgttaattatggaccaatacaaggaaagctaatcactcgtattaattatataaatggacactataattaaactaagtaaacataattctataattactaagaatgtaattccatattaatattttagtaataatagaattaatatatttgattaacgatacttaataaataatctaatttattgcagtttattattataggtccatggttcttagatcaccactgtaaaacacaattaagggtatggatgatacaaaataaagcggagaaagaaaatttaatttgaagtagcaaaatattaattatttatttttaattaataagtaatttattaaaaatgtattattgtggagacaagaatttgccaagataaagcatcatcttgtaattacaagtggtgcttacaacgtatcactgtatagtgatgtcgtaaatgaagggccccactgagtttatttttggattaatattaattaattcaaaagataaataattatttaaatttgaatttaaaagttatttatagatatttatttgtggttgagatattctctcaaagtggttaagagattatttgtaggtggttgagatattttctcaagtagttgagatattccatcaatcagttattaaatatgtagtttaaactaaatatttgaatttacaaataatatatatagcagaattggctacataatacaaaacataacaaagttaatctgtttaaccttttcctcactagtaaactattcttacattgatctttgtgtgtggtggtagatttagaagatcttttgcgagtgttattactgtttccggatacaacttacaaaaagatagcaacgaatcttaatttttcatcatgagttaaattatttatgttcatccttttcatttttgatttaatatttaaacatgtggaggatcctagggtttagtataatgacaatctatactaaatgtttctgatgcacacctggtttagtaccacaaagcacacacaatttgtatttccatgtttcttgtgattttaatcctttagtactgtacaatctcttctaggatgtgaggtgtaacaccctaactgacataggcgtattacgtgcttttaaacatgttgtgcagctcgttactaatcaacgaggtttatggaaaacgtgattaattaaaatttttgctctttaattaaacttataaa

SEQ ID NO: 264377 - DNA, 695 bp, Cannabis indica
agtgagtccacattcacatctgtaatggtggtctcagatgaccaagctctgtttctgaccatgaaagtcgatgacttttccactgattctgccattggaatgagaaatttgtgatgttacagacactttttctctctctgtgttttttttgttctactttggttgtgttcatgtattgtttgcctagcctatttatactactattacactgtttttttttttactatttgctccttactctctgaaattatttaaattaccccctaaatatttgttctttgcaatttagtcctgattatgaatggttttcaaggcctctttatactactcttatgttgtttttatatgaatgtgattattggtttttaagctaaatatgtataaaatgcaatactttgtgtttgtgattgagaatcatttggaaaattatatgttttaaggtaatattatgggtgtgaaaattgggtttatacctctgatcccacagaattgaaaatatagaataatggtattataaatttaagaatacatatttagttatgaaaatctaaaaaaaaaaacacatggattacataaaaatttattaaatttcttttttaaatttgacacacctaaattactttctgagttagtctgtattctttccactataagtcaatacatatctacagagattaaataaaaaaaataaaaaa

SEQ ID NO: 264378 - DNA, 2352 bp, Cannabis indica
ctcattatctacagttcgtccccgaccaaaatattgacaataagaataccacagcaaatgagatctcatgctatgaagatggttgtatccgcataaagaacaaatccactggaatgttctggatggttgattcaggaaaagattgggttacagcagactattctgaagacactgacgttaaagaatacactgttttctggcccatcaaactctcgaaaaacaccatcgcacttcgtgattggaagaggtactcattctgccagagctattcaagtgaagacattaaggaatgtcttaactccagtgcgcttaccattacagataaggtgaagttggaagttgtagagaacatcatctccaaaagtatatatgaaattagataccacaaagaggagggcaaactctacaatctcaatgttgtccaaaagggttatgcatccgccgataactatgaggatgttgaagaacacaatgagataagtctcaagttttcgtacaagaaaacaacctctagtaattttggatccacccattctctcaaattaggtggcaaagcaaccttgaaagttgattggattccattcattgttgaaaatggaattgagtttactactgattatacatatgaatatcaatggggagaaaccaccacaagtgaaactttaatagaggctacttacactgctaaagtgcctaaaatgaagagagttaaagtaactcttgtggccactgagggaatgtgtgaagttcccttttcttatactcggcgcgacattcactacaatggagatgccgtcgtccataaattggacgacgggatctacaagggtgttagtctattcaacttcgattttcgaagtgaatacgaggatctgcctccgaaacaaaatcataaaatagaaatggtgtcgcaacatcaatcaactaaacgatctccacatcctttgattgatggccatgagtcaataattcaaggtaattaagaatgattaccgtggtgtgctcattccaattcaataattaataataaagctcgtgatgagactattaattataattaattagtttcatgcatgcatcatgagctcttagttttcaaacttctaatattgtactttactttgtgtttaatttgtttgaattttgagatcaagtttcttttgtaattgaagaatataattttcaaggaataaaaataagcaacaacgagttgttatattaatttggttgtccacgttcgctactttatttttattttctataacaaaatggagtcactcataataagggtttgactttccatctaattaaacatttttctctttattcgatttgaagaaggtagagaccttcagtaagaaaagcaaaagagagaaaaaatgaaagaggcagaaccaaagtgaaacagagaaaatgaatgaaagcattactcaagtagcttggccctttatttatacacaaagatcaatacaatcctaatcaacatacactgaaatgtaacagacacaacagaattagttaagtcacctaactaacttaaccatttaactgaaaacaacagtcaagtaacagattttaaaacatgcttaacatcccccctcaaacgaaaaggtgtctcaaacatcttgagtttggattgaaggtacaaaaatctctctattgacaagggctttgtgagcacatctgcaacctggtctatggcagggacatatcgaagagatagttgtttggacaatttgtgctccctaataaaagagaggtgtcttttcaaaaaaaaaaaaacaagagagaggtgtctgaatgcttaattgtgcatcttgaccttgatttttctaatgatactattacaatcagtcattctctactttgttggccttataggaactcccatatacataagagggaagctaccctattcaaattgaatatcattaagaataagagctctatcctcctttgaaacccctccaaagttgaattttactcatgttggcatgtaaacgaggcattaggctaaactcatcaagatcctttttttgaaaaactgaagttaccactcttgacccttttcataaaggatcaaatcatcagcaaagcacagactaatgatcttgaatcttttgcacaatgggtgaaacttaaactcctttgagcaggaaactttttgaagatgcattgtgaaataatccatcacgagcacaaacaaaagagaagagattggatccctttgccttagccatttattttcgtgaaacgatccctccaatctatcattcatagttagagaataagatttgtttttcatgcatgtcataagggaaacataaagctttcgatatatcttctaagaac

SEQ ID NO: 264379 - DNA, 765 bp, Cannabis indica
ataatgacttgcaagtgtccatctatcggtggaggtaacggatcctggttgttctgaccttggttggccttgacgtacttctgtaagtgcgggttgtttttcttgatcagatattctattttccgcttcaagttgtagcattcattggtgtcgtgaccgtagtctccgtggaaccaacaaaatttcatcatgtcccttttattggtatctttcttcatgggccagggcttcttgtacggaattaacgactgagttgccatatacacactctctatatcttcagttagaatagtgaatgcagtgtgtttggcatgatcacggggagtctgttcagatttctcgttgaattgtcctttcttcccgtttccttgcttgtggttgttgcttgaacgcttgccacatgaattgttgaaataattgggaagttgggcggatgttccagtggaaggagccttcgttttgcccgacttttgctcaccttctgctcgttgaatggcttcttcgagattgatgaagccttcagctcggtcaagaaaatcactcattgagtcgaccggtccgttcttccttatatccttccatagttcaccaaggacttcaatgccccccaatatcgcggataactttccatcctcgattacccgcgacaccttggtcgctttcgtcatgaatctgctgatgtatgcccggagtggctcgcctggtcattgctttacttcgaccaaatctcccagatgcaatgggagctgacgtgaggaagagaat

SEQ ID NO: 264380 - DNA, 1392 bp, Cannabis indica
aaagtaacttgggtatttgagttccgagggaaggagagggtatgactgttagggatacaagatgtggcgttaatgttgctgttatgtttatgaaaaatttaatgctatagaatggttacccatttagccgagctaaaattagttaatttttggttcatcctaataaagtttatctcagtatgccagtttccatgatattatgatactatgatttattatcttaattgtatttgttattaattcgacagtcctaaaggcctcaagggtccgtggttgttgttcatatctgagagtggatatggaaagcgggttccattgagcagatttcgttcatcacctttgaatagagtgggtttgataggatacaaggtactttcaacaggatttggatctattatttaagactgaccaaatttcttcttctattctaacgggtgtaccacattgtttcagtttgctgcagaggatcgcttggcagcagtttttgtggttggattttcattggcaggtaagagtaatctcttcagttgatatttgattgatgttaaggaaggtctagtctgtaagtttattttgtattttataaaaaacaaataacagaggatggtgaaagtgatgaacaagtggtcttagtaagtcaaagcggtacggtcaacagaattaaggtgcgggatgtctctatacaatctcgctacgcaaggtaaatgcaaataagcttttctttttctttacctatgtttgtgatatttggcttcaagaactgccctcattattttcccaagacattagaaaagacactatgcaatgtggatccttaaatattgacacatgtaaactgtgaatccataattattgtgaatccataattattgtaaactgtgaatccttaaatattggcttaaagaactgccctcattattttctcctttgataccgttgttcatcaacatagcagcccatctgtattattattgttagaaaattgtctgtatcaatattgacacatgtaaactgtgaatccataattaatgtgccagcttgtgaagttgttatgtgttcttgttatgttgactatttttgtaactggcattttctcttcaaggggggttattctgatgcggttggaccatgctgggaagatccagtcggcctccttgatctcagcaacagaatccgaggttgaggaagaagtcgcagctatttctgcctaggtccgtgccaagcaattttgtttcttgttgtgcagaagaaattatcctaaacctcctggccttcgggcactgttgttccccactagataatatttatgtaaatggccgtcgaggaggtgaacgctgaatacaaaatagtcgatttatgtggaaagtagcaccgatgatattgatagtatca

SEQ ID NO: 264381 - DNA, 1771 bp, Cannabis indica
attattttgttatgacttaaatataccattatattttactaaccaaatatgacagcacacatattacttgaataaaacaaatcattcgcatgattatacatttagatacaatctaaataaaataacaaagaactaaactctaaataaaactaatatttacgtgcctcggcacgtaactttaactagtatataaataatagcgataaaatttatattttgttcatattgataattttcaatgtattaaattctttcacaagaatagaagggggaagaaggcatgggtgcaatattcttttttgttattttgatgattattacttatgtaagcatctagatgtagtagaagttgtattaattatggcattttattcatttagttagcaattgtcgattcgtaattgaatgtttctgtcaaggtaccgcaactgacttggtcgaaatgggatatattctgtgctccaggctttggattaatccaaagtacaacccaacagtatgaaaatttgattaattgcacaaatttgtcacggcaaataaccatttccaaagctttgtactttcactacgataaagtataaaactagcggtttcaatgaaaactcaggcctttcctaactacaatatatcctttgatgtagactgcatataagacgctgcaagttctccatttaaaaaaaaaaaagtgctgcgaataaaaagaaaaggcttcaaattttactttgctgcacataattttttttactatggttgctgcacaaaaaattgttgccgaaagtttttattgatttatttgtttatcacaaaactacatattacatccaaaaattaatttctataattgataagggctgacatatagaaactagaaagtggtcaaaattaaagatttgattatcattaatagtaaagtaactgaatttgttgaatgggtaaataaatgacaaagtgcatgagtgattgatcaacgatattatcttggttaaatgaaaagtgattagatataaaaactggtggaattacctataaaaaagttctttgatgtttaaagtcaaatataagttctcttcaaattcaataacacaactatcaaactgtttggactaatagttagagttagtttagacagataggtaagttgattagagtcttagttgagttagttagatgagttttctcatcgtttagtaacaagttgctgaatttagttactagtcttgtgtataaatattgagctttgtaattcattcatttcttgaatccatgagaaataattcattatttccttctatttttccatttccatttatgttctttattttcatctttcttgaatttatgatcaatacctcgtagagaagttcagacatgaaacaccaccaacagagagaattctttagatgaatctaatcgattttgtgttcttgattcacaaaaccgatcactctgatgaaacacgtagtccttattttctgccgcatggagataatcctgggctagcttagttccgagaattcaagcatatattggggaagttaattgataaggtttacatcacgaatataatacttctctacgaggaactccagttttatttgctagaaagactgatgaatctgtgcgagtttgtgttgattataagaaattgaatcatcaaattacaattaagaacaaatatcatttatccacgatggatgagatgtttgatcaactgtaaggtgcaaagtatggaggtttgctatactcatatttcgagccataaatatagaca

SEQ ID NO: 264382 - DNA, 607 bp, Cannabis indica
atttaggtgtcgtttggtaacaattttattttttaaatttttaatcacaaaacgaaaataaaaatttttttaaaaaagaatatttttgaaaaataaaaatgcgttctgtaaccacttttgtattttaattttagaaagagaaaacaaaagtgtgttctgtaaaatttatttttatttttattttattattttatttaagtcgagtctaagtccggagtcggattcaacttcgtgtcagaagtcaggttcagcgccagggccgtggggggatttggatccgggtctaatgggagtccagaatattgattaagaaaaaaactgtttaaaaaaatattgaaagttactatttttatttttaaaatttttattctcaattaaaaaattgaaaattgaaaaccgtttctagtttttaaaaaaagaatacaattaatgacgttttgatatacaaaattttaacttgcttcagtccaatcaccaagagaggccgttaagtttcccgccattctgtttgataacaaacaacttcctcaactgttacaaattatcaacataaacaccaatccattttctttcttagtacacaaacactattagtatttattctcct

SEQ ID NO: 264383 - DNA, 599 bp, Cannabis indica
aaacctatccgcagtttcaggagtaattactcataacattaatgaccgtttcttttacttgatcataatcgagtcacaacgataataatcatttcatatcatttccctcgataataatcatttcatatcatttccctctatcataatcgagtcacaacgataataatcgtttcctattatttccctcaatcataatctagtcaaaacgatgataatcgtttcatattattttccctcgatcaaaatcgagtcataacgataatattcgtttcctattattttcccttgatcataatcaagtctcaacaattacataccgggatcttgatcataatcaagactgcaacaatcaaaaacgttaaccatatacggagcttaatacttttcttacctcagtccagtagttaagtatgcgagccgacctcagtggaactacgctcgacgatccgggtcctatgtcacgataataaagctcaataaacaacttaatctaaacattggaataaccctaacttcgcaatcagacatattccaactctccactagttcaaaatagcttatatgttactaaagtactcaaatctaggctctcaaaaaca

SEQ ID NO: 264384 - DNA, 755 bp, Cannabis indica
atgtttattaaataaggatagatttgttgagatttattgaagtgcattaaatgcctatgggtaattagaaatgatgaggagaaacacaataaagaaggtgttgacctcgcttttagccaacgatagtgagtctaatttagtaagcgacaagtagtttataacgattgaaatatgataaagcaatgtaaagacacaagaattttatagaggttcagccccaagtagttcggtaatagcctaatcctcgttgtttgtattgactcaagaacaaggagaaaggttccttttcttatagctcttacaacagtatctctgaatatgaattcttagacaatatcactcaagtaaaatctttcaagcccttgcctagtgaatatgcatcactatttatagggcatgagcttggagaggaagtatttcccttctcattacaatggatatcagcagaaagattgcacagtaaatacagaataaactgatcgtgggatttggacaacttgccatatctctgtaatatgatccccaagttatagggatttccttgatgactcacgatgcgaaagctgaatttgctaagtgtttgtcgctctgtgcagattgctaattgctttacctcgagcatgcacatgaggtatcctgttcggactatatcttgcgagcggatactctgagttgattccacgtgtcaccatcatgtgatgccacgttagagtgcaaaaattgggataacatttgcccctcaagtctgtacggga

SEQ ID NO: 264385 - DNA, 3825 bp, Cannabis indica
aaattatatataaatattatgtataaaagcacaatgagaaaacaacacaataaatatataaaatgaaatgatcgaagaaagaagggcaatcatcatcaaaggcggtggattatggttttttacagttaatgaatcgaagaaggtcggagagttggagatggacggagggtttgtagccggagcgaagacgagcggccaagaggaggcgggttagtcttcgaatgacgacgtccggtaagtgattgcgctctagagaggcgagggcaagcttgactgtggcttcgtaagggagttgaacgagggcagccattgttggagggagcgaggcgggtcggctttctcagtttctagtttcagtgaagagaagagaaaagagataagaggtggcttgttaggcatctccgatggtgtttatatttttattttttttgctcaattggaccacttcattaactttaaattttttagtcaattagaatttatttaaagagagcctaaaagttaggctaaagttattgtagtatttgaaaaaagttgtccgtagatatatacttaaacatgtaaaggaattataagagtaaattgcggctaaactcctaatactttcatttcgttagtaattaactctaaaaattcaaattttagcggcaaaacttccaaaactcatattctattagcatttagcaattttcgcatttagcaattttcatctatctatggcagctaagtgccaagttggctatccatgagtatatattattgtccacatggacacaatgtacacgtgacacaatttaattgacccacttagataaatatttaaaaataaaataaaaaaaatatataaatttgttaaacattaaaattttaattaataaataaaattaaattaaaattttaaaaagaaaaaaccttattttaggagccctacaatttaaaaaccctaattcccaattctctcagtcgctctcccattctctttccctgttcatttttttcttgttcccttaacccctctacctttatgtgcgaaggcactaccattttattcggccactgttggtcgttcccattgaagaacatcggagaaacaagatctccaccctcaaaagtccctagaaccaggacaccccaattctgaccccctttctatctcgttctagaacctctcttgtctctctcgatgtggtaaaatgtgagcttggttctctcatggaagaaggaagaattcaagaactacaatcagaccccatcctgtaattgagcccgacgtcttagccctggttcatgcgcccccattgcccatgatgtcaccgcggtcaatggtgagctcacagctaagctccttccaaaggaaaatcaccaaaacccaaaataagaccaatccaagtcgttgattctcagtctctccatttaccaggatgagatcatgcgactaaagattgatgaggaccccaagctagaaccatgaaagaagcgatttgaggtccttgatgtgactttgtcagagcatgatgagctataacaattcttgttgatagaggcgcaatttgtgccccctgaaaggcttgtgcatttggagcttggattccaagagcttgtggatgacctactcgctgaggaggatttatggctccatgttgtcctgaaatgaaaagttatccatgtgcaaccccctatccaggataaatgactggaattcttacccaattagatagatgtccatttcatcctcgtccttcgatttcatccttcaaatagttacattcatttgtggtgtgtccaatatcaccgtggtattcacatctcttgtttggatcttttctctcttctgcccttgtacattggcgaaggcttcttgtaatggaccatgttacatgttgccttatacacattctctcgagtatctacaagacttgtatattcaatgtatcttgacttttgggtcttttccttctttgtagaatcactccggtttggaccctttaaactccttttactctatggcagggttatgttagactctggagcttccgctttttggttcatttgtctgggaacggcactatatccagtttgtccagctctaaacccaaaaactagttgtgcagcgggctgcacagaaacacttggtctgtaaaccataagagttataaaggtagttgctatagggtaaatggatggagccgtcatctgcgaagtttgggcatttgttacatcggtagaaggtgatggaagtactttgtatgcttgagtataatcttcttctaaatttatgaatccctgagctcttgtcaagaaatcagttaaagtgtctgctctcttgcactggagatatccccacaacaaagatccagtagctagtcccaatgttaaggctgccattttcatgtcatcagtaaccttagttttagtagcaacatccatcatgtgttggatgtatttcttcaggctttctcctggttgttgcttgacattggtcaggtaactggcttctaggtgaaaggcctttactactacaaatttctttttaaacatctcctgtagatctctacaattttggatcaatctcggagacaacctcttccaccagccttctgcggacttgcttaatgttaatgaaaacataaacactttgcatcgtcactgtccttggcgacttgcatagtgcggttgtacttggataggtggtccttgaggtctgtccttcccttgtatagttccatctatggcatttgaagtgctccaaaaatggcgcatcaatgattcttttcacgcacggctctgtatcttcttctttagagtctgaaaaagtgtcgttttgctttctacagatcttctctgtgattttcatcaactcctcgactttgcattccaagcgttgagtcttgtcacttgaagattctcttctacgaacgcgatcattgatatgatttctcagatcgttcttatgggatctaactttttctgctttggctttttttttctcgttcaatcttcttttaagatcatttgtggagagacttccactattgccatctgatactggctacacctcatcaacatgatcatcttgattactggaatcacttggatgatttttgccctttcgggctctagcttccgaactccggtatcagccttatttttatatgcgctatgcctctgaattagtctagttaagcatggtttgctttcttcttctattaaggttcgtcaacagttttggacttcttttgctgcttggttgaaggagttttctttgaagtttcaacaattatccctttccctttatctttgcgaagacctgaggtttcaagatcttttgaatctaccctttcaggagcatcagttgttggaggagtttgaacgccaagagtccctttgattagggcggtcatcatatcttccattctagtcatctttgtgagcagtatctcgttaaattaatcttgacgagtcaatctgttttctgctaattgaagttgtttagccataatgatcacagggtttgattcttctctctaacatcgtcaccaacaattttgttttaaggattgtcttcaggtgtatctttgagtgtatcctgagaattatcttcagtgtcgtcataactactctctcaagatttcgcatcttcagttaagggatcatctcgattccgatcttcatcatggtgatctttatagcgactggtcacctcatgtggatcaccaaggtttcttgctttggtgctaggactagtaatgtaaagtaccaaattttgttcgggtgagtatcatgattacttgaacgtaatcactagacggtatcactgcttcttct

SEQ ID NO: 264386 - DNA, 580 bp, Cannabis indica
ttttttattttttgtattaaaaactaagagcgaagtgatatatatgacatcctaattatttataaaaattattgggtatatatatatactaactatagattttatcatgaaaatatgactaaaatgtaagttattttttttacatattttatctcctatttatgttgtatttgtattattttaatttttacaaacatatgacttgatatgaaataaaagtagataataatcaatgtataaaaaatggtattaattctcataagaactaaaaagaaaattcaatataaataggatgtaaaataaaattattagtagtttttttaaaaaataaaaattattgaatatttaaaaaatataaacatgtaatattacacttttaataggatatactaattaaaaaatattttaataaacaatattatgttaaaaaaatgatgtaattatatctaatatataaattttatactaagagttgcacatgcaataaataaaatattttatgcttccatatccactaatatttcgggacgggcacacttatagacttatagccccagtaaaaaaaaacttgcgttaaaaa

SEQ ID NO: 264387 - DNA, 2383 bp, Cannabis indica
caaagatattctccctgaatattttgagtcattttgaatagaattctcatcttctgacactgtcctagacaagatgacagttacactctgaccatcttcttcgagaggcatcgtccaagagtcatcaaaaaagcgagtgtctacataaacttgttgacaagacattatcaagccaactttgcagagatttttagtggtaaacaaaaattaaaatttttgcgttgcgagtctttcatgatactcttccaattgccacatctcttgttcgaagaaaggttattactgatttcaattgctcaatttgtcaacaggcttggacatgtgctccaatgttttaagttgagataatagaaacaacgtagttgagataatagagacattatatgttttaagttgctctaagacatatggacatgcactttttggttgtaaatacgcccgggctatgtggcgtttatcttaactatgttttgacggatatgcttcttcttctatgaacatgagagattatcttgtttacctatcgacaatgcattcgaaagctgagatggagctgatttttttacactttggtgcatgtggactgaacgaaatcgtgtggtccatggacaaattaacgaactaattgccagccaacttgcctctttcgcggaaaattatttgtctaactacagatctgctcaagccaagtatcacccaccagtttattttgccctagagcctctaaactctcatgctatctctgttttgtggaagccacctgattcggggaatctgaaactaaatgttaatgcggctttggatgctcagagaaatataataggagttggtgttgtgattcgtgaaaacattggtcaggtggtagctgcccctctcgaagcctcttgttggaaattttgtttctcatgatatggaataaggcaattttccacagcttgaattaggtgcttcatatgcaactacaaattttacaagtcgaaacagatgcctttacggttactaataccttatatggtcattttactgcaatttccaattttaatgatctgattattgatattttgtgtcttcttttctttctctttagtgtgcatgtcgtacatgtcaaacgtacaactaatatgattgctcatggtttgactagatatactttaagattggatggagcttgctattagttcgagattgttccactatttatttatttctgttattgtaaatgacttaccacattaatttataataataaagtattttcttaaaaaaaaaaatacaatcatgattatcaatgagatgtgttgttcaaaaagaaaaaattatgatgggacgtacaaaagagggttagataaggaattatattagttcttaccaaaactgaaaatactatcaaggatttgaattgctttgctgaacattcttgcccaagcttacacaagaaaattcgaccaattaaatttattctcaacctaaaaaaaaatcttaattcaaccaaaaaataaatgaaattttagaaaatcaagttcgaattaagtattcattgaaaaaaaaatggaattaagtatagaaggcaggtttatttatttatttattattttatttttttgaaaagtagaaggcaggtttaattcatcaatgaaaattacggtgaaagagagaaattcaatattcattattatgacatttacttcttattggaaatataacaaatcattaatataatttattttttggatattaattccataatccgaaacttagagtcaacaaattaggacatagtatcagtagcaataataatgatatattatctttctaaataccatattaaaaaaaaggtaaaactgttcttattttaatagttaattgtaactccttagaaaataaaaaatagttaactcaaacaaaaaatattaaatataataacttcttacttttctatcaaataataataataataataataacttcttacttaattagttatttgctgctttttatttgggttggcagatcttaattagttttattgtattataaaaccatgccgttaagaattatatgattataaatttaaatgtttataagtttttgagcttataacatgttatttaatttaatttattagaagattgcaaatttttttttagtcaaattttaaatattaacaaatgtttttttttgaccgaacagttgaattatttaacaaatattttatattgtctcctaggttttctctcctgaaattcttagccggttgtcatttcctccggccagacgagtggttctcctttagtgatggactcagaaattttactttgtgggagcttatttatcattaaaaaataattataccaatattataattactagatttatttaattt

SEQ ID NO: 264388 - DNA, 661 bp, Cannabis indica
gcaaccagacatatcgttatacacaatagcaaagaacgtgccccccaaaaacttcactggtgccgacatgtatgcattatgtgcagatgcatggtttaatgcagcaaagcgcaaggtgattttagtcatttctatacttggtgcattagaaggagggacctaatatctttagctattatgaaccgaaattacactggcaactgaatagcagcatttagtgttgatttaaacttagttttcatgctgctcgttcttagacatgtttgccttttcttataggctttgagttctgattctgattcttccatggataatcaagctgattctgttgtcgttgaacatgaagattttatggaggtacgttgctgttctacatactcaagttctaagaaataagagagttgaacttttgtagcaactctaatatattcacgtctgcttcggcagaaaatatggtggagcagttggctttatgttgttatgatagtgaagttttacatgtcgatattatgattccaacatataaagagtacatgtatacacaacatttttttgagatatatatatatattttatttcctccttttcatattgatagatttccaatattatggatttatctgctgtttatttctctccaagagactttggcatttgcatt

SEQ ID NO: 264389 - DNA, 1668 bp, Cannabis indica
ctatgccatatagacatatatagacgtgtgagagcaacacgtaggtctatgccacatatacatatataggcgtgtgagcgtaacacgtaggtctatagcaaatacacaaatagtgcggtggcaccattaattatgtgataaatatatatattgagattaagggttatgcgtttaaggcataaccaggttggactaggtaactagaaccgagatgaactattctaaggccttattgtatttagacgtgtgagagcaaaacgtaggtctacgccacgtagacataaatagatgtgtgagagtaacacgtaggtctatgccacgtagacataaataggcatgtgagcgcaacatgcaggtctgtgtcacacagacagatttgaatgacattattatttgttttatatgatgaacatattattgatatgtttttatactgtcttgctgggcttggctcacgggtgctctactgtgcagaaagggtaagactactgctgatcagccatgagtgcaggagctggacgaagaatgtacatgtccgggccatatcagaccaaacgggttgtggtctaccagtgttgtgtttttgagactctgttttgccgcttaggccggctgaaagaaaaggacttgtaataatattttataaatgtttttgggatcccaacttctgtaacttttagattataaagtttaaaatattacaagtttattttcattccaattattattaaagtttaaactccgcgccatttttttttattagtaatcccgtttaggggattagggtttaataagtgacttgggtagcgtgcctaattagttagggcgttacaagttgtataggcgacgattataaaaaccgaggggaatactttaaacaactgtttataaacatcggaaaaactatttttatagtagtgttcataactcatatatatggacatatatatatatatacattcacatcacaaagaaaaaggttaaggggcaccataagattttatgcattacaagatgtggtatatcgttattgttgcatttcaatatcgactcttaaatatttttcaaaaaataggaaactgctaactaattataaagcaccacatcggtataatattagataccttaagtgttgtgaaaattgtgtacgcaagtatacgcagtcaagcaagtaataaagtgataagtaagatcgtctccacagggattgcaaacaaagtttgatgtaaaaccaactaattacaacttaaagtaagaggaaattacatgcaaatggttgagtaatgattccaaatttaaaaatgacatgaattaaacttgctaaaattaatactactgctgctaaaaaaattgcttgcaagataaaaaatgtaatatggtaaaaatggcttgaatagctaagggaaatttgaaaaagtatactttaaagaccctaatattttattcttaaaccaatacatttcaaactagaaaaatatatgacacttttatcaaaaacccaaaataaccctcacataactcaaccctatttttcccaacccgcacatgcatcggaccccccccatcggacccctcggacccccgactcgaaccacgtcggaccccccgacctcggacccgttcggtaccccgtaccgcttcgtcaacgcgactgggaccccccgtccc

SEQ ID NO: 264390 - DNA, 536 bp, Cannabis indica
ttagggcataaacccaacagagggtcatactcgaattcatgctcagccatgtatgcctaaggaatgttgttggggactgatgatgaagggccattggttcctggtttgggtgtgacccaggatttgtcaaatctgtagtgacaaactggtgttgtgtgtccatagcgaaggcataattggcaaagaggcctattttgttgattctggggtcgaaagttgggtctgccaccatacttcgcttgctgaggtggacgatatgaggggttgtgtgagccagtaaatgcaacattagcttgaagtttcatggtggaatcagtgatagaactgtgatgctcaagccgagtttcatgggaaagtaacaaggcttgaacctcctcaaatgttagaacatcacttcttgcactgatgcctgagacaacgggatcatattctggtccaaggccgttcagcaattgcaagattagatcttgatcaagaattgaggaaccgactacagcaagctagtcagcaattgcctgagttttgtcaacataatc

SEQ ID NO: 264391 - DNA, 646 bp, Cannabis indica
agggtcagaggaatgacaataacaaaagagttactacctccaccggtagatgggcatctgcaagtcatcattggaggcctgcatattgctggagattcaggcaaagctcgggagaggtatgcccaaacagcgcagcatgaacaagaagaagttatcctggccgtggaagaaaggaagcccaaagtttcacgagcaggagagcctaccataacttttaacgatgaagacgctgtcaaagttagatttccacacaacgacccgctggtcgtggaagtccagatagccaataaaattgtcgccagaaccagggtagataatggagcctcttccaatatctccttcaaaactacttatgagaagatgggactccaactcaaggatctaaccccatgtctcctgcctgtctatggtttctccggtcaaggagttgcacctctaggacaaattcgcctacccctcactgttggacaatggaggctgcatgggcgagatggtgcgacgcagaaggctgcaagcagcctgctccgcgcgcggagcccagaaattcagacaaccaggttgtctgcgcgcgtgctgtccgagggacaagcctcgtgcgtgcgcgtgactagatgcacgacacagatatttttcgaaacttcaaaaa

SEQ ID NO: 264392 - DNA, 1275 bp, Cannabis indica
ctagtgttattactgaagaagatgtaggttttaagattgtttatacgttggccagaccaatcataaaatttctccaggcattaccgaaatccctttgcttctgcaatagtcgctctacccacaaggataaggtcatccgcaaagaacagatgggagagtctagagccatccctactcaaagtgatacctctaatggaaccagtctcaagggcattctcaagaatacgcaaaaggatatcagcagcccagataaagagatatggggacaatgggtcaccctgccttatgtcacactcaagagtcaagttactgattgaacctccatttaagcaaatgttgaacgaagtcatagaaatgcactggcagacccaattacaaaacttttacggggccttaaagctacgaaggacgtgatcaatgaattgccagcttaacttgtcataagcttttcattaggtctattttgatagcaagaggccttctttaccttttttaagattaaaggaatgaacgatctcttggaccaacacattcttatcattaatactaaaaccggaaacaaaagtcgtctgagtagggcaaatcagttgggggaggatcggtctaattttatttgcaattatttttgagataatcttgtacaccacattacaaagagaaataggtctgaactgagagactttttttggattgggcaccttaggaataaggattacatttgtcgcattaatgcccctatgcatggtccccgacttgaagaaatccacaactgcctcacaaaagtccatagcaactgagctcgagtaattcttaaagaacatgactgacataccatccggacccggggccttcatacaccccatagagaaaatcatttgtctaattttctcatgccctgagattaattctaggccatatctctcttctgggggagagatggtctaaaatcagatggtcgagacactcaagacgaccctgagctaggttggcaaagatgttccccaggtagtcaaagaattctttgccaatatccttcctactcgtgattcaaaccccatccttattcaagatactctcaaccacatttcacctattacggatggtggctacaatgaaaaagaatttagagcatttatcccctccttaatctaagaaattgggtcttagtaaaatgtagtgatataagattaaataatgggcaattttcatttatatacaagtaaatgtacaatattacaaaaaatgtgcaaagaaacataattacataattttata

SEQ ID NO: 264393 - DNA, 524 bp, Cannabis indica
aaacatgagtgttactgaatacaggactcaatttgatcgcttagcaaggttggcttcaggaatcgtgctaaccgattttagcaagaaagaaaaatacctggacgggttgaatgtgaagatcagacacgacttaatgatcactactgatgacatcaccacctatgctgatatggtggataaggcactacaagctgagggcgcagtggagtgcaccttagagtctctagggactctggttgttggtggggctcctactcctcctacatcaggctttagtatgggaggtagtagctcggccactgatcagaaaagaaaggaacctaatgcatccagcggctcgggtcagaataagaggttctgagggaactagggccgaggcaaccgccagagtggcatcaagacctgatacacttacccagaatgccccagttgtaagaagcaccatctggggtagtgtaaagggcaggagtcttttcagtgcggtatgctagggcattacaaaagggattgtccccaactcaaga

SEQ ID NO: 264394 - DNA, 1467 bp, Cannabis indica
ctccaacaagtgcatatatcagcttagttcggcaagtggtgctgagttgtcaagaattgtatttcaaatgttctgtaactttaacgtattttacaataatactgtaatgacatgtcttgtaataatttatagtaggggacttacccaatacgtaaaaaaaaaaaaaaattggctatgccatgatttcattatttagaatacttagtacaattttattgaatcacattttatctaaactaatagtttattatcataaattagttcataaatacacacaagtgtcatccctatagattagggcattacactgctgatttggttttgatttcggggagcgttatgagaaagggcactttggcagaagaagaagaaggtcttagaagaggaagaagatgatgatgaagaagtgcaagaaacaaagaaaaacaaaagaaaaaaagaaaaaaaaaaaagaaaaaaaaattataacttccaattgaaatattttatattttaaaattaattttgtaattttaattatttttttattatatttaaatagttaatattacgtaagccacaaaaaatatgccacatgtacgtaagtgtataatgtggcatgttccactatgacatttaactgcggtttctagatatagtagtaaaacgcaaaacagaatggaggttatgttttgacgagaaaaatttagatttatatagttatgtgttacaaaacataaagtttaggtggtttactaccaattatttttaaattttaaaagggagttttatttgtacctatacaagttatttatgcacactatattttaataatttttattttatattaaatatatattttcatttatactagttttttaattttttctccttctcatattcaaaaaaacatttataaaataaaaattaaatagtttttaaatattaagacaacaaataaagtaaaatattatattaatttatttgaaaaatataaaaagaaattataaatgattttttgaaaaatataaaaataaagttaaaataactattgataataagaaaaaaagaatgtgatttttttctttcaaaaaaaatattaaaagtgatttttaaaagttaattaaaagtaattttttttttttaaattgaagtatacttagaactttgtagagtgtaaatgaaatttttttatttttaaaatattttatattttgattccataaaaaataatatttttgtatttatatccttatatatttttttatatccggataaaatatatattttttatttttatttcacatatttttatttatattctacaaaatttatgtttttattttgttctctcataatttttatttttattttccacaaatttatagttttctcaataaaatttcattaatcatcttcatagaaaaaacaagaaacaatttttgccccaccaaatatgccactgttcacacctctccatctcctcat

SEQ ID NO: 264395 - DNA, 676 bp, Cannabis indica
ttgtaactaacttccagatctttgatcaaccctaatctacaagtatataaagggactagagccttaccaatctctaagttaagagataccagaaaccagagccctagtttaccagatctggaagttgttcagctccaaatcgatgttccaagttcatgcaaagcaacaacagagagttagtgagtgagaacagaaaaatatagagagataaacacagaaaaccaaaaagagagataatcagaaataccagtcaaagattgtgacttggatttctcacctgatgtaacttttcttcaatatagtgcaagatctgaggtcgatcttcaaggcgagctcatcagaggacgtacccctaatttctagggcgaacctctatatttctggtgtttgttttctctctaactctactatttttggctttaactttgtgtgtgtgtgttgtgtggtgtttctgggaagttttctgggtaagatcgatcaagagatcgagctagatctctggttctagggtttgagaaccagagagaaaggagagaacgagagagagagagtctgagaactctcgaaggttcgaaagaggaaatgagctagggtttgctctgattcctcttggttttattcgaaggagaacgacaaatcgtttttgatcaaacgatttgtcgtgcaggtaaggaac

SEQ ID NO: 264396 - DNA, 1172 bp, Cannabis indica
ttttttttttgtaaggatgaaataaaactatattattattgttttatttgtaaattaattatagataattcatatacacacgcacacgctatactatagtccagtagtccgtgccgtttggtgccggcgcttctgaacatccaaagtagtgaaagtgattatcatttgactaaaatacacataaaatctaacttatcagcaccttcacccataatttatgcactttcttttgtcatttcattctataatatttctctttattttttttattttttctgacactacctcttcttcttgatgtaaacgtatttatatttatatatatgttagtcaaacacaatggggactttttccttcttcgtaatatttcaatttttttttttagttttttgctgagagggagagaaagagcgttattcaaattaatgatttcaaactctgttgtttttaattgaattttatacattgcgaatggataatataatgatcgaattttatattatacgatgcattttctgtgtctttgtacaacaaaatattcattccttgaccaagtcttagtgactgtagttgtagctaagcttaaataattgttgatggtgcgcaacttgtcattacttcttaatatattagttaattaattaaatttaggagagaaattgcctaaataattagatgtaggtaggtatgtaaaagcacaattactaatattaaaaggaaggccattattattattatgggtcgtgcgaaatagtgacataaataagctacattattatatatgaaaatatactagttgtgattgtgaataaaataaaataaaaataatagcaacgtatatatataaaatgaaggttgttaggcatgcagggtccattaatttttctacgttattcaacatctgcatgttaaaatatggccaagaatgataaatgtgaattaatggcataacacacatacacatgtatatattttggaccattttttatgattttaagtcaaatataaaggctcatgtcgtctttatatcctatgcttgcgcagttaattaggtataagaaatatgtttttgagactgatatagatgagtgattctcaaaaactctcatgaaaatatgtatagaattaaatttacgagtgattacaaaatcttgagagtttgttgatataaa

SEQ ID NO: 264397 - DNA, 4480 bp, Cannabis indica
tgccaaagaggatcaaacacctccaacatcttctaattattttcttcacttaaattttgttttaaaagtcccagctataactaaaatccgtattatttccaaacttactaatgtttatgttgaatttcaaaaatcttattgtaaagtcgtaagacaacaatttttttttttgataaactcaagacaagcaacttactcatagtctattctattttattttgagttttatttttagattcgttttgtctgtactattaccacatgtactacgagtacgacaccgtactcactgaataatacagtgatatgaacgtaaaacagatcattaatttgatttaatatcttttaagagatgctccactactccactgcccacgtgttagtaagcttttgtggctgtttcttgtcctaatgtttcgtcaaaacaagccatatttcattatcaagataaaatcagagacaccctaggccatatcccaattaaccagattcaaagaaatgacatttacgaatcatattattttatcctttgaaatgtaccattttcaaaataaaaaggcatggcattcaattcagctattatattggttaccattagaaattaattactacaagaaacaatagcacatttcaaaaatagttcatgacccctagcagttttttttaagtgttattagaaattaattatctctcatttcaatatatggtgcatttttgtaacaaagttggacatggattaagttattttatacttgcgactaataatgagttaacaaagtacaataataatttgtcgtgtatcttaactaatgtacttaacgagttttatcaatgaacattagtcctttatcaaaaaaaagaaaaaaaaattacatttacaaaaacagtcaatattacattgttgtctgaaatcattagttgggatcttatagcaaaattggaaagtattcggttaggagagcggccataatgtaataatgatttggaactaacgaataataatgattccaccaaaggtgaaaactttctgtggagggtgtgtaataaatggctacttgtgggagaagcctttttgtaagaagtgtgtatagaggtgaatctaacttgctgttggtatcgtaacaaaagagaataattttgatcgaaaacaaaagagatgtattgtgcatgttctttggggttttgcacattcctcacaggaaactggaaacttgctgacttgtgtgactgcttttcatcatatttatgatgactctattaacatttcttatgcaggtgcactctatgtgctcaactgagaaattgaccaagttcattatggtgccttgggtgatctggaataggaaaaataaaaggctgctgaattgtcatgttcaaacttacgaggatgttgtggaaggggactctatgctggatacaggattgctctaatattgctgctaaaccagttggtgctctgaaaagacatgaaccagattgtctccacatcttgcgggggtggtgttggtgaactgcgatgctgctattattaaggactcgtcggtcagtctgtggtttcagagttgtgatgcatgatgagagggggggaagtatcctagctgtggaatgaatctgtgtacaaggctggctgaggctatggcagttcggcatggttggagaaggttagaaagctgaacattaaagatttttggatcacttcagattgtgcgtagtatattaaatctgctctaaagaacaacattattaaagagatgggttgggcctagtgattgatgagataaatgatacaggactgctcagattttgctcttctatttttttactcatttagagaagctaacctggtagcccatagtatctatacgtttgctttacaaaacaatgttttttgctcctcaattgcgattgttccctcgtgtgttctggttgtaattcttgcttgtttaatgaagttccagttttaaaaaatgatggtcaagtaagatgggaatacagtacagaagacattaatgattgtagaatgagagtgatatctgtataatgcaacacacgtaatttgccagattaactaaatcttggaccaagatacaccataactagatctagggacaatgctgataaaaacatgtacttacagaaacatgtattgttcaaacagtaattacacgaaacatattagacaacttaatatatatccaaataagcacaatatactggttcttcttcatagattcaacaaaagcacaaacctttgcatcatcccagcaagtatttacctctaaacgtactagacaagattgattagccatagcatcgaatgggatcattgcatcctttctccgtggattgtttgaaaccaaaacggcctcctttcgcaaggtactgttgatggtactcttctgctcggtagaacctcttcgccggcaggatttcagtaacaatcttcctactaaattgtttttgatacttttccagtgattcttttgctatcttctcttgttcaggagtgtagtagtatatcccagatctgtattgagttccaacatcattcccctgtttataaaaataacaagatgttattaagttggctataccatcgttgacatatgaggagtacttggggttgctgccaaaagaaataatctgataggactacgctccaatgaaccagtgacacaacaagaagatccacactctaggccttgaaatcgagaggtctgctatgtcatggccatttttcaatgcttttcccacatagtactaacaaagagcatctccctatgatcttatgtattaacttaacatgcactccaaggaaagcccataattttcaaagataggctacctgtctaaccctactacatagaaaggacttgaacctcagattagtaaatcacatgcctcaccatttgagctagcctcgaaatgaatatgcaagtaacccaataattgaaatataaacaaaaccacgatcagacaacacaaagaccacaaaagagcatcatagaaaaatgatgaaagtaaataatgaatctccagtagagttccagacgcacaagcacaaatttaaaggagaaatatcagtacacttaatggaaaactcacataacaattattccacacccaaaaaaacaaaaaaaaaaaaactccaattgagcaattctctttcatcaccttttaaccacgcttgatatgaatactcatagaggattactcagcaaataaacaagagagaataaaaaaagaacatttcccagaacatgggtcccgtggaaagtttaggcatgataatgagctcaaaatggatctataaaataattcaacatctcataattactccgtatgataaaactacagccacaaccccagtagtaaattacaataaagcacggaaaaaaagttagaaacaacgtacagagatatgtaacagttgtgataacttcagcatgtgcaatttttatcatataaagttttcgcatttgtttataatggttggataatttagacagggagatccaaacaagacagtaggaaaagatagttataatgactttaacatataaacaactcgctgggtctcaaatgattatttttaaaagaaaacaggattgtctacatgatagaagaacaaatacaaaatagatgcggtttgagtccccaaatagataagggtatcgatgcatttgtagtatgtttgtgttcggggagtgaagatttaaattctcttcaatattccaaaacaaaggccaaacaaattaagcatcacatagatgatagaccaatacatatgcccgaataggaaaaacaaaaccaggataccaagaagtaggaagaaccatggataaacaattcacaatacgcagaagacagaaaacatggaaacaagacaccaagatgcaccaaatacatcaatcgaaagcagcaaatataaatttaatttaacaaaaatgaatcaagcatggaaagtcacagacccgaaatttcacaccccacaaaagaatcaagcaaacacaagaattatcatcctatatccaagtaaagaatcaaattaacgattacatacttagaacttagaagttattatcattaccaaagctacaaaattttgtctgagctgaattccataaataaacaataaaaatgcaaaaaattgaatccaagaaacctcaattgcatacaatattctaaaatcaaaacctcacctgacgattcggcgtggtgggatcatgcctggcaaagaaagcatcaagcagagactcgtagctgcactctttaggatcgtactgaaccctaacgacctccgaatggtttgtcgtacctgtacagatatcctcataagtaggattgtgaagcaaaccctggctataacccacctcggtcttggaaacaccaggaactcgctggaaagccagctcgactccccaaaaacagccggcaccgaactgggcaaactcctggcctggggcaggcacgtcctcat

SEQ ID NO: 264398 - DNA, 1457 bp, Cannabis indica
tattcacaccattaatcaaataacaaaactaaatgttgtttttaaaatctacgctatgtttccaattttcaaatataaattctagaaaccttacgatataagaacggtttataaaagggtttctatttgacaagcacacaaaaataataaaaaaaattataaaatacagttttttacagaattttaagtatttttataatttttatgactttatttatagaaaatatgatattttaatgtactgtactcttgttaattttttttgttatttgtatattttattaacgtagttttgatattatttttctattatttttacctatcttacttgttgttttgtgttatatatttttatagaaacacggtagaagtaaaaaaaaaaaaaaattaaatgtatgaatgtaaaaaatttacaaaaaataatattttctctaattatcttttaaaaattatgggtcattctcttagaaaataaaaaaaaaaaggaaaaccacaagtattgataagtaaattctggattttaatatagtaaataacactataaaatcaaaaaatcagcagcaacacaatcaattaaaattttatatttcaacctattataacactataaaattatcaatcatcattgtcaaacatacaaaattatcaattatacatactaacaacaacaacaacaacaacaacattaacaacaacagcaacagcagcaacaacaacaataattataataataataaattctatttaagagcaaagaaattaacagtattattaatccaatatatatatatatatatatttaatggatgatatatatagcaactatataagagtattgctatttaagattgtaaaagctcagattgtggcatttcatatatacctgatttgattactttgatgcttttgtcggtcgaagaacctgtttattgtttttagtattatatatctaaatgtatcgaaatgaaaacattacatatataggcctaaccaggatattaaaattcctaaaatacccttacataaaatacagttgactgttgacctctgagtacatgtaccaaattataccttttgaatttttaaagtcgttaaaaatgcccttgaactatattgagattgttggatttaaggatttttgtctaattttagtaaaaaaattctaacatggatgaaagttcaaggggtatgatttagtatatatcaaagttcgagggacatgatttagcagatatcaaagtttgggaagtattgtttagtacataaataatcattaaaatagtaaaattaaatgaggttaaacaaaagtccttaaatttaacaatctcaatagttcaggaagaattttaaacatccagaaaagttcagggggcatgaatttggtacatgttaaaatgtaaggagtgaaaatcctaattagccttatatatatgtccatatattttacatcgtatacc

SEQ ID NO: 264399 - DNA, 869 bp, Cannabis indica
aactggttttggttgtggtttaagatattggagtagctgaatctcacaataatctctaccccatatcaaaaggtcccaaaagaaccctaatcctttctctgtggcagttacattctagatattcatattcttgcttccctgtgcataattgcttaccaattattttttaattctaatcttagaaaaatcgaatctttgaatcttcttttggttgaagttatacatatctatatattttattaatgaatcttctttagggttttattattattgcctttctatatttttaccgattaatttttttggaaaattatatatttattcatttgatagatttataaggatattgaattctcgtcacgtttttctaatgtgtttgtttgcttaatgggggtttcttaaattattaaatcaagtttgatgtaattcaatgtcttaactttagagcagtagagtggttggtgttcggagattaagaaaattgatttctatgttcctggggagaggctgatttgggaagtaatagttagataatcggggtagttgattatgaattaataactttgtcttgcagttgatttgggtgtagattttttctagtttatcttgagtttgtaaaaaatctataggttatttaatcttcttgctttggatgttggtttagttttgtaaggggagtttgattgtaattatagttttttgattctgggtcgttttcgagcttttgcaattttagtttttaagctaatatgatggttagttggtcttttcttttagttttgatttttttgttttgttttgttttttaaagaatgaaagtaccaatttgatgaataagttgcgccattgtttatggctttggtaccttt

SEQ ID NO: 264400 - DNA, 527 bp, Cannabis indica
atattgatcttggtaaagatattataatcttaccgttgtgtctttctaagtcaatatcactggttgatcttagatcaaaagatcttaattttaacatggttatgtttgatctcaaaagttctatttgtgttctttgagttgttagttaaagcctaccatttggttcaggtcgaacgtacaatttgggaatatgattgtataattgagtgggagcgctaatcatagatatggaatctatagcttctggctggacatagaagtgaaatgatgatttctttcgagcttggcttaatagagataaatggaagagttcttatttcagtaattatattagtttattgaaatatcatttataggaagctaaatgtttcaaggataatatacattgaggggtaaaacggtaaatttgtccctactcggtattaatcatctatggaggatttttgattattgggattagaatgatggttaaattttcatagcgtatctatatcgtggaacatataaagcgttctatataattgaga

SEQ ID NO: 264401 - DNA, 507 bp, Cannabis indica
taaaccgggaaacccaagtccacaactcaaggctctaatatactcactagggattacattaacctaggaaatagggaaacacccaactatggcactgaaatggacgagaattgagagaactagtttttcggggaaccctaccaaaaccggtttaccggttttacaggtactggtaaaaccggtaaaccctttttttataccagtctccccaaaaactcaccaatttgctcaaaacttgtccaattgccaccaaactttctacagtacctaaatagggtatatacaatatattccaaccagaaaatctcataaaaactcattgaatccaaacatgccattaaagatcaaagcttaagtttcaaagcacaaacttgtgcaattctatcacaactcaataaaaccaatatccagaatttagaatcaacttaaaaatcaacttagaaatcagattacacaaactttaaaccctaacagcccctgtctttcaaaattacataatcaaaccaa

SEQ ID NO: 264402 - DNA, 736 bp, Cannabis indica
cagataacgtgatctgggtacgcggtgctatgaatcctcggggtacaggaattgtgattatatcacgtttatctttgaggttcaagaattcaacaaccatccattttagcgatttagggatcaagtccatcttctttttcgagaacaattcatcttcccgtgcaccaccgccttgtggagaaagcatcggagctttccccttcgacgcatcacgtcttgaaggcggttgagcgagtggaccctaaacaaaacagaacataatatatcaaattttatccaaattctaccgaaattttggcagcataacggctgtaattgaatgcccccaaaaattttaaacatgcctgtataacgacaaataacacagatataacagtagtttgttcatccatcccaccgcagcacatatattcgcagaacctacttcactatggttgaatattgaagatattcaaactccactaatcattaataattaatttataagagaagttacctcatattttacaattaagtgtttaggcaaaggaaggaacatgtttgctacgtccctaacatatctgcacccttcaattgaaattgggatttcaacatcctcttgcagaatttccgaaatcagaatccgggcatgtgaatcatcgtagtccgtgcagtgaacagtgattttaccaacattctcgtacaaatacgctcgggtaacaatgtgttaggttttatgccctaaataaaactcttt

SEQ ID NO: 264403 - DNA, 1346 bp, Cannabis indica
gctccttgagggtatggatatcttggactgaaggttacagctaatgctgctgctgatgcattttgcaccccctgaaggttttgtgcattaggagcttggatttcaggagcttgcggatggcctactccttgaggaggatttatggctccatgttttcccggaatgaaaagttgtccatgtgtaaccccctgtctaggataaatgactggaatcctcacccaattggatagatgtccatttcgtatcagtctttcaatttcatcctttagatagtcacattcattttttgtgtgtccaatatcgtcatgatattcacacttcttatttggatctcttttttgtcttctacccttgtacattgacagaggcttcttataatgaaccatgttacaagtcgccttatacatgttctcctgaggatctacaagacttgtgtacttagtgtatcttaactcttgggtctttcccttctttgtagaatcactccaatttggaccctttgaactacttttactccgtgattaggttatgttagaatctagagcttccattttttggtttatttatttgggagtggcactgtatctggtttgtgtagctctaaacttggaaaaactagcactgcacaaaagtacttggctcgtaaaccataagagttgtgaaggtagctactggagagtaaatagatagagttatcatctgtgaagtttgggcatttggtatatcggcagaaggtgctaaaagtagtccatatgctcgagtataagcttttactaaatttatgaatccctgagctcttcacaagaaattagttagagtgtctacacttttgcgttgaaggcctccccatagtaaagatccagttgcaagtcctgatgttaaggccaccaatttcatgtcattggcaaccttggtttagtagcaacatccatcatgcattggatgtatttcttcacgctttcccctggttgttgtttgacgctagttaaggaactggcttctaagtcaaaggcctttgctgctacaaactgctttcaaaacatggcttatagatctctccaattttggatcgatccggagacaatctcttccaccaatcttctgcaaacttgcttaatgttagtgaaaagcaaaggcactttgcatcattactggctttggcgacttgcataatgcgattgtatttggatatgtggtccctggggtccgtccttccttcatacagttcatatgtggcattctaaagcattggggcaatggtgcctctatgattcttttcgcgcaaggctctgtatcttcttctttagaatctgatacactgtcgttttgctttctagagatcttct

SEQ ID NO: 264404 - DNA, 506 bp, Cannabis indica
cccgtcactgttggacaagctccgaggagcataactctgatggcataatttctgataattgatgttccatcagcttttaatgttatgttaggccgaccaaccttatatgacctaaaggttgttacatcaattttccattcgtgcatcaagttcccaaaaaagaatggggtagggtgcctaaagggaaatcaacaagttgcacgagaatgttataaccttgccctgactaaggccaaaaaggaagaatcctctggctagagttcagacagggggaaaagcattgccaaatagggagccgcccaaggtggggacgaagatgtggatccccgacttcgggaaccaaatattacagttaggccagtggaagaactggaagaaatagaaatcgacccaaagatcctgtccaggaagctaaaaattggcaaaggtttgctgcttgaagtaaaatcagctttgataaaatttctaagagcaaacctataaatttttgcctggtcgcatgaaga

SEQ ID NO: 264405 - DNA, 594 bp, Cannabis indica
aaagctaaggtttggttgtctagtgacatccacaaacttagtcctaggcctatttaggatctgctctctcatgggcgcaaatacagcagggatgtttgtattttggctcgggttatcaatatctatcaccctattttcaatgaagggtctatctttcaattgcaaaaatcactctttggcctccatattcacaaatcttgctctatcaacattggagcgacccctaggcgggttggatgatgaagctcccccctctcacttactcaaatttatgaaaattttggcagcactttcccttaaaaattcactttcccgggtaacaacccaatcacaaataaatcaattcctaatcacaaacaactttatccaacaatgtaatgagcaaaatcccaaaaattcacactaaaatttcaagattctccaacaatccaaaattatccactaataattgcatagagtctaaaaattgttacctcaatgaaaatccacctttattctacctccattgaaggaaaccttggagttcttgatgaagaagatgatgaatagtgatttttttttgaaatttggatgaggtttagggattttgggtgt

SEQ ID NO: 264406 - DNA, 511 bp, Cannabis indica
aaacataattcaaacagtgaagtctacgcgcgactttggaagtcctgtgcagacttaggggcaaatgttatcccattttttgcactatgacgtggcaatatgtgctggtgacacgtgtttgttattctttatgcttgataggagaaatgttccgaatagacttcgagtaatacatccgcacacacaaagtctgcctgaccgagcagggcaagagcagatgatctgaacaacaaatgaagtcatttctttgagccgtgcatcaagacttaactacttcaggattgatatcgtgaagctcaagcacacacgcaatccctacaatcagggaatcgtatcaaggggatatggcaagctatcccaatcccccatttcatgtattctaaatatgtaatgtatgttcttaccaattatagatattgtaaggaaaaaggaaaccttccctcatgcatttagccctataaatattgatcaatcctcactgtaaaagagattgaaagaattgctttagata

SEQ ID NO: 264407 - DNA, 518 bp, Cannabis indica
ttacgtggttttgcagttaacattcgatatagtccacgagtcaatcttattcagatttctgatagttttctcagggcctctttcgtatgattttttcatcccctttttgatcttacttgccaatacttataattacatagtaggcagttaataacaaagttgactgtaatctttttacaacaataatcccctaaaatcatgggatttgattacatatcacgtagtgtaaatgcagttattatttgaaaatcatatagctttgattttcctgcttttattgggtcaatatgatcgtgtgttttaacatgtctttaattgttacgtccgaaaaagtctcgacaggggcttggttctagtgaccgtaatagcgagatggagcctttttctttatccttccgaggtcaatgaagtatgccttgttacttccttgtgacgatcgcagttctattaaaaagagttcttcgaggctcgtttgaatgttagcttctgactcgtcaggattgtaagcctcactgaga

SEQ ID NO: 264408 - DNA, 820 bp, Cannabis indica
ggtccttcccagttgggtccaagtacgcctgacgtgctgtctttggtgtttaggaatacccttcttaggaccatatctcccacaaagaatttcggagctttcacttgtttgttgaaataccgagctactttttgttgatgagctaccaactttaagtttgcagttgctcgtttttcttcgatttcatcgagtgattctgcaaggagtatgtgattggtaccttgatcgttcgtcaaccttctatgggatggtggttcgagttcgacgggcatcatagcttcataaccgtacgccattgagaatggtgtctgaccggttgttgttttttccgttgtatggtatgaccatagaacttcggaaagttcttctggccaatttcctttggcatctttgagcttcttatttagtgtgttcttcaaggtcttgttgactgcttcaacttgaccatttgcttgtggatgtgccactgcggagaagcttttgatgatgccatggttcgcgcagaaatcagtgaaagattgactgtcgaactacttgccgttgtccgagactattttgtacggtagtccgaaccggcatatgatgttcttcactataaagtcttgaccttctttgatgtgatagttgcaagtggttcggcttcagtccactttgtaaagtagtcgactgctaccactgcgtactacacttcgcctttacctttaggtaattgcccgattaggtcaattccccagatgcaaagggccacggactttgtctgcgtcagctccttgggcagagctcttggtatctttgaaaatctctggcattcgtcgcactt

SEQ ID NO: 264409 - DNA, 1535 bp, Cannabis indica
atccagtgcgtacaaaagttttggtcgaacccagaaccccgaacagacaaaagagcatacttgcaaaaaattataagtaaccaagagtcataagtctgctcggtcacttgggggcacctacatttgtacaaagaatttggtaaaaataaaacaaacacaattgaatgatgattataaatagaggatgaaattcattaaagacaacaaaagcacgtaaaaccaggattagaggctgcccgatcagcctgttgtctgaaaaatgaaaaataattcctagtttaaagaccgcttggccggtcacgttgtcttaaaaaaggccttatggacgaacagatataaaaaagaaaaagataaaaagagaagtattcagacagctggagttccaggctctttgtacgggtcttctcgaccggtaggagttggaggatctgttgtctgagcggggggcatgtcaacatcctggccagggacagaagtggtcgcctcgaattctctataggccacctgagaagcgcaatacttgagaaacatgtctttggaatcacccaagtaatcgaaatttgccttgggattagctttccagaagtcataaaaaatctcgagacccgatgtctctaaggcatttaccttctctccaagcctcattagctccgctctctgcggctcagcttctgctctctgctgttcaacctccaacttgtacttcttgacctcatcttcaagctcctcctccttagacttcttctctacttccaacctgcagaagacagctcgaataacctccctttcttcttggaggttgttcacttctttggacaaggaggtcatggcagcctcaagttggtcagaagcctctaaatctttgttagcttggccactttcttcttggcagcaagaagtttatttttgacttaacccagttccattcagacggcgccaagttgaaccttggcttcatcagcatccttcctagccaagtccaattccgctctcatggtgttggacatggcaatgttcttggaggtagctgacttagcctgggaataagcataagccatcttcagaccggtcagcacagagaaaaaaattagaatctgagctaagtaaagaaggacaaaaggaaactatcaaggaagacttacccttgtgaactacttcaggactcctcccatcaccaactccagggaaagctcattgtcagctccgaccagctgctcattcacctcaaggactgactgggttacgtaatgggtgagcatatctttgcctctcttagtctccggatgcagcgctagaggtggggcaggggccttgatctgttcagctccgctcttgaccagctcggatctacactttggctgttcaggcctgttcgagctccttcctagagagtctttggacttagtcatttttggggcagaagggtccacgacggttggctcctcggagaggtcaataactgcttcggccggtgccctttctctagacggggttgtctcaccgctcctggatctctttgttgggttttgtgccct

SEQ ID NO: 264410 - DNA, 881 bp, Cannabis indica
tctatcctaatttactaaagattctggttgccatatgagaatgtgtggccccagaatcaaacaatacggagtaataagaattgttaaccgagagctgacctgtcaccactgaagggctggcttccgcatctgcttgagtaatggcgaacaccctagctggagtgggtctcaccagagcccttggtgcttctgatctaagctggggacaatccctcttgtagtgtcctggcatgccacactgaaagcacccctgacttctgcactcacccagatggtgccttttacaaatggggcactctgggtaggaataacgagtgtcaggaccaccttgacgactgcctcggttctggttcccccggaacctcttgttctcccgagccaccggatgcagtggatgttttcctcttctggtccatggccgaaccactacctcccctgctaaagcctgatgcaggaggggtaggagccccgccactcactggagtcctagctgactcagtcatacacccaactgtgccctcagctcgtagtgctttttccatcatttcagcataggtggtcttgtcgtctgtagtgatcatcaagtcatgcttaatcttcacattaagtccatcataatacttttccattttattgaaatcggttggcacgatccccgatgccaacctcgccaaccgatcaaactgcattgtatattccgtcacactcatattttttttctgggttaggtgggtaaactctttcctcttggcacttctgacggcctcattgtagtactttgcgttaaaaagttcctggaacttttcccaggtcattgtggtgacatcctgtatcagggacaccatgtcctaccagacgaacgcatcctcttgaaactaaaa

SEQ ID NO: 264411 - DNA, 1048 bp, Cannabis indica
atcaagcacctatctttgaaattctaaacactagatggcgtgggagtggtgcggggcgactatatgctagtttgcgattgctattgcattgagctgcagcataggaaagctggtcatcagttgatggcgatcttggcagaagaaaacgagaagaaagacgaagatcttaacccccgagttcaagatgagagaaacccattgaaaccaatcgaggaattggaagaggttattctcgaccaaggaaatcccacaaagtgtgtatacattgggaagaacctggacgagcagctcaaatagcagctaataagctttttgaaggcgaaccaggattagttcacctggagccatgaagatatatcgaccctatattatttgccattatttaaatgttgatccaagctacccagcgaagagacagaaaaggagacccttggaatccgagaggcaatgggcactaaaataggaagtggacaagttgttagtcaacgacttatacgcgaggtgttttatccctcgtggatagccaatccttttctcgtcccgaagcctaacggaacttggagaacttgtattgacttctttgatctgaacaaggcgtgtcaaaaagattatttcccacttccaaagatcgactagttagtggatgcaactgttgggcatgagcttatgtcatttatggatgcatattctggatataaccagataaaaatgtatgtcccagatcaagaacatacaagcttcgtaaccaacatgggactctattattataaagtcatgtcgttcggactgaagaacgctggggcaacgtatcagcgattggtaaacgaaatgtttgcaaaccaaatatggcaaaacatggaggtttacgttgatgatatgttggtaaaatcaataaaaagtaaggatcatacctcaaacctcgcggaatgctttaagatattaaagaagtataacatgaagttaaactcaaaaaaaatgttcattcactgtttcctcgggaaaattttttgggattcatagttaaccgaggggtattgaggcaaatcct

SEQ ID NO: 264412 - DNA, 724 bp, Cannabis indica
ctttgatctcttgtgcttaagttttttcttttccagatcgctgcagagaccggtcgcctctcaatgaccctgatagatcatgggtatgccatgtccgaatttaggggcacggacgaggccatgaaaagtctgagagacttggcggccgagaggaaagcattctgggaggaggccaaacagagggaggcacaggcgaaggagaggcaccgggaggagctgaaggtttagggcgaggttgtggccaaggccaagcgcgagttgagagaagctaatgaggttgtggaggagctaactgccaggctaaagtcaatggaggagctgcatcaggcagattttcagtcgacgactaattttaccgttaaggtgaaggagcttagggacttgaaagatcaggcgttgaagaagggtaaaagagatgagctcctggcccctgtcgtttgcaagcattgcatcaagcgcttcgacgacagcgtcttcatggcttggtagacaaatggccataacatcaagctcgatttctatcccaagcctgaagaagtcctcgctcgcttctgggagaagaagaagaggcttgacgctttgctcgaggatcgcagggggcctcgttttccacctcgcatttgattaagtcagttcattactaccatctctatctctttttttatatatatatatttacagtctcttttccctcctttcaaacaattttaatttttatctttaa

SEQ ID NO: 264413 - DNA, 2184 bp, Cannabis indica
ttgcctgaagacatctctgctctaattcctcctccttccgctgctcctcatcgatcaaccagaccttgatcgcagctaggtccagactcctctatcttttcccttgctgttgatccctcttctcgatcaactcaagatcgtggtactgtcgatgatgtttccagtccgttcttcctcagctccagcgatcatcctggcctcgtcttggtgtcctccatcctcaatggtacaaattaccaatcctagaaaataggcataacaatggcacttgctgctaaaaataagacccaattcatctatggatccttgcctcggccagttgctggtaatcttcttaactcttggactcgttgcaataacatggtcatgtcttggcttgttaattctgtctctgctgaaattgcccaaagcataatgtactttgatcttgatgaaagattcaatgaggccaatggcccttgcatctttcaattgcaaacacaattgactcatttgcatcaaggtgatcagtccgtcacctcctatttcactaaactgaaatccctatgggatgaattgaaggaatttcaacccaacacaacctgcacttgtggggctatgaaggcatttcttgactactataaccaaaaccaggtcctccaatttctcactggtttaaacgagtcatatgcctcggttcttgctcagatcctactcaatgagcctattcccaacctctcacgtgttttttccatgattgttcaagaagaacgtcaaagaaccttaggcaactctgatgtaccctcatttgcatcattggttaagccctcaacctccactaatcccccaagaagcaagaaacctagaccctcatgttcaaactgtggaaaaccaggacatttggctgaaaaatgttacttcattcatggcttttctcctggttatggggacaaaagaaacaagaaaaatggaaggcaacggctaatcaagctactgctagtttcagcacagatgatgcaccccacacctcggtttcagttgattgtccactcagtgtcagcaactaatctcattactcaaccagcatgctcctagaacagaccctactgttcctgcagcagcttcaaacatggctggtaaccattcctttaatttttctgattattggataatcgatagtggtgctacccatcacatgtgtttcaacaaaaacatgtttcattccttttctcatcatcaatttcctaaataggttactttgcctaataatcatcatacaccaattcatggtattgggaatattaaaattaattctgcaataacattgcataatgttctttatgtcccacaatttaacatcaatctcttttctgtcattgcatacattgataacactattaattcagttctttttcaacctaaatatgtgttattcagcaacattatcagaatcgggtgatggggatagctaaaaggcatggcaaactttacttgttgcaacatgaggctgctgttatggccaatacaagtcaatcttctattttttctttacaaaataatgtagaccaatggcataatcgccttggtcatccttcaatgtacatttccaatgtttttaataaaaatatcgactcttctttttctgcaaattctaatcagcattgctcaatatgccatttagctaaataaaaatgacttcccttcatatctaacaataattttttcgataatatctttgacttaatccacacggatatatggggcactttcaacatcattagtgttaaaggttataggtattttcttaccattgtagatgaaaaatcaagattcacatggacatacatgttaaaaactaaagttgatgctcccacagttctaattaacttttacaacttgatttgctcttaattttctactccaatcaaagcagtttgatcggacaatgccaaagaattaaacttggcctcttttttttgcctctaaaggcatcattcaccttcattcttgtgtggaatgaccacaacaaaactcagtagtatgaaaacaccaacatatcttaaacatagctcgagctctatgttttcaatctaatctacctctagtctatatatcatccaagctgcaacctatttgttaaataggacaccctctgccttactaaaagggcttacatcctatgaaattctatacaccaaacccccc

SEQ ID NO: 264414 - DNA, 840 bp, Cannabis indica
tctgttggctaaattgggttggtatttggcctcgcggactgtatctctttggacttcggttatcaatgcaaaatattgtagaaatgctgggttcctttccacttctcttccttatagagcttccccagtggcgagaggcatctgggctactcgagacttcattactgataatagtgtgtggattggtggacataattcctttattgatttttggtgtcaacaatggttgtgtggagatggccctattcttcacaagggcgttattaacccgctgataaagaatctgaatttggttagcgatttggttgatattgactcctccgtgtggaatgtccgaatggtagaggatgtttttgtccctgatgcggcttcgatgatcatctcttctgataggaatgttttccctgtcgtggacatcgcctgttggaaatcctctaaggatggaagtttctctttgaaagcagcttactgggattataacaagtctagatttgctgaaaaggataatctttgtgaaaagatctggcttgcaaaaatccatgaacgtttcaaggtcttcttatggaaactttgtcaagatgctcttccttttggctcaaagttgcagagcattttagggaagccccttggctcgtgttatctctgcggctgcaaggaaaaagacactgctgaacatttcatctctggttgtttgatcacgagacggctttggttctcctcccactggggccttcgactatatgctctctcttctctaaatggcagggattcggtcgcatggctcctccatcctccttttcagcatcttctcaattcgcaggagctttatagtttttttct

SEQ ID NO: 264415 - DNA, 802 bp, Cannabis indica
gtattggaatgtcattccaatgaaatgacctttctaccattttggtagaataactattctattttgaaatggaaagaaagatcattccaatgcatgatgagaaaaaatttaataattttttaatcaatattttatacattttaaattttattccattgcattcatattcctattctcattgtcattcttattcctatatttttattcttcctaactaaacgccacctaagtgttagctctattggagatgctttaattaggggtgttcatcaaacctcctgcaccttactatatcgcaaaaaaaaaaaaaaaataacggtttcaaattttttgcggtgcggttatggtttgaattatttctaaactgcacggtgcggtttgcggttttgaagtattaatattcggtccaaaccgcaccgcaccgcacattataaaaatactaatttttatatttatttaggtccaatatgtgaatgttcaacccaaatccactaattattgtattgttgaaacttaaatttgttttcatatttattttcaactcttatggtatttttgacaagtgttgctcaagctttattgtatttgtgatagtttaattatttagtgatagttcaaaccgtagaaatcgcaaaatcgcaccgcaccacaccatttgttgcggtgcagtttctacaatgttttagtttagcaatgcgggtgcggtttgagaaattaaaaaaaaactacattgcggattgatttgaaaaaatagtcaaaaatcgcatcacacacctcgaacactcctaactctaatcgttgg

SEQ ID NO: 264416 - DNA, 966 bp, Cannabis indica
tctgccacaacaaactcttaggtaattgttttcttgttttttttttttattatagttgtttttgttttgtatcaattgtccttttattttgtttttataacatcttttgtctttttatttattcattgtttatgttttattgcagtgattgtggtatattcattttcaagtactctgaatactttgcacatggtttgattgaagatattccaaatcctttcgatgtgaagtttgtccggaacaaagtttgcgtcgagttgtttgtgcatggcatggcaaaacaagtaaatggatacatttcttcatccgaacatcgtggaagagcgccagttaaggacgatggtggggaggagtagattgttgatagtagtgtctttttttgaagtactagcttttgtatgtaatggttcaaaacagtttacatgtaactgattaagaacaaacattttatggttcaaaccttttttaagagtttattgatatgtaaagatattgtgctggagttttttgataggcaaactctttttagagtttgttgtttgtttgaagtttatgttataggtttgaacttgttggagactattgaaaacaaagtgttaagattttataatattttagaatttgttatggaaatatatttcttttgtatatgtttggattatattaatataggtttttttttaaatctgtttggattattttgtatatgtttaatttttttttaactaatgttcaaattatgattggaataacaacttaagttatacatttagcaacatgttagtattttaatagaaattgaattcaatttttgtttttatattttctttctgcaccatttttatatttttcagtatttgtactttttttttgtcatttattttttcagggtctttgtgggggagttcaagttgctgttagatagaggttagttttttttttttgtacatgtatgtttggctttgg

SEQ ID NO: 264417 - DNA, 815 bp, Cannabis indica
ttgctcaagcatggattacaaattagtgaactatgctgcctgtgtaatgatcaagctgaaacggtgcaacatctatttttcgaatgtgatgtggctgtgaaatggttgcaggatatcaaacagtggctgtcttggaatgtggtttcattgaatctttctactttactcaggtggattgcaagggcaaagatttcgaaattccgaaagaaggtatatactgctgcaattgctggactggtttataatgtttggaaactgaggaacaacataacttggcaaggggaatcattatcctctaaccgggttactgaggagacaaaatggaatatcaaaacacgtattgctgtgtttacacccaagaagactaaagaagtagataaaaaatggttcaatgaactataatgtagataagatgtgatgtatagattgattgggcccgatttgggtgcctatagtttgtaaataatgtttgtgcaatataatgtcctgatttatcaaaaaaaaaaattatccaaaaaggcggggatcccgctatttaaacttgtttacaagttcaaaataaactttataactttgtcacacaacgactgcaaaataaagctccaattgtcccaaaaccgaactctccaggtcgcaccatcttgaaatgtacaatcatcctcaagctttggactcattgttgcttagtcttagcttttcctttatctacacatgtaagcaataactgtgagtcgacagactcagtaagaaaagcatataatatattaccgacttgaatttaggcactcatacacctatttacaaggcttaacaga

SEQ ID NO: 264418 - DNA, 1168 bp, Cannabis indica
gtaagggtaatatttactatttttttactttgtttttttttttatattactacattatgttgtactttgtttttttatttttttttatttttttttttacttttttactttttcacaacctgcctatccattatattacatatactagataaaagttacgtgtcgagcctacgtaaaattggtattttttgtttttttttttatatttcaataactaaaaatatttggttagtaatctttgtgtaactaaaagtattttatttaatgaatgatttattttattaaaataatttttgtgtcattgtatttagttagtaaaatatagttatgtatataaaattatgatatgtacattgatattaataatataaaagtatgttaatcgtaatatttacataatgataatgtagttatccttaatgtgaaggaataatttatgataagtcataacaatgtatgactttaacatttattatttgtttctaaaaaattaaaaggaacaatgtatgcatttaacattcattatttgtttctaaaaacattatgtagcgaaaattaaagaaaaagtgacatcttaaaaaaaggaaaaaaattattaaataaaatctgaatatagaatacgattagaaaaattaaacatagcatagtgaaacttcatcctaatcttctatcggctcagctgtttgaatggtgaattgattgtactttgaacgttttgaatctacgtacagctagattatccatgttttagccgataatttctctgtaagtttttgaacaaacaacttatgtttttgaaagaataatttttaatatattttttatgatgattaagacaagattcattacacttttatttgcaaaaatatattatatatatttaactgtttaaatttatctcatccgaatacgattttaattaaactgcaatacatgacaatatatattctgcacatcttcgaacatcacaacatcttgtaactcggtatcatcgtcgagttgtacatatgtccttgcactaataattcatacagaatatattagggctgatatatgaatatcaattaagttcaaattatcaaaatcccaaatgatcccatcccattctggcttagctacaatagaagtagaagaagaaaagacttcaaatcatcaatatcaatatata

SEQ ID NO: 264419 - DNA, 546 bp, Cannabis indica
tgtgggttcgggtccttgttagagttcgggtctagggctgggtcccaaatccagacaccgactacgggtttttccaagccctgggcccagattcggatcccaatcacgggtcccactctagttaaatttctggtgcccggtcacgagctcggtcttaggttcatgtccgggtctgggtcgggtactaggtcccagtcctagttctgtttcccaggtccctatcctaattattggtccaggtcccagttattgggtgggtttgggtcacggtccaagttggggttacgagtaagggtccaagtttgggtctgggtcaggatctcagtgcagatgtaggtacagcatttcgatcccagtctgggtctagttccgagtccaggtaagtatctagatccctatctacgtccaagtctgtgcttcggatcgggtcccagatttaggtccaggtccgggtcccaattccggtctgggcacacgatcgtgtccgggcctgagttccagtctcagtttttgtctgaggctagtctgtgttaggttctaggtctg

SEQ ID NO: 264420 - DNA, 654 bp, Cannabis indica
gtgcgagatcgggggggctgatctagcaatctgaatgccatggatactgcctttcatttcttggttttgaataatttttgacagaatttcttggcaaagaaggaagaggaaaggagataatggatccccttgtctcagccctctttgcggcacaatcattttgagaggggatccattgaagagaagcgaataagtcacatttttcacacaagatattatgagaccacaacttttatcatggaaaccatttcccttaagaaccttttgtagaaaatttcattccatcttgtcgtaggccttatgcatatcaagtttgattgccataagaccccctttgcctttcttctggcaaatttcatgagcaatttcttgtgttaaaatagaagaatctgctatccatcgccccagtataaacgcagattgaaacgagaatatcgagccttccatgaacagtcttagtctatttagccaggatctttgctatgatcttatatggaaaattgcaagggctaaaaggcctgaattgttccattttccttgggttgtctaattttggaattagacactagaaggtgtaattaagtcgagggcgtacttcccctttgcgcagacattgtttccaaccacatcccatactttcaaaaaaaaaaaaaa

SEQ ID NO: 264421 - DNA, 588 bp, Cannabis indica
acttgcccatttcatttccgagtcgcctatttagagtcctttcaacgctttcttttctatatctatacatcacaacgtttcttcactctcaatcgctgaaacgtttgaaatattctcacattttcctttcgtatttggtttcctaaaaaggagctggataattaggaagttgcttcgaacccaaataaaccgcaaatgcgcgtgacttgtacattttactagtcagaactctgagatctcatattgttccttcttcgttcaaagctgtcttattttcactttctattacattaaaattataataataataatcaaagtatggaaccattttatagatattttattcttctcttaaggcgtctagaacctgtttcgattgtatttatgggttcgaggtcgaacaagaggtattagattttctgggttactttgcttttgggcggagattacactttttcacagttatggtttcttagaataaaaaaagggtaggtgggtcgtaggtatatatctttaactcttacattgtctgaactagttagactctctttgctcattttctttcaatctttgatctctctctctctc

SEQ ID NO: 264422 - DNA, 833 bp, Cannabis indica
actaagacttaattattttagtttttatttatttagatgatatgttattgtattgtataacgtaaattatatgtatataaaaaaattaataataaaatttactcaagttttttttaaattagatagatcaagtctaaattaatacatactagaacttaaaatatttgatgaattccattcgataccgaaaaataataagtctaatatagttgggttattattattataattttatcttcattattacaaaagacaaagatataccgcgtataattaaaaaaaaaatggctactaaaacagagaaagaaaagacctcactactttaaaaaaaaaaagacctctataatgctcctttttaataattgaaaaatcaataattaattttatgtttccctcaaaataataataatatgaaattaaaacttaggtacttcttcagtttagatactgaacttttgcttttcgtaatctaaagttaggtacccaaactaccctgttttaattttgttgataagaactaaacttccttgtattattacatgtgggtgggtagggaactaaggttggaaatgtctttctaccattttcataaagtcatctgagaccaataccccaatttagaatagacgtgtctccacattggatccaaactcttggcacacttttatgtagttgtggagtctggacccacatcaaataatataggaatttttacatcaaatttttcacttttattatgtgaggtggaattttttttaaaaatactgtgtactgtgttaagtttttactgttgttccactgttttttaagttgtttcactgttatttttaatt

SEQ ID NO: 264423 - DNA, 808 bp, Cannabis indica
tgtgtttggaagtaagtgtataattacgtaggtaggatagtactagggtgataattacattagttagttattacactatattttaaatacaaggtgtgttagatatgaagtgataattacatatgtaaattcttaatattttgtttggacaaactagttagtaattacatggaaaaataatattttttagtaagtgcgtttggaaagccacaatgtaattggatttgtgtgtaattggaggtaatgatatgtttgtctgaccatgtaattacactgtaactgtataattggaagtaattgaggggttctaattacactctccaattctcatgggataattacactgtgtaattactaaaaattttccatattaaacattaggtactaaaaaatattaattttcttatataattattaactattttgccaaataggatattatgaattcaaatgtaattaccacatcatatccaaccacaccttgtattttaaaataatagtgtaattactaaactatataattaccctacctagtaattacacagttacttccaaacacacccgtataattacactatataattaccatctcatatataaacataccttatattttaatataataattaatactctaataattacacaattacttccaaatacataattataataattatttgtttaacccaaatgtagtattagtatgtgttaacaagtaaaatttgggttatttctttatgttttcttatgttagttgactaatgacacctattgtctatgtattaatgtctttctctctctctct

SEQ ID NO: 264424 - DNA, 1163 bp, Cannabis indica
cacaatatttttgaaaaaacttctgccccaaagtaaaaacattaaaaaaaattaaaaatttcagtatgtggtgtaaataatctttttcttttatttgggctgtatatttgtttatttggtccgctgaaagtttttttgtaatattgttatatttttttggttaaaattgaaaaaagcccaaaaatttaattgttattgacgatcatttattattttattgtaaatataaaaaattattattttttattgtttaaacaatggtaatgtggcaaataaagaagttaaagtatgtaaaagtcaatgaatcataataattaggtgcattatagtaaagaaaaagtaaaatttattgtagactaaatttagcacaatattatatcttatgtcaaatttagtccaacttttggcacaatattatatcttagtctgaaccagcgctctctgctctttccctcgaactagtcggtgtcgccattaaaggttcctaaactcttagacccacgagttcagatctcgaactagtcggcgtcaccattaaaaatcttatatgttcatcatttcttttctatttttattttttcatttattaattctcattttggtattttgtttgattttattctaaatctaagattgtttttgcattttgattttgtttattataattgaaattaatttggatctaataaatgcaatggcggcaatagtattgtagtgatgtggttgcagtggtagtgggtagtggtgtttgcatggtgatggttggcggtggtggtggtattgcaatggtagtttcggtggtggcaataatggcggtggtgttggtacgatgattaaagaagaagaagaaaaatgggagaaaatgaaaagaaagaaataagaggcatcaaaaagagaaaaaaaaaattgtttttttaattaattaatttatttatttttaaaagatcttttactttttaaatttttttaataattaaattatatggaccaataaaatagtgccatcacatgtatgttatgtcgcatagacaatatagcatagtagttaagagcaataaataaagggattatttcacaaacacacaaaaacaacaaaaaagttataaaaatacggtttcacggaattttaaatatttttacaatttttttaattttatttacag

SEQ ID NO: 264425 - DNA, 923 bp, Cannabis indica
agagcatggacccttctagaagccaaattcttcggacacacaaactgaaaaactacaacagaacaatgcaacacgaactaaaccataaaactacaccagcaaaggggcaaaaaaaagcgctacactacaccagaaaaagaggcacagccatctgctaatccaacgagcagggagctgtcaaaattggccaaatcaaacaacccgaaattgttgttacgatttgcccattgagcgacaacatgggccacaccattgcacaatcttgaaatccaaacggcctcccaaaggttaagattgccaattgaagaaagaaagttgtgaactagatcttggatgttgtggtgtaaggatttgatctcatggcacttccttttcactgcgaacaccgcattcgttgaatcacattcttatagtctagattacccgccatctttgctccataacgagccaaaatttcccttgccaaaggatcatggtaaccaattcgaaaagtatatatttttatgatagcaccatcctcatttttaaacaccgctgcccccgctgtgtgagactcccctactgcaacatcagtgttgcacattagccaccctgcagtaggcgggagccagttgggttgaatagaaccagctggttgatgggctttagcaagttcattaaatctacgattgatgtgagtgagtataaccgcgaggggagttgaatttctgccatgaactaggctgtttctctctttccatatactctcaaaaaccccagcagcccccaataataggttgtaatgaatacggccgggccgattatcttccacgacaaaccaattcagccaactatcccaattaggacagttaggctcacttgttctcacattccatgagcagccgaaccaaatagcccttacaaaagaacattcccaaaacaaa

SEQ ID NO: 264426 - DNA, 740 bp, Cannabis indica
cttgaagaagtgcaagctgttattcgtcatccactttcttggtttttgaggcttcctctttgaacctctttataaaattcttcaaggttttttgtgggtagttgctttatgttagtcaaggagctgactttaagattattctttctcgctgcaaaaaactatactccagaagctgacttgcaacttgttccagcagtccacagatcctggctttaactttttgaaccattcctctgcggagccgctcagtgttagtggaaagcataagcatttggcgtcattgctgaccctcataaccgtcattacccgattgaaatgagataaatggtcgctggggtccgagtctccggtgtacgttgccatctcgggcatcttaaattttttgggaagctctgccttcagtatgtgtcgggcgcatggctctcggtcctcaaaatcagaatctgagttgtcccctttttgcctctgcgagacccgagcaatgtctttgcacagtgttgtcaactctgccaaaattccttcattcagtgtccccgtggagaccgctggtatatgtttcttcttgtcaaggtgatctcgcagatcaccgtgcttttcattgattttttgtcttaagtcaacgggagggtatctccggttcccccttcctctttccccgagctcttggtgcacggatacgctctctcggtcctctcaatcctgagggccaacgctcttttttgggagcttgcccctctgcg

SEQ ID NO: 264427 - DNA, 1083 bp, Cannabis indica
ttatttgagttttatttttgtccgattctaatcagctaaagcgtgacaaaaaatccaaactaaaagatttatgtaatataacacaatttctcataaattaaaaaggtatatgatatattacataaattatattttagttaaactattttgtatttaaaatttgaactttaaagttttaactattgaaatttagactttattgataataatttttattgtatttggatattaaagctgacacgtaaaatctacactatattattatctttttcttgttattttttgatgaatatctgtttatttatttttttttatgttttacacaattatatttatcttacgtttaaagttcttagaaattaatttagactataattatttttaacttaaaatataaataatatatacattttttaaatctaataatttgaatactagaaactaacaataattattattaaaaaaataaaaattagtttggacgaatatatctgactaaattgacgaaatcattaagcgggttaaattttttttaatttttaattggacaggttataattaaatatttacaacttgatacttacattaggttggcaaaattatatataactcgacgaaaccaatgtatacaccccaagctaagagtgtaactattttatctaataatttaaatttttaaaccaaaataaaatttgagttcttcttaatattcaacgacaaaaaaaaaaaaaaatactgtttgaaaagttaatacttagacaaacaacatcaactttataagaaaagttaaaaaaagtaagtttaaaataagatcatataaattaataataagcaaaaatatttttttaaaaaataattataaaaaaacttatctttgaagtccttgtatcttagaatgaccaagtgagtaaatgaaatgaacctacataaaaatatataaaatttaattaacatactaattaatgataatattaaattaaaccaagcatttttatttaaacgttgaaaaaaatatttgagaacattattttatgaaaaaaaacttatctttactatatatgtggagtagatcttttgttactg

SEQ ID NO: 264428 - DNA, 3563 bp, Cannabis indica
ttattaatatttaatagaatagagattacattagaaaaaaaaaattatttagggcataaaacccaacaccatctgcacctatacagataatggttcaagattgatcggcaaaaaatagccatcatcttgagggggaatattgtggacattgtcccacatagaataaatggtagagaattgagccacatataagaacatgggctactccactcattgccaattagttttgagattgaatcccatgattcccaatacaatccaattgagacatctctcctgttagagacacgcccaatttagaattagaaaacgagtcaaataatcagccgtctgattctcagatcgtttgacaaaaaaaaaaaaactaaaaataaaaccagatgaaaaagattacaccaaatggaagagctggttggctaactcgaaagcaggtgtgaggatctccttggctgctgccactgtgtacatgttgtggaaaaataggaattcttgtatgcataataattgttgttataccagcttgaaaattgtaaataacattaaggaaatagtcaaatataggttgtatagcttaaagaataggaggctaattcaagctgaaaaggctttgtatatgcggctaatagagtagattttgctggttgttttgaggagtcggctggttgtggatgtggtttgtatatggttcagttttgattaatgaatttctcctctttagtaaaaaaaaaataataataaaaataagattacaacatcacagttaaccttaagaacacttatattcagtttcatgtaccacttagaagacacaacagtagaaactgttacagcaagttcattcaacatcgtagcttgagcacttaactattgtgcaaggtatgtaactgcactactaacctgcactactaacaacccttttaactgtagagaacttgttatccccaaccactaacaacaatttgatagaaaccatcgaagaacaaataagaaccaacaacgaaaccaaacaaaacaaaaccatgtcacacagacaaaactaaaacactcaaaattctgtcacagagacaaaactaatcgtagtggcaaaaatcgaatagcaatagcaaagcacagccctgactaacctacacctatgtctagggaaggccgacaagcttgaccaaagaaaaaagataacttccagtagctataaatttagaaacaagaaatcttaatcttttaatttagttgatttattttatagataaaataaaaagttaatgagagtgttctcaagcttgggtaggttggatttaaagataaatataatgtaatggtgattacattatgaagaatacattacactgtttttaaaatcaaattaaacaaaagaattgcaatgttgattccattatgattacgattacttcaaataattgacatatgcataaaagattgtgcatttttgttctttactctaattataaattaagaagacacattcatacaaacataacaaaattgattcaactatataatttagtataaatgaaaggtacaataggagatttattatttatatgatgaaccctgtcatttcaagccaaaatttctgtaatgagaaaggaataaaattcaataactgggtgagtagccaagcttggagttttgacatactctatatgaggatggtgagctataacaaagagaaccaccctcagattgaactggagaattcggtgcggactttccaggagaagactcatataaacgagatgatcttattagaggtggtttactatatgattcaatagaaacaggagtgtctgacgagagtggagactgatctggagtcctccaatgaaggtgagaaatacatctttttggagatcttgatgatgatcttcttaaaggcctcaggttgattttgattctgtaataacacaaacacataatgtcaaatatgtctaaaaagaaaagaaaaaataatggtcactcacttgttgtgcacatcaacataatggtcagtttcatccaatatgtcttcctgaaaaaagcagaaacacaaaacatagaagggtcactcaattatggactttaccaattaccatacaaattaaaaaaggggaaagaaaaaaaatgaatgtgaagtctacacaacctgcaacagttcctccatgacatcttccattgttatgatcccaataacctcttcactcgagtcgatttgaagaggttgtcgagttccacaacatacatctccatcttcaaatgagtaagaaggtgatgtctcattagagatagtcaaatgttccttttcataaaatatacaactgtgagctgcaaaagccatgtggtagctaaactgttaaaaaacaaatttgactacaccaagcttaagtatcatttcagctaagttttgtagtagtgttaccttgtgtttctcctggagttaaatttagattcatcaaactatgcttgtcaacattactatctttatgatcatgtttaatatccttactcctcacaactgcagccatgtgactatgacccttctggaattggttcaatatattataaagaggccaattgtcataaaccctgtgatagagacagttatgaacaatttcaatacattaatgtattctaaaataaaataaaaagttaagagcaagcaattaatagttacctgggaattcttctgagagtcatatgcttgattggagtttcattttcagggttgcagaagaataaattcttaacctatttaagagataatatatattatagtaggctaattaggatttttgtccctgaactttgacatgtatcaaattatgccctaaatttttttagccgttaaagttcctcctgaactattgaaattgctggatttaaggtattttttcaatttcattcaattttactaattctgtgattgtccatgtactaaatcatgctccttaggctttgctatttaccaaattatacccctcgaactttgacatgtaccaaatcaagctccctgaatttttatctatattagactttccttactaaaattgaaaaaaagtccttaaatctaacaatcttaatagtttaggaggaaattttaacggctttaaaaatttaagggcatgatttgatacatgttaaagtacagaaggcaaaaattctaactagctatagtatagatgaaagctactaacttttaattcaactaagtcatgtgtgtgaaagcatgagtttcttaccaaaatgaggccaattatatttgtcttgcttccggagtagacaggtatgcggctgtggcctttgcttgctattaaacccatagtttgcctagtggtaagaagagtactatgattgtaacaaaaagtgaaaaataagtaaaactagttgtggagtgagagaaacatacatgtcaagtttggagtttatttcaagagaaaaagtttcagatatgggtgtcattgcatctttagcaatcttctgtgttaaatcaagagctccatttataatcatggtttcatgatgtgacaattctccacctttccctgcctaaaaatgaaaatgaaaatgaa

SEQ ID NO: 264429 - DNA, 775 bp, Cannabis indica
gaccttcagacatatgaaaaatttagattggaggaccccaacgaagaaagggaataaatctcataattctggaaatggtaatgggatgattaaagcttaggcaaaccttggctctacttccagacctaagacaaagaagaagtggaaaaatggcaagaagactgttcaagctgtgagaacagttaaaaagaaaaaggctgctacttctggtgatacattaaaaggaaaatatttctattgcaatttaaaaggacactggaaaccccaatgtcctaaacttcttgcaaagaaacaaggtatttcttttcctataaactgatgctatcttagcgagttgaatcgaaaagttggacataggggtggaattcgtccaagataaagatgaagctcatttttttatttattagttatttatttatttgaattaattgtttcagtttcataacagtttggatttcaattattagtttgggattttatttcctattttttcatattgttgcaaacaattcctttaattttggaagattttataataaagttttctattttggaaataaattgcaatttatgaattgagcttcatttactttatcttgtgtaaccaataccaattatatttatatgttttaataattgtatgtgtatgtgtttttattattgatacaaattctatagtatcttaaactcttcaaagagttaatactacataaacacagagttttttttttatgtttatgaataattgttaattctaaaataattattaagaatt

SEQ ID NO: 264430 - DNA, 1040 bp, Cannabis indica
gagtcaaagagaagagaagagacggagtgggggatcgatgacgacggaggctaggtgggggtggtgttgtcaacatctgctgctcaattgaagataaaggaggcaatgcggaagggtggggtgggtagtcgagaccattggggggactcggagggtgtgtgcaacgattgacgggggctctagttggagctgggtgtttgccggtggtgagatgaagaaaatgttgaagggaggggtcgagattaggttaggttataattgggttattatttttttaaaaaaaaaatagttaggttttactaaaattgaaaatatatataaatttatctgaccgagttggcgagcaggttgggtccaacccgcttctaaatatttgaggataacacaacctgaacccgctcgttcaagcataccgagttggacccaacccacctgtaatgaaagggttttttatgcaacagggtttaacgggttgaatccgggcaggttaactgggtctggggcaaactcggtacaaatgttcaaccctagtaagaacattaacaatgttcttcttatgaacaacaagattaattgaaaagaataattaagaataaagtttaacacaaatggcataaagatttttttagaaaacatcacaattgatttttatgaactcaattcttcaaagaaagcttgccacattggtataatgctatctgttatagtgtgaattttttgcctagaaatatgagtatagactcgcaaaagattggcatgcggaccgatttctgatggaaaaggatgatgtgtcaacagatagctccagaagagctaatctcgcatgatgtaaacttgcatgaaggtgcgaccgagacaagatctaatcgcacactatgcctaacatagttaaacaagcaagagcgagagaaattagtgttggtcctgcatatattgattatatacaatgagcaagtatatctctcctacgacacataatgtaataccctagaattgggaagtggattagcaaaaccctaattagataattatgaataatt

SEQ ID NO: 264431 - DNA, 699 bp, Cannabis indica
aaaataaaaacctaaaattaaaaaaacctaacttttaccaacattcatttatcatctaaatgaacccagaaaatcgagctcaccctccatctttctctatctctctcgtctttctctcttctcgtcgaacagccacgcccaagctcgacgctggccattctcggtgctccaagcttgaaatgaatccaaaaaaattgaaacccaaactctgacctttcacccttgagcccttgcctctccgtctttctccttttctccctctcagatgtgcatgacagtgatggtgggtggggtttcgtgtgaagaagaagaaaaaaaagatgaagaagattaagaagaagggctctgggtcgattgggaactagtcgaagggctaggttgaatggcaggggactgtggacggtggtcgaaaggggttggtggtggtggtgctagtttggggttgggtttctggcatgagaagaagaagaaaacgaataagacgaagaagaaaagaaagaaaaagaaaaagaaaaaaataaattattttcaaattatttgtttatttatttatttttatttttattttttaaattaaaataataatttagaccaataatatttcgacacgtggcatttgaattgggtttgacggatttgttaacttggagaccaacggacaaataaaaaatatgaccttgaggactattgccgctattt

SEQ ID NO: 264432 - DNA, 1792 bp, Cannabis indica
gtgttatgtgtgtgagtatagcatgcattaagattacactgtgatatgatgttatattgtatgtgagaataataagtgatgatatgttgatatacgtatgccagcatgttatgaattgatttgatgttgtgatattattatatttatgattatgttatctagttggggggctatgtcctagatagctcttcttactgggggttagctcacgggtactctgtgtgcaggtaaaggcaaaactaaacagtgaggatggcgagctcgaggcatcgattacatgttaggggattgtcacaatgttttggtttaagaatatttcttttaaatattatggctcgattacttttgtaaattaatgtttaaaaatttataaatgaatcaagtatttttgttttaaaataatgagatctcatgcttagttattttcaataaattagtttattgtttttattataaatggtattaaatggactagcgagtgtgacgtctcgggaaatcggggcgttacaaaatttgtccctattcgatgtaaatcatccatagagaatctttgactgttaggattgtaacaatggattattgtaatgtatctatatcttgatacatatagagccttctatataattgagagtgcaattccgaatctatagtggggcaaggaggaattaataaattagagaatttacttagtaaattctagatctacttattcgaagctcggttatataggcccatggtcccccactagttgagataatacttattacagactctgtttattggttttaattaatcaattataattataaaattagactatgtcttatttatgaattttcactaagcaagggcttaattgtgaagaaaagagattttggagttaatttattaattaagggactttgtatggtctacgtaataaataatatacatggcaattttattgataattaattataaatattaaataaatagtgttgacatttataggattgaaattggaaaatattaccattgaatgcaaaataagtggttgaaacaaagtggcaaaattgtaactagtaaaaggccctttagtggccagccactatgtgtaatttttgcccattattttattgttttttaatccatataattcaaacctaagccctagttgaaatactataaaaggaacatgatgctctcatctcatctaattcaactattcacttcaacctactaaacctaatttttattctctaacaaccagtagatgagagacaccttctatagtgatttcaagcctccttcattgttcttcataatcgacccatattgatagagtaccatgcccacacatagcaagtcaagtactcaatcatagtgtgaaagacggtggtaaccaacccaaaagagagaaagagatctaggctcaaatcttgataatactctgcgacataaaggaacaaggtttagagatctaagtggaaggagtcatattattctgctgcaatcaatgtaaggttttctaaacttttatgtgtttaattctattattttagagatattcatattaaggatgttaattcaacatacttgttagtaaatttatatcctggtaaaataaatccaaacaactggccccatagccatggtaatgatttactttcatgaaatatagattaaaacgataaatttgttgattcagatctgttcatgttggtttatgtgtgatttgatgatgttatgagaattatgaattttttcatgaagataatttatttttcgttctaaaataatttatttagattcc

SEQ ID NO: 264433 - DNA, 556 bp, Cannabis indica
gcttgcaatacttactattctccactaatatagattaatgcacaaccaagaatcagaaggtctttctaggcttgtaatgttaggcttagggtaaaggtagttgaaatggtcatttaggctttcctataccataagcttctccaatcatgtcacccacaatattttttacacaatcccaataccccttttctaattacatgagagatatattcttcaacaagattgcaacaactttatatttatcttttttttttctatatttgacactggttgtcagatttttctttctttctttctttttttttttttctaagttgttgccaatcaatttttttatattctctcaatttttacatttttttccacacatatacaacaaacttctcatccaaattctcccaaaataaagatatacttatggtataattagagttaaattgtggatattcatgggtttagctttttaggctcaatatgtgtagaagaaaaaaataagttaaggctcaaaaacggtaactagaataaaattatagggatggcttgaaagacacaatcg

SEQ ID NO: 264434 - DNA, 1233 bp, Cannabis indica
aaaagacaccaatagacgagaaaatgcttacttttcagacccgaaacataggctaaatataacctaacagtagactaaaaaaaacttaataatagtagcttaacttaaaaacaatgctaaaacaactataaaaaattttaaaaaaaaaaaatattatcgagtcattgataaacatgttgattatcttcaacataatcaacacctaatctaaaccccgagaaaattttcttcacaccatcctcgtaataattgtaaggcctaaatcaaaaaacaaacgacaaaaaaataatattgaattcaaataattggcaaaataaaatgaaaagcaaacaaataaaaaaataaaaacagaataaagaaaataatcacctaggatatttagcaatcctttgcaaatccaagcatcaaacttagcctcaattttaggagagacgggatcggaaaacgtatcgttaagagcgtaaaggccgttcacatatgtaaccatcttaaaatccctctcttctcatccagattgagaacctgaagacattaactccattggagtgctgctcacatcagtcgaccccaaaatcaacaaaagggcaatttcaatgtcgggacacactttctcttatccaaaagaggagtataagtaacagtgtcatcaacttcttcatcggaagcaatggctgccttttcaacagcaacatttggattggaatctggaacctgaaatagaaaaatgaaaaaaaaaaaagtaaaagttacaaaacaaacataaaactgtcaagcaactaaaagaaattgacatgctaacacaacctaacaaagaatataaactacacttacattgattttagcaacagcctgtaaaccagccaacacaacttgctcatcatcaatttcaagctatagcttaaaccattgaaaaaatcatctcccttttcaccagactctttggtcttaacattttcaacatccttggccctctctttattgcctgcaacactctcagtttgaatcacatcaacaacaggaacatcaccaacaaccttatcaactcccactactacaatctgtacttttagtgtcagttttaaactgtcatttataattttagtgtcggttcatagaactgacacctatttcacagtcacaaaaagtcagaatttaagtgtcagttataaactgagacgaatgggtttttgtgtcgtttgaaaactgacgtttaaaatgtacatatatattttt

SEQ ID NO: 264435 - DNA, 889 bp, Cannabis indica
tttaaactaagcggtctttacactaccactcaggaagaactaaaggttgcaataaccctgttggcctttgatgttcagccttgatttgctgacaggttaagaattttgacacgtagtccaccgcatctcttttcatcccataccacccgaagtagggttttaaatcctgatacattttggtggttctcggatgcattgaataaggtgtggtgtgagctttatcaagtatctctttcttaagctcacgaacacaaggaacacaaactcgagctttgtacaataaaatttcaccgttcgagattaaaaagtctttaggccgactagccaaaacctcatctcaaatcttaaccagctcgagatcttctagttgtgcctttctgattctttctaacagattagattgaaatgtcaagttgtgcaactttccaactacaaactcaatccctgcactaatcatttcagaagctagttgaggggctatcaaaactgtggcacaaacctgcccgggacctcttctactcaaagcatcagccagaacattggctttcctagggggatataaaatctcgcaatcgtagtccttaacaagctctagccacctcctctgcctcatattcaagtctttctgggtgaaaaagtatttgagactcttatgatcagtataaatctcgcatttttcaccataaaggtaatgctgccatatctttagagcaaaaaccacagcaacaagctctaggtcatgagttgagtagcgctgctcataatccttcagtggacgagaggcataggctataactttgtcagcttgcattagaacacattccagaccctgtctggttgcatcacagtaaacaatgaacttttcatgatctaatggcaaagctaacac

SEQ ID NO: 264436 - DNA, 618 bp, Cannabis indica
agatctacctctagtttcacccaatgccttgcactatcgaagaagagggccatacatattctctccttattcttccaactgtccaagtattgaccttcatcccctcgaatcaaatccaatatgccctcatcccactgaaagttagtgtggtcatcacctgcagcttcccaccgaccaataactcctgatgggaaaatacacggcatgatgacacatctatttgggtacaccttcggataaaagtgttgtcgcctcctcatcaaatgaaatgtcgcatccaaatgctaaaacatgaaaattaaatatgtcagagattaaataaaaaagttagataaagtattaaaaacttatatcgtctccaagccatgtctttggagtatgtagtttgaggaaccaagctgaatcttgtctaccgaagaagcactctctcgaatacttgttcccaatctggccgagtacccaactatgaaaagtcctgagcagcttccaatcaaccactctaaatgggaccgcattcacaagtgtactcgaagccctagacttctttttcatttcagtgtactcatcgaaccacctaggctcctttctcttcctccggttctccactagttctggagc

SEQ ID NO: 264437 - DNA, 1003 bp, Cannabis indica
gtaatgtttttattttgatcaattgattgatctcaacataggagttttgagtttggtggatttatcttcttcaactgatcacattgcgatatggaatttgaaaaattgtgttagtgatcatggtgagaaggaaaattgggttagaatgttcaaatttgaaatcaaagcaccacacaattggccttctagattcaatccatatcaagttataggcgtatgggagaatggtgaaatattatttaaaggtatttttaatagtattttcataacttataatccaaagacaaatacttttaaaaccctaaaatttccaccactcccacaacatgagcaatataggcaatactatacctactctccaaccttgctttctctttcttggctttcaagccaactatattagaatatatataattatggttatatgaatattatatttttattagtttttttttttttcgtatttagtgtagagctttttgtattgtattttaaagaatatcatatgaatattagattttttatattaattaattcaatcgttacatttgaaaaaatcaagatcatttttaaatgggaatgtatatatacataatgaagaaaaaataatttgaaaaaatatcataaaataaaatcgattgaaaaaaaaaaaaaaacgaacttatttgagattgaaatgataaaaatggttaagaattccccagacacacacagtttcatttatatatactgttggctgtgcccaataactacttttattataaatctgctaaaaaaatatatttggacaatgcttgtctatgattattaactttttcctcaatggttgatattttttttttcaatgaaaataccatttattcattaaattgaaaaatctgtcaaaagagtgacaactaatattggagaaacaatcctcgtgaattagtacgacctagatatatttttgttaattctttcaaacaaaaaattactaactcatcatcactcaataaatcagccc

SEQ ID NO: 264438 - DNA, 739 bp, Cannabis indica
aaaagtcacgagagcaataaattctttgaacactgtttttgacgtgttaagttttttcgaatttatcaaaattttgtcaaatgtcttaaataagtactatatgaccataaaaaaattggaccaagtaattttttaaataccgaaatagatatgagtgcatcaatatacctattttaaggaagtgtattgtacgtagaattttcaaatattatctattttagattaatttaaatatataaatattaatattatttgtattaagttaattcaacctataccaattttaaattattttatatatactttcaaaaaaaaaaaatattttaaacatatataaatgttaaaaaaaatattatttattattaatttttattgttatttttttttgaaaaatatttttattgttatttttaatattgaacaaatcaatttcaatattcttaaactttaaatttactaaataatatttcgtgcaaggcacaaatttttatttttgtattaagttacaataattaaataatgttacaaatgtacataagttaaaataaaatgttgtagcacaattcacatgtaaaagtatattatgactactatgataaaatatactaacgtcactttatacttttattattttggcacaaaccaatccaccttttaatggtaaaaaatctctattttttaattaattttgttttaataatatcatctatttaaaaaaataatattatttgaattaatt

SEQ ID NO: 264439 - DNA, 583 bp, Cannabis indica
ccactgtgttgacaatactgtaattgtgaatagatatatgatctggacttaacagattttgtgtataaacatcttaaacataagcatgtaaaattcatgcaaacataaatcacttcaaatttcttgtattgataactaatcagattgtagtgacttttatttagggcacaaaacccaacacatcttacatactggcatcttgaacttgggcaaggctaaggcatttatgtatgccaagaatggtgatccccttgactggtctatctcacggtttgaaggtttcagacaagctaggagcttgatcatttccctcatttggtccaactattcttgtatagaagtatctgttgccgtagagacttgactggctggccctccttggaggggctgcaggctcgaatgtgcgaaggtctggccggccatactctgggagagtgtatagtggaggttggtcggccctgtactattttgttggccttggttgaccactcctaggtacgggcgttagttctggttagccaagcctatattaggtagctatccatggttggccagccctctactaggtagggcctggttgccc

SEQ ID NO: 264440 - DNA, 656 bp, Cannabis indica
agatcctggtaaaataaattccaacatcccatcccacagaagaacaacttatgatccaacaacaaacaaggctttattataagaagcgttggatcatattgacgaactcgaggatgagtctcaaatacgaatagcggcttaccaaaagaaagtgactaagtactttaactcaaaagttaaaagtagaaaattcgctattggtgatctgttcctaaaaggagtcttccatgccactcaagaactcggagtgggggtacttaggcctaattgggaaggaccatatgaaatcggggacgaaatcggctatgggacctacaagctcaaaagaatggacggaaccatggtgcctagggcttggaatgccgatcacctccgaaagtattaccaatagtcagaaaatgtaaacttaggctctatcaagtaaatttataccagaaagtatatgcaacctccaaatttatatttgtaaagctgagtgtcttaaaaataatttttcatgccactcagggggttaataaggcataccacatgggcaatttaaaacaggccaagatacctagggtataggccatgtatttcccattttatatctgctgggaatgtgtgcccctactgaaaaaacacagaaagtctagaagttcggttctagggatcac

SEQ ID NO: 264441 - DNA, 368 bp, Cannabis indica
acatttgtatttttgtattgtattattgggcaaaataaatgaccaattttatatatccttaattacttcacttggaaaattttgtctcaaaaacccaacttaatttcatgaggttgttgtccaaacttggctacctattaaacccatcacaaatctagtttacctaaccctaataatcacatctataataaagtcataacaaaaaatatttgtacttttgagatttcacatcacttttccatttttacaataatgttatagttgttagagatattattacaatggaagataaaccaagatatatacaactcaattgtaaaaataatacaaggacaataaaagagatttgattaaatatatgttacaat

SEQ ID NO: 264442 - DNA, 1186 bp, Cannabis indica
accatgtgtttttacgagtatctccaatgaaggggatcaaatgtttcgggaaaagaggcaagttatgccctaggtttacaggacctttcgagattctcgagaaggttggttaagtggcatatcggttagctttgcctccagctctttcagcagttcacaacgtattccatgtctctatgttgagaaaatatgtttcagaccctactcatatacttagttatgaggaccttgagctgcagccagacatgtcatacgaggaacagccagtacagatccttgatagaaaggataaagtccttcggaataagaccatagctttggtcaaagtactctggagaaacaacaaggtggaggaagccacctgggaattagaatcagatatgagagcccagtatccggagttgttcaggttagatttcgaggacgaaatccttttaaggggggatagttgtaatgaccgcttagtttaaatttggaaattagcagataattaggatttaattatgagaattatttattgatatttaaataattatttatgctgatttatttgaattcagaatgcatcttatatgtcatatagtgaaatttcataattttgcattttcggtgcccgacaacatggaacgcggtgtatggctcagtagaatcacaatctaatattttagatagcggggcatattgttagacattgggaatgtttggattagtcgggaatttagagtttttccaaaataccctaagtgattcgtgtgactctttagtatgggcaagggcattatggtctttttgcctttgggttttgtcttttagtggggattttatgtttaaatctgatttttttagtagctatatgctgattattaagtaggtaaatcaatttctttctcatttttattgaaaaatcaaaattagacaaaaggttgcattttctctcaagtcttcctctctctttcgaacccacctagaggcagctaggttttggttgatttttctgcatttcaagctagtttttgcaaggtattagtggtctcaagttcttggtaagattcttgtagcttcctcttaagtttcttgagttttaagaaagaaaatttatgcatgcttgatgattttgatgttgtagctgctgtgtatgtttgttgttgttttctgaagcttatatatgtttaattgagtggattca

SEQ ID NO: 264443 - DNA, 1211 bp, Cannabis indica
tattctcaagtaatttatttattttattaattaagattctaaataagactatgtcttatttatgacttttactaagaaagggtatatttgtgaagaaaagagaatttagggactatttattaattaagagaccttgggggatctaattaataaatatatttaaatgttaattttcttaataattaaatatatttactgaatagataaagttagcatttaagtaattagaatagataaatgatatattatttcgttaaggaaacaaaataatgaataaattcaaactcatgggccttagagagattttggccatgggctcgtgttttttagtcattatagcttttttttaattcaactcatttattctaaaacctaacccctagtatctccttataaataaaacataatggccattgattcttagacttatgattctctcatgtttaacaaactgaatcaaaagaaagactattatttaatattttctattttatttttcaaaaattctcttgtttgtcttcacaaaaatttgtcctcgttagtgtagtgaggaacactatgtagtctatttttgtgagaaagagaattcaggtttagatcttgactatactcttctacatacaagaatcaagggttagagatctgaaaccactgaagtttttcaacaaatcttacgtgtttttttcattatttattttaataatttttcatattaagatgttagattattaaattaagatcctggtaaaatattttctaacagggaggtctcatgtatgctccagtatgcattcgactagacatatgatgttgagtgggagttatgagtaggtattagtataatcaaggataggaacaatggaagaaattcaaataaatgttaagattataggaggacctgcatgttagcatataagtgtggaacttatgaagctctttgagccatactcacttaaatttctatatttgcattaatgataggaagtctacatttaggatggtgattaccctagggttggagcagtaatttttgaaggagtatgaaaacttatatggagcctctcactgtaccagtgagattgaatattaaagtggccccgacgaccactagacaattattcagcctaaggaaatttctatacaactttttgtattattccagtcacagattaaccactagtgttacctccctataatatagaaataatttt

SEQ ID NO: 264444 - DNA, 1322 bp, Cannabis indica
attttctaaagtattttctttgatgggcaaggagagaatacagaaaccctagtgtttcttcgggaccactacctatttataggctcattatataatgacttttgggtatttattatttaacgccacaacaaattataaattaacttatggtatctacatattatttccatgacaatttactacccttttgatacccataacataactggtcacttaattttatgtcacactttataatagcatatacattatacttatgtgcccacaataggagtttttaatccaacatcatgttctttcaaaagctaacctcgcagacatcctcacaaagcaacttttccctactcagttcaaagaaattttatctaagatgggtgtcacaaacttctacattccaccttgaagtggcctattagaattaattagggaattagttaggttttttctcttcttccattttctattattttttctactcatggcttttgtcctataaataggtattattctcctctgtaaagtacacacataacaattcagtaaaacattctttttctctcattgctatgttcctaataggtaataaattaaaatatgtgaaactcttttataaattcggtaactattaaaaattttctaaaatttcgcatgtttgatattttaattgtagggaacatcattatgaagaaaaaaaaatattcgggtatatatttttccaggcaaaaattaaaatagaaggtgaaactggagattaagagaagcagtcattagttttaaggtcgacattttatttgtttatttattaaaaagaactcgtaattaataaagatatggtacgcgtatctatgataatatcggtattcataactcttttgttgtgtactatgttttgggcattttaaaacatataataataatttcatcgtagagaatcatgattaatatacgactccggcgttcatgtttattttccattttagctatatacgtacataataaaagtcacaattgtgactcacaagtgtgacatccttccatgttcacctatatacagtataaaaagtaggccgtatatgatataattttttattaattgctcttgtttcactatagtctatagtagtacaacatatatatatacataataataataatacacagcacatgatactagtacagttatacccccaagtagggacatatagagaccaaacgaaagtcgtcgatatgatctacactatctcactctccgagtcaggatgacttttgagtaaatagtctactgtcaatataaagttcaacacagaaacaacacacatata

SEQ ID NO: 264445 - DNA, 876 bp, Cannabis indica
taatttcgaatttcgaattttgaatcacaatgctctgataccatgtagaaaatagtgattcgaattgtgtgttgatttcatagaataatacatatttatatacagagttaggagactaaatatctactaaatatctactaaatatctaactctcttacagctaatatacacttaatatctaacaacgatattaagttgatcgaatatttatgataatgatggcctttccattttctggaatataagagaattgtaagtaattgaaagttaaggaaaagctaatgcaacatgaaagactagtgtacagatcaagagtttagtgtaatacaacgctaagagactgggcaaacaaattgttaaacaagctttcatatcataatgaaacattgggaagatcagtcaacaatggactaaaaagagacttaaatatgatttagggaaaagttagcaaacaaaacctgataataatgtttgaaactaagcaaccctacaaggctttagtgattgtttaagagctttatctgcggatttagagtgttttaatcacctatatactgtttttaaatcaaactatagttttgcttcctgagatctttccctgatcttgctttcatctctatttttttccccattattagcacactaattttttttcaagaagtaaaatgaggttatatttaatttatgaccgtgtgttactgaagattggtgcaccttttgtataggctttttttggtgctctggaaggggagaatgctgctcatcatattgacttggttactgaagttgctgactcactgatgaatcttgggcattatgactctgcattgaagtattatcagatgttggaaggaacagctgcctctgacaaagtaa

SEQ ID NO: 264446 - DNA, 578 bp, Cannabis indica
ataaaagatttgaaacttaaaaggatttaagacctaagtactactagatagtaaacacaaaatctatcataaatcacaattcacaactttattatggtagcatagtaaaaaaaatttaatcagttttttatttttaaaataaaaaaagtaaaaatattttttaaaattatattctataaacctgttttcacttttttattttttaattaaaaattaaaattttgaaaacacaaaaaaaatcacttttgatatttttttaaacagtttttttttctaaatcaatattttaaattccgactaaacccggaccggtcccaaaactcggccccagcacacagaacccagcccctgatttagacttagccccaaacttaaacccaacttaaataaaattaaataataaattttgtaaaacacacttttattttttattttaaacataagaaacaaaagtgactttaaaacacaattttatttttcaaaaagatttttttttacaaaatcctgacagccaagtcttttttacaatccacggtagtcccgcagagaagagaacaaagtatccctttgccaaaacc

SEQ ID NO: 264447 - DNA, 961 bp, Cannabis indica
tttcaagcttaataatattagctcgtagactaaggctcgtgaacagtctaaccacgtaaaaatcattgttgcattgtctttaatttattcttctttaagtttaatttctttattatccaagttttaaaaatcgatatatataacatcaataataatacatcactttataatagtattgagctctatcagtgtagtctttagcatttctcaaaacttttgtgtactaacagtagctatcatttttttatagtaattaggacttttaaaaatgcttatttatttatttctaattggtttatctattttattaaattaatggttaaaattaataagtaagtagtgattattaaaaaaattaacatgacatcaagactaataactcaaatgagcattgaatttacaatataataagtcatttaatatttaatttaagatcgcaaaacaaagttaattttgacaaaatatatatttaatgaactatgaattatttttattataaatttacatttgtatatcctaaattcttgtaggtattgtttaatcattagtttcgataaatttttaagaagtttcgatacttaaaattagattttaaatgatccgcaataaatatatttgtttcaatattgttgagaatcatggggttccatctcaaaaccaattggcaatgagtggagtagcccatgttctttatatatggctcaatacttttacatttaatccatgtgggacaatgctctccaatatcccccctcaagatggtggctatttttgctcaccaatcttgaatcaccttatcacaggccctgccatttgctcgcttatttttgttcggatctcaggcgtctttgcaccatctggatgccgtgcggctggctaaccatctggataggtgtaaatcgaaagcccgctaaggatatggctctgataccatgttgagaatcatggggttccatctcaa

SEQ ID NO: 264448 - DNA, 701 bp, Cannabis indica
agattttaagtgtctgttataactgagacaaatgagttttggtgtcattttaaaaccgacacttaaagtatacataaatatgtttttttctttagtgtcggtttaaaactaagactaaatgagtattttttgaattaaaaaaaatcattaaaaataagattttagtaattccaaaattactgaacctatcaaactattaacataaaaaatttagcattataacaactgtaaaatgaataattcccattttcaaaaacctgttataacacataaaaaaatatacatttttcataacaatttatcaattttacagccagtaaaaaataaaaaatacatacattaaactcaatacacaaacaaatcccaaaaatataattgctaaatacaaacaattatcaaacaaaattaacaaaaatcaaactaaaaattacactgaaatatacaaatagatctttgatctggggttcttgctcgtggtgttttggattcgcttggacagtcgacgaccatggacggccatcgtggccttggccgtggtggcaccgagatagaacggagaggaagagagatgggctctggggttctcggctcgtgatttctggagtggctcgcctaagctccagcgcggcatgaagagtataggaacgtgatttctggagtggctcgtcattttggtctgggcgccgcacgaagaagaaggg

SEQ ID NO: 264449 - DNA, 990 bp, Cannabis indica
ataggtagtatttgaaggtaaaagtatggcatatatatatagtaaaagagtgatggagagtactgtggaagagaatccatgtgatgagtgactacactaataaaagagaggcaagaatctgcactctctgcctacaatcatctacgataaagactaattaacaccctttccaatgacacacagacaattctcatcatattttgtcttatattttattagtttttattaatttactttttattttggcccctaacgattcgggttaatactctccatgtaatatgtttatcactttcacaaaaatatatttatttgtttgttgtgttataattgattagctcctccatttccacgataaaaacattcttctctctcttgaatttttatgaatatgagtgcctgtatgtttggttgacaggagacccatatttgtctagtcatgggttaaagaactacttttaagtaaattaaattcgtatatatatatatatatatgcacatgcacacgcttgcgcacatataggatgcatgtgatcaacttatcaggctaattgaattgtgttggtaaggaaacgatagattagactttagtgtgtgatagtctctaattatatgtgatgagttaaaaattagatttgtttagatttgggtttggcttgaacattgttgttctttaacatgtaagcgtggcagtccgtgaactgtgaacgatcgacgtggttatttgcattacattaaaaaattcatatataggatttggagcatattaattagattacaatgttacacctcctaaatgtttattaataaggcttataatgtgtatattcaagtccttgtgtagttacaaattaatatttatggtcaaactcttccaccaattttttcaatcgaatcagtttagaagatctcgttagtataccaatatcattgaaattatatgtctatgactctcctttgtcattagcgaattatttaaataataaaaaa

SEQ ID NO: 264450 - DNA, 813 bp, Cannabis indica
tttattttaatttttctttttatttgtaaataattacgataatttttttttattttgaaatcaataactacagtaattaaaatatataaaaatgctatttatataagtagtttttgatggtcggttgagaagtttgttatgtctttaaaccatctctattgtcgcacttgtaaaaatgaggacatggttttgggtttagagaggtgattgaagaagataaagtaaaggaaataaagaagaaaaaggacgtcacttttgtttgatttttacaataattgggtattatttgggtggatgaatttgaggcagatgctgggtgggagcagggccgaccctatgttaatttgggccttaggcaaaaatacaaattggggcccaataaaaaagtgaagtttttgggatttgaactctaaaccccttagttgttaaactaatcaaattacaactaggttacaacacatatttagaattgaaagtattattatttattttattactaactatattttaatttttttcgaaatggggccctgagcggtaggggggcctaaggcggccgcctccttcgtctcacctcagagccggccctatgctctaaactttttttttctttttaaagcttctttaaaattcattattcttgttctgcatttatagaataatattgattgctctaaacatattatattacttgttgaggaatttagttttattttttatacggggatatgtgtaaatattagtattatatattaacaaaatatattaaaatttgataaaagtagaattttgataacatattttaaaaaaatt

SEQ ID NO: 264451 - DNA, 559 bp, Cannabis indica
tcaaggacatctgtaattatggctgctgcatgaccaagtggttccaccgcagccctcttcaacatgaaagcctattaaattaagacgcaaaattatttaatcaggactcaggacactagatatctactgataataataataataatatatattaaaaaaaaaacagaactaccaaaactagctgagaaaccagtaataaccatttttctcgaagtgaaataggtcaacactcttgcaatacacaagcaataatggaataacaactagataaagataaaagaaattatttaatgccagagatagagagagagagaacctggccatgatgagatatagccaatatacatgattgctgaaaccatggttccccatcaatttgaacaggaaatgcagcaaatagttgtatcttgattaactgaccttgtgcaagccttcgagcccgagaaagtcccacctgttatcataccaagataccagttgagaaacatatccaaggcatctgagtctggataacaaaaatcaagctggacagaacggaaaccatctaatccaattggaa

SEQ ID NO: 264452 - DNA, 1149 bp, Cannabis indica
acgctaacccttattttaaaatttaaaatctatatatatatcttttttatgcaaaaattccgtacgtaatatttcaataacaattataatattattatcatctaattaaatttataaaacattaaagtaaaatttattattattattattattattattattattattatatcagtgaacaaataacagatttaactatattttatcaaaattggcttcttcaaaagattctttggatctgtctgtagctgttaatcatggcttcatcaagcacaatcagcatggacacaatcaacagttcctttggacgacgaaaatgttgttgttcgatttcatttcggtgttgctcatatcaccagtaatctttgcaagaacaagagccatctctgaatgagtggaaccggcttctatctctcaccactatttccaatccataaaccttagaaataagcttcatcacaacatgacaatctctacaaatcctcaaattcttcacaattcgaagtacaacatttccttctcttaatcgagctatcccaaaagctacagctagtttctcactatgcctactcactgaatcttccttttcctcttcttcaacatcatgtaaaacattcccgatttcgggtacatatccaccttcaactttaagtctcaacattatttccctcaatttttcataagcttctttcacaatctcatcttgtttctgatcagccataaaccgataaactagcttctcaacttcaatcatgctccatccgggagctttctttatcttctgctcgctcgctgatcttctaaccgaagcaacatcttcccatttccctaaactggcatatacattcgacaaaagaacatgatcaccactgctagaattgtcaagatcgaatctcgaaagtctcttctttatctgctcggccaatttaacattaccatgaaggctgcaagcccctaaaagagtcctccaaatgatgtcattcggtgaaattggcatttcacaagcaaactcataagccttctccaatttaccagctctcccataaagatcaaccatacaaccataatgttcaatagtaggttctatatcgaaatctctcatcatcgagaaatatctacacccttcttcaatcaaaccggcatgactac

SEQ ID NO: 264453 - DNA, 768 bp, Cannabis indica
cgtttatatattacaatcatgttttacttgagactcgaacccaggacctccaaacaacacacacctatctatgaccacttaagctagcctcaaatggttaaaaagaaaaatggtgtgatttagtcaaaagaaataattaaattactttttagaattttctccattgaaaaattaagctctctctttagcctagaccaccaagtttttgtcacttgtttctctctttatccatgagtactaatctattttaagtgatattattagtttttcctatttatgataggtgtcattgttgggggccggggctaatttttgcagagtatatatgatcagttctatatggcaaggccaggccaccttcaatttatttatttttaaggaacatgcatgcatctacaatcacttctttgttcaatatatatcaattatatcaatctttcctttactttaattacatcaaaagtaaaagagaaatgtattttcttcactttataatattcctttgagctatttgaaaacgtcttcaagatgattagttacatagtaagatattgtcccccaactttatttatatatttttaaaattctaccatgcttagtgcacctatccactcctatttgttttagcatttgagagaattttcttgtcaatttttttcattatcatttatattatagttatttaagacattatgcaatattttgagaaatttgaaaaaatttagctcgccacaaatagggttcaaacaatttatttcacatgcgtat

SEQ ID NO: 264454 - DNA, 1331 bp, Cannabis indica
ttccaaggtttccaacataatgaaatacagtgtcccggtaggcgagagtcaaagataacattagttgaatagagtattcagttcatctaaaatggacaccattttagcaatcttttattcgattaaaatgaaaatccaaagttgtcccagtaggcgagagtcaaggttattcttattttatgaggttccatcattgtttcatattttgtaagtttatctctaagtagtcaccgtaggggagagtctaatagagacgaaaacttacaaaatacttatcatatgagatcttacggtgttaaatgctttcaacgaataaccattcataagggggacgaagtctagcgtctcgaggttatattgaaaacatttaactattgcaagaccaacaatggagatcgaatatctcttgattaaagctcattatttaaaataatgtatttttaattaatcatttattttaatccatatattttaatgatgaaaattacttaatttaagttgatccaaaattaattaaataattaattttcaacttagctcaatttttgaaaatcatatataaaaatataaaatttcaaaaataattaaaatataataaaataaatatttaaaaaatatctaatttaagttgttctaaaatattaaaattttcaacttcaattatttttcaaaatttaattaaataacaaattaagtatcttgaacaaatcactttaatttgaaaaaaattccattttaagttgatccaaaattaataaatttttaacttaaaacaatatttaaagaatattttaataactaatttcctagaatatcttaacttaattatgaatttcaaaaatattcaaattcaagttgatccaaaattagttataaataacttatttccaacttaaatatatgttatgaaatattcaataactaagtatctagaagaatctaatttgttataacttatttatttaactaaatacagaaaatacatctagtttatcttgaatttgaatttcattaaactaagtgtgtttttctaaattaatttcaaaataatcaaatgaaaattaatttcatatatttcaaaattaattatgttgctaatcaattttattaggttaaactagtttaattaacctagtacagttattcaaatcaggcaaatgggtcttcacagttggggttatttatgtgagggaaggctgggttcagtatgtcgtacccactactaatggccccctaactctcacacaaggcccaaaagagaggaatttaaccttaatttaaacaactgttattaattgaataggcccaaatactaaatgggcctaaataaa

SEQ ID NO: 264455 - DNA, 556 bp, Cannabis indica
cataaaacccaacagttcctaccagcaagcgtgccagcaccacgaacccctgcatggaaggtatttgttgacggagcgtcaaacaaaaacagatccggtgctgggatagcaatgatatcgccagacagactccggctccaggcggccctacgttttgaattcctagcttctaacaacgaagccgaatacgaagccctaattgcggggttaaagttggcgaaagccgtgggagccataagagtagaagtctttagcgattcgcaactggtggtaaaccaagtctcgggagaatatcaaacgcgtggagagaagatggctgcgtatgtagctattgtctgggagttgctacatgagttcacggattacaaagtggaaagaatccccagagaaaagaatgctcgcgcatactgtttggccaagttggcatcgaacagcgaaatagagagactaggggtagtggccgttgaacgcctcacggaatcgagtatcaaaattaaagatacggtggttacaatcgagcaagagccaaattggatggaccctatcatcaaataca

SEQ ID NO: 264456 - DNA, 545 bp, Cannabis indica
tcatcttcaaaacttcatggttgataccggcggagttgatcttggattcgtgggaccaaagttcacgtggatgagaagtaaggggtctctgaactctgtgagaaagcgacttgcagggtcattgcctgtgccgattggtgtgtgaagtaccctgaagcagctgttgtccaccatgcgattatggcctctgatcatgcccctgtggtcctcgactctcaaccggtcacccagaaactccattatccgttcagattcctggaagtgtggactgcagatccgaggtgcacagaagttatccaaagagcttggagtaaacagtgttatggtcaagcgggtaatcgtgtttgtggtaaattgcgtaacactaaggatgctctcaaagtctggaatagggatgtattcggtttttgcgatcaacaactcaagagtttgtatgctagactgagttttcttcagtctcaagttcaggcgtcgacttgcgaagaagaagcggagattcaactgcgaattattgagctagaacagagacaagaaagaatatggag

SEQ ID NO: 264457 - DNA, 517 bp, Cannabis indica
agggatagtgagccaaaaaagagacgcttatgattgagttgtcaaaaatagtgagcaaataaaatagctaccatcttgaggggcgaaattagagagttccacattgctaatgtgtagaaagatataatagaatatataagatgaatgagctagtcctctaattgccaattgattttgaaatgaaatctcattcatcttatctcaaattctaacagatatatctctaaaacattagatatcactttgtattaaaaaaaaaataaatatataaaatgagtctacagtatatctccttaaatgggtgttttgttagatcaccaatagaattttagtccaatttattttatgatcacgtacattatagttatatatctatgaatttttaaaaaaaaattcgagtaatttacaatgaccacagtaaaatttatatattttgttagacgtgaaattgctttttcttatacaagcagtaagtaattatttaagccttatttttgttactgtaaattattcagaa

SEQ ID NO: 264458 - DNA, 607 bp, Cannabis indica
aatgttgcgtgtcgagccacgtactaactgttagttttatttaagatttagatttcttgatttttttttttaaatttctgtaactaaaagtatgattatatgaatgatttgttttattaaagtaatctttgtgttattgtatttggttagtaaaacatactagcttgtacacataaagttacgatatgtacattgatattaataataaaaagtacgttaattgtaatatttacataatcataatgtaattatccttatgtgaagaaataatttataataagtcataacaatatatgactttaacatttattattctaatttttatgtaaatatattcaaatttgttctctgtataagtaatactatttttgtagcaaaagtatatataaaaaaagtggatgatataatatttttgtaacaattaatatttaaagattatgtggtaaaataattattggtaaattatctctatgtcttctaaaaaattatagtatataatatactaggggttcataaaatatctaatctaatctaatttacacgattcaattcaatttaatttgtaaagttgagatatccgcacatgtgcggattagattagattgaa

SEQ ID NO: 264459 - DNA, 1497 bp, Cannabis indica
aaacaagaattttgaaaataacaaaatgttgttttctgttttaaaaaccaattcccttttggttaatattatttttaaaaaacactaaccaaacgtgacttttgtttaatttaaaacctttaaaaactattttttgaaaaaaaaaacagaaaacaataccaaacatgctcttaattatattcttatatttggctcaacactctaccatttattacatgtgagacaatgtctacaatatttactcataattaaattaatagctgacaattaggaattttattcggttggaaaaaataaaaacataagaatataaatgggaatagaaataggaatatgatgaatttttaaaattttctttcccttatattgtaaattgagtgaaaattaattcttttcattttattactctcaaacaaacacaatttaattattatagttacaaaatttatattcttaattgcttaattataaattgtcctaggtgatcaggaggtgagatttatttgttgtatatatatatacgtgaattatgataggtagatttgaactaagcaataaatatgcattaaattacgtgaatttattacatatatatatttatgtgtcattatatatgtttttatatatatatcgtaatttgtaaaaactgctgcatagacacttttttttttttaaaaaaaaattaatctagctaatataatcaatgaaagtgttgttaatcgatcttttttaaagtatatatctaacaaattctaattatcgatgggtttatatatatatgttatcttttggggtctcatataagctagtttgataaggctatatgttatgtttttttttatttgtatagggtgtagtgttaattggatatataaaatttgtcttgttacttaatacaatgtatgtctttgtcatatagatattttgaattaaattttttgtcgtgttttgtatatataactatataaataaataatgggatcacaaaatatcttaattcaactgtagcaaaccactgattggcactaacaaaagaacaataacaaacaaccataatatatattgctcaattagaatattaattacaatatgtttgcatttgaagtgggaaccttgaacatttctagctagatttgttgatatcttaacaatctcagatttaaaaataagtactacctttatatatatccatacatacatgatcactaaaaccaaaattataatatattattgtaatttatactatcatggacccttaacacgtacagttagatatatatagtttgatctagctaaagcttatagtactctcgttataatatacataattaattttaatcaatattagtggaagttttggaatgtactttatattaattaggtttctttaattaaatgaaattatatatgttgatactctctccatatgaagattacgtatcatttcttacaagatttgaaaattatatgacctgttattcttgttctatatatata

SEQ ID NO: 264460 - DNA, 473 bp, Cannabis indica
aaacctctactgaataaggcgtaaaaataagcctttttcagcaagcacaactttcctatccttcatgctatacaacctgtaatgaactatatctttaatatcctttacagttttcaacacagtataacaactatcattatagacacaatggtttctattcttccaaatcatataaattgtgacagcaattacaagaatgattataccagtatttttactagacagccaacataaccagccattaaagtccaaaggccacgccaaatacccacaccagttaaagattcgctgcacaacagttcttgagtatctgcacctgaaaaataaatgactatggctctcctcttcagagttgcaaacaggacaatctttagtccctaactcattgtgaaacttggaaaagttatctctgttggaaattattttaccaagatcttagatctactcacaagtatgttgattaacatcctaaa

SEQ ID NO: 264461 - DNA, 502 bp, Cannabis indica
cccaaggatttgtccaaataagatgtgtctctgactgtgactcgggaaatggtcaccaaaaatggttttttttacctttttctttaaagaaatgagataggaacaagattcaatatgtgcatgggtgggtttgtctgaaaacataagtcagaaagagaaaacaaataaaaaaagataaaaattgaaaagaaaacccatgttccaacaacacacctacccacacaacactgactagaaaggtcaacatttgacaatttgaactgttaagtttgtgaaggtgtatgttagcaaaaatctagtgtgcaatgttagaacaactagctagctatgttgaaaatttagatttaggtgatattttataataattattaaattaatttatttaagatttaatatttaattactgggtaacttaaatttagtattattttgaatgtaaattgaaattttattaatttgttaaatcagccaaaagacaagactgtaattcaatcggaacatc

SEQ ID NO: 264462 - DNA, 2454 bp, Cannabis indica
ttgtaatttcataaacaagagctgagtaagagtgactcgtgaattaaggctcgttaacgtgccaacaatgtaaaaatcttgtcttactttctctctaaccatactttctttagcttcatcttcattatattcagtttttgcaaaactcgataaaatttttggtactttcattgcgagttggagaaagtcatcaccatttatgtcatatacaaagatggtagctacaacaaacatgaccagataggcagaataccaaattggtcaaaaaaacactaaaaacctcattgttggcattgtggattcccctccactgattgatgctcaagcagccacctgggagaggggaagctttgacagcgtgcgaagatcctccccaaaatgataactattatctgtgtttttggcaagggacacgtggattccaggtcagcagcaaaatcccatcagtgggtcctaaagaagataatttgggccatgcccaagttctacaagaccttccaagaacgcaccttagctctatgaccatatgagcttctgtatccagaagcaactctagtactgtgatgtcagagggccagacaatgtgttcttggaagacaagttcagtttccctttttattcaagcgcatagtataacaaagtaaatgctcctcaaatctcgacaaaagatcatatcaatctagaaggggaaactacataaaatagaaatcaagaaattaatttataattaattgcctaatattatagtacacagttttgaaaaattcaatcgtatccaatgtgtctagttaacagatctactccttcgtgggctgggcttcatgagaacaatccaaattacgtaatttcatgtaaactccccattagatggaaaaataaaaacatattataattctctgaacactataaatacccaacgaatccttcaaattaatgattgaattctcttgcaatatttacccaaacagaaagagagaacttgttgtcattgtattcccaaaggcttttccagcttaagatacataataatatcgactcgtaaactaaggctcgttaacgccccaaccatgtaaaaactatgtgtgttgttcttatttctttttctaaattatatctttcttcatttctaatttattataattggttttccgaaaatctctgtaaatattttggtgctttcattaagagcgaaaggaagcagtcacaccatctaaagattacgctcattaatcatggtactcacccgaaacaagtctgatctttactttactgatcccaatgccaaggcaggagatacagaagatcagaatgaagcaactagccgtcacaaggattaacttggcaaagatacagatctagacgctcctatattcgaagatgatgatttagaggagaatagttctaatgatgctgaagatgatcctcaagatacctcgaaggatgatccttaggatgcaccgaaggatgatcaccaagacaagaatattgacgataatgctaggggaaaggataaattgacgagtcatatcccatggttattatggccaaatactccaattaactgaaaacgggttatctcgataggatcaattcaatgagatacggctcaggaaaatgacgagaatggaagccatgatgataccctaccaaaggaatccctaatgtgcaaacaaatccaacaacaaatgatctcggaagagttgatcctaaagatcatggaaactcaaatcctcgcaaggataaagggaaagggataataggtgaaactttaaagaagacaccttcgactaaacaacaaaagaagtctaaagttattgaccaaccttaacagaaaaagaaaggaaatcatgctttaggccagggcgactagactaattctagaggtagagtcgcacaaaaagataagactgttgtcagagtcaagaagtctgcttcccgaaaggacaagcatcgtcacaataactctaatagtgaaagcaatgatgtcaatgaggtatgtctggtttcagatggaaacagtgtaagtctttctgcaaatgatcttgaaagaagattaaatgaaaacaaagagaaatttagacggaaaaagccaaactctatagagataatttgagatatcacatcaatgatcgctttcacagaagggattctacaagtgataaaactcaacacttggaatacaaattcgaagagatgaagctcatggagaagatctccaaaaagaaaaatggaactgtgtttgatttagaagaagacacaaaaccaagtgtgaaaataattatagatgcaccactgttggagtgcttcaaaattccccaaaaggaattgtatgaaggtaggacggaccccatggaccatttttccaagtacaaccacacgatgcaaatttcaaatgctagtgatgatgcaaagtgtctttacttttcactgactctgacaaaatctacgatagac

SEQ ID NO: 264463 - DNA, 820 bp, Cannabis indica
aaatattagaaatcattttatgttgcatggttcacatgatttctttcatgattatatatttaatgtataaattatattaagtctagaacatgtcgttattcatgattatagtgttgtcaacacagtgaaatataatcatgattataagttcaaaagtttaagtctcatgatttgtcagtatattggatttagactaacatgataatcagtgataaagtatacttacaccttagataagtgttatgtcctttctagggcattggcaaagtatgctaggatcagatgtatggagtatacatcagactggaccaataatgaacttggataagatatcataaacttatcgttatatctatctaagtcaatatcaattagttaatcttaggtcaatagatcttaatcctgatatggttaggttctgcttaattgtattatttatgttcttagagttgtttgttaaagctcggtcggtagaatacttacatcttgggaacatgatagtgcaattgagttggagcactaatcatagatatagaatctatagcttctataagtatttagaagtgagacgatgatttccttcgagcttggcttaatagagactaatgattgaggcctcatttcagtaattatattagtttactgaaatatcatttataggtagctaaataattttaggataaaatgcattgaagggtagacggtaaatttgtccctattcgatgtagatcatctatagtagggatcttttgaacgtattttggattagtaatgatggataattcaataacgtatctatatcttggttacatatagagcg

SEQ ID NO: 264464 - DNA, 903 bp, Cannabis indica
acctttgccccacaccagcaacacaacgactctatcttcatgccccgagacctaagaaccatgttaacctgcagccagccattacagatacgccacacaaaatttcaaactttaggagggatctccaacttccaaatctcgttccaccatttcctagtgatctcatccgaggacggacctgcttttatctcactgaatgtagccactttataaccactactcaccgtgtatataccgtttggggtgtagtgccaaactaaatcatcattagcattattaaagcaaggggccatacctagaataagggggacatcatccgggtggaaggtttgatctattatatcttgtctccaataaccttctgtatcgttcatttgatccaaagtggccccatgattaacttttgctggagtgcgaagcgaaagtggatggacggagcagccatttgtcttcattaatgcgcacccctctacccgatggaaccctccaacgaacacccttttcaattattttccgaccccataagatgcttcgccacataaaggaactaaatcctccaagtttagcttataagaatgtagagttggtgtagtaacatgctttgagaacacgggccaacaatgaattgggatggtttataatcttccacccttgcttcgctaataaggattggttgaatttcttcaagtttttgaaccccattcctcctttatcctttggtttgcaaactttgtcccaattcccccaatgtattttattcttagtctccgaagaaccccaccaaaatcttgccatcattgcatgaatgtccttaattagctctttcagaaagcgaaaacaactcattacataagttggaatggcctgaattacagcttttatgagtacttccctacccgcttg

SEQ ID NO: 264465 - DNA, 514 bp, Cannabis indica
ttccaattcacccccctcttggaaagatatcataggctaacaattggtatcagagaaagggctcatttatatgattagatttcacaatctagagtatgtcgtttccaagaaattcacacaatatcagaaggtttaagcacaagtagagcaccattctttgatggggtaaactttctttattggaaaattagaatggaaacttgtctttaatccttggattataatttgtggcatattgtatgttatggtccttacattcctatgcatattgtagatggagtagaaatcgttaagaaatatgatgcagttgatgaaaatgattaaaatatgatgtctaagaatcataaggctatatgtggcttagatagtgatgtatttaaaatattgagcaagcctcctcgactcatgatatgtggaaaatattagaagtaactcatcaagaaactagtgccatgaaagaaactaaaattcaacttttagttactcaatatgaaaatttgaagatgatacaaca

SEQ ID NO: 264466 - DNA, 1255 bp, Cannabis indica
aataaaaacaataataaatgatttaccactctatcagaagcaccaaacaaatcggttgtgtccatcttttcatggtttttggagttcattttttcaatcattacactcaacttcgccgaatccccagaatactcatctctcaagattgtcatctcattacaaatgcctacttgaaaatctttaatagaggataaacttgtgcaaatattctcaaacttctcctcaaaatcctacaaaagatacaataaaaattaaaaaagagaatatgaaataacctgttaaaaaacaatttgtaaacaaaatgtataaaaactggtttcttaccttctcatcatccacactcttgggaagatacacggcttgaaacttaaaattcttcaaaagacgattacgtctctcagcatcagtaacacgaaaatcatctacaataacctgttaaaaaaaacaagtttctaaactataaaacaagccaaataaaaaaaaaaacatataacaaaaccagttacaaagactattttaccttaggattattacaaaccttttcaagtaaagtcacaaaatcaggaacctcgaaactttgccaattaagtattcggcgaaactcaaaacctttcttcagaaaatattccagggacaagctaggaataatctcataaaaccaaacatgaaaggcaacaacaaatccaggaagtttggacttcttgaactttttaccctttgcttcaagttcatcaaatataaaattaccatccttaattgcaattatcaaatagtagaatgtcctctcccaaagcatttttctaaatgcaaaaccatttagaacttctagataatcatcaccattaacaagcctgaaaagaaaattgtctacctttttatcatgtgtaaatccaaacaagtagcaagagagtaaatacacaacacccatcttaactacatcagcatcatcaatgagaaattcttgataaaaaaaaacatgtctcacatcccttcttctgactttgtcagcaatgccaaagttaggaaacatcctagctttaaactttaacatctttttgttaagaggtttcaagtcgtattgaccaccacagttgaaaccagttatagctgaaaactcctctactctaaatctaacggctttagaacctatcttataccaacactcctcatcatcctctccgtattaagtttccgtaataacataagatgcaccagctctttttgaaaaaacaagtgtatgcatatcaaacaaaaa

SEQ ID NO: 264467 - DNA, 594 bp, Cannabis indica
ctatttttcccatccgtttcgttacttttatggccggaatttcatcccgacccgaccgggtttgaaccgggtcgcacaagatccatgttgcagccatggaagctgctggaggttgaagacaacccgctgggacgaagcccactcgcggctgccggagagtgagagagagtgaggtagttttgtgactccgtttttgacgattcttttttccagcattattagaatttgatttctgattttttggtgatttttaattaattttttgactcagtttaataattattattattttaataataattatgcagttaaaaaattattaaaaataatttttgatgatttttcaaatctgtcgatcatagaatttttttttggtttcttctcgttccataagacatagtcactctcttatttgatttatcttgactatgtaattgttggaatttattttaccagaatcttagatctactcacaagtatgctgtttaacaccctaaatatgaactttctaaaacgataaataaacacatataaagttaagaaaaccttacgttgatgcagcggaataatgtctccttccagtcagatctctaa

SEQ ID NO: 264468 - DNA, 661 bp, Cannabis indica
tgatatgtatgattatttagtaatcgggattagggttattaccctaataggaacagtttggtagcctaaggttattaccctagtgatatatgtgtataaatgtcatgccatgtgaaatgtaatgagattcaaggattatgcgcttaaggcataattaggttggactcggtaatcataaccgagatgaaccattctaaggccttaatgtatttagacgtgtgagagcaacacgtaggtctacgccacgtagatataaacagatgtgtgagcgcaacacataggtctacgccacgtagacattaatgggcatgtgggtgcaacatgcaggtctatgtcacacagacatatgtggatagcattattatttaaatagcgtgttgagcttattattgttaatgtttatactgtcttgttgggcttggctcacgggtgctctactgtgcaggaaagggaaaggctttacctgatcagcgatgagttcaggagctgggcaaagaatgtacatgtccgagccacatcagaccaagcgggttaagggtctaccaacgatatattttgaaactctattttgccgcttaggccggctgaaagaaagagacttgtaataaagtttgtaaatatttttttttgggatcccaactgttgtagagtttaaattatt

SEQ ID NO: 264469 - DNA, 856 bp, Cannabis indica
aaccatctttgtccaagggtgggaaaagatacaatggtaagaagaaagatatatatggtgaaaacaaccagaaaggatcttcctggacaaccaacaagggaaagggtattgggtgttttctttgcaatagtcctcatatggcacatgagtgtcatagtaaagaaaagttaaacactaggattgctaaggaagccaagggtggtgatgatcaagaagtgccttctaggatgaagccactacaacttctaaatccaatcactatggggaaaataagttagtttaaaggcttgatgtacgtgaaagaattcgttaatggaaaagaagctaaatccatggtggactcagggaccacaaaaaattttggtgcccaaaaagaagtagagagacttagtctggattttgttcgaagtttaactacattgaaagtaatgaattcagaggcaaaatcgattcaaggatctgttacagtgacattgaatgttgaggcttgggagtctcaatgcaaccttataatagttttgttggatgattttgatatgattcttggaatataattattgggggcaaccagagcaatggttacaccacaccttaagggtgttattaggggtgttcattggatcacatccaatgtttttaggcctatccagatctgatccaatcatatattggatgttagattttaccatccgatcagatccaattaaattccgtcatctaatcgatccaatatccattggatgttgaattggatcggttctatccattagatgtatttcatatatatatatatttatttaatttaggtttattcaatattttagacctagtattttttggatcagatcggatccat

SEQ ID NO: 264470 - DNA, 1300 bp, Cannabis indica
aaacctttggacggtgaggaactagggatatatctagcagtaatggagcatgccgtgagtaccgtactgataagaggagaagatagcgtgcaatatccagtctattacataattaaaagactcgtcgaggccgaacgccgatatctgtggatcgaaaacctcacctactacctcattctagcaacaagaaagctgaagccttactttcaagctcatcatgttcgggtgtataccgaccaaccactacgacaaatactgcaaaagccaaatgcctcttgacggttactcaagcgggcgatagaattgggacagtatgaaatcaacttccaaccccgaacaactatcaaaggccaagccttggccgactttatggtgggatgcacaggcaaagcagaaagcacacaagaaagcgatctcgagccaataccacaaccaggtactgttgaagacaaaccgacctggaagcttcatgtggatgggtcagcaatagatcaactatctggtgcaggaattggccttgtcacacctggggccaacacctgcacgtagcggtcaaatttggattcaaagcctctaacaactaagccgaatacgaagccctaatcgctggacttaaactagtgaatgaaatgaaggccgaacacatcgagatctgtagtgattcatagctaatggtaaatcatgtatctggcgattatgagggtcggggagaaaaaatgatagcatatctgagcaaaatacatgatctcctcgcacaattcaaaagctacagcctcagacaaattccaagagaagaaaatacaacggcagatgcgttagcccgattggcgagcagcaacataagtgacaaggcaacctggtccctatccagttccttgaagagcctagcatcactggcacggaagaaattgaaatgatcgacacatctccaaactggatgacgccaatagcagcctatctcaactctggggaactcccagataaccgaaatgaagctcggaaaatgagaagaaaggcaacacggtacatcatagtagaagggatcatgtacagaagaggattctcgatgccattactcagatgtgtcacaccagatgaagctgcacgacttctatttgaagttcacgacagattctgtggaaatcatgcagccggacagagcttatcaaagaaaattctaaggcaaggctacttctggccaacgatgattgaagattcgagagcctatgtcaagaagtgcgacaaatgccagagattttcaaagataccaagagctccgcccaacgagctgacacagatg

SEQ ID NO: 264471 - DNA, 716 bp, Cannabis indica
tttcccccgctgggataaatctccccacaagcacacttttggttaaagggaacccaacttaaatattaattaaatataattaatatttaagttgattttattcaaagacacttaaatatttaaaaattttcttaaaaatttaattaaataggaaacttatatttctgttgaaattaatttattaattaattttggaccaacataaattagaataatttttcaagatttattttattttactttatatagatttcaaaaatgtatttatttttaaatacattggatttcaaatttagttacatatatttattagaaaattaaatttgaattgaaaataattttagaccaacttaaattaagtaattttcgtaatatttattgaaaattaatactaagatggaaaataattttattaatttttgaatctttataagtataattttataaatattaaactaaaatttatatttagagttatgtaaattagtaattttaattaaataaatatatattaatataaatagattaaaataaatattagaagaaaatacatacttttaataatgagctttattataaggaaattcaatctctattgttggttctacatagttcttgttttagtgagattcatccctaataaatgttcattcattagaaatttaacgtcatagaatcttgaaagataagtattatggtaagtcttttattcttag

SEQ ID NO: 264472 - DNA, 623 bp, Cannabis indica
aaaacgtttcatgttgtctagaactttttgcatttgaggcgtaatttcgccacaatcaagctcctgcttgatctcttcaggagttagaattgggtttttgtccttgttccttttagtagacatttaaaacttttaagagaattaccttctagggttaaataataagaaaaatatgtaactcatgaagtagaaaattgcttttataaagacacaactagtagttgggaaggtgggatgataaatgtcaaaaatgaattacacaattctacacgtgtttgtcatgcatagagcaatatgggcaacaatttgtgacaactaacgacactatgcgacatattctcgattaacatgtcgtactaccgacgtgttagcgacattattatcgacatatgtaagtagttggttaggcggggataataaatgtcaaaaattaattaccaataaatgtcgaaacatgatttgttatccatatttcacgacattttagcgacattttctcgacatgacacttaacagatggaaacataatttgctatcgacatttcatgatattttagtgacatttatcgttatgaagcttaacaaatagaaacatgtttcgttatcgatatttcacgacattt

SEQ ID NO: 264473 - DNA, 3792 bp, Cannabis indica
aaatagtctttgtattcggtttagacattcattaccaattaactctaataaactagcttctgtggtgatggaagattgaccatattttggataatagccaatccattttattcttctttttcttttcccaccaacacaaccaaacagaaaatgtttactcatacatatttagttttaagcttttctactcatattccaatcacaaatattttctttctttttgaaatatatatttctatcaacactactacttgataccatatacagtgacaaatacatattcttgaagcccaaatattctaacaatcgttatgtaagcacctcaccatagcacgagtttgatcatttaagttccaagttttgacttattgtgtatacacaaatttgatttaaagaaatatgatgtcacatgagtaagaattgagggtaaatcttgagtttcaatcaataatctacacccaaatattgtaatctgatgatatttggagatgaacactaaataaaacaagtgtcaatatttaagatcaaagtaagttatgttaactaatgaaaggaaaagggtaccaagtaagaaaagcctcttacaactaccactaccagacagaatctccataaccacctccttgacaaggaacctactaaccttaaaaagcttatattgcagattatgtagtattccatcattttagttcataattggaaccctttccataaacataccaagaggtaagcaaattattcttcattttaatttcatatcttattgaaaaggaagtacatatatacctattttttgttaagcaatgctaatcagtaatcaatgaactaatgacagagactgaagaaacttccccccaagtttccacctggtggttatgattttgaagtagataaagacccttttcggttaggacaaaagaaagaattattatatattgatacaagaacagtagtatgtatagatccaaaatttatgtgtatataataagtttaaggacactaaactttatagatactcacttcagattatggcatgatattataccttttgaatggctttagatatgaggtagaatggtagataatatgttgttgacataaggaaaggaatgtaacaaaatttgatgctgatttgagcttctctatgaaacttgtgaaacttgcaacactgtgatatgacgactaaaagtcttcgtccagcttgaagacgaagtttctttcgccaccttgaaggcttggcattacagatgccttctgataatcacccactcttctctcgaagaagtttgcctttcctctgcataattgaacaatgaagaagaacatcatgttattgaaccagaaagaaaacatcatgatcataatagtatatatatgaactcactgcaaagaaataaactccatccaatcaaaaggattttccacattgtactttctctggcatcccagtgcaacctggaaacatagaaagcttgactttaattgaaaagcgggaacaaaaatatgtcgaaggaaaaagagccagaaatgagttgttaaaagataccaaaagtcgatctgcaacaaattttatgtactggctcatcagtgctgagttcatgccaatcaatgcacacgggagggcctcacaaacaaattctgtctcaatctcaacagctttgcctacaatgtgatgaactttttcccaaggtagtttgtttcgcaataaactgtaagccagagataaaacaagtatgttattatttcacatagcaaaccaaaaggaaaaaataactgaattttcctattccaagttcataaaagaaaaaagccagatataggcaataaaatatctaatactagcaatgtctttattatcaatcccgagaggtgccatataagcctagagaaaataaacatatacaaaaattacctatacagaagacaagcaaaatcacagtggagtccttcatctctagaaataagctcatttgagaatgtcaagcctggcattaatcccctctttttaagccagaatattgcacaaaagctgaggatgacaacaaacaccactactaataaggaaaaatgagctcaagagatgaacttggcaacatcaaaaaggtgcatatgactgattactatcaatgaaaactaccttccagagaaaaatattccttcaacacaagcaaaagcaacaagtcgctccgcaaacgaagtggaactgtgtgtcataaagaataagaaattatgtaacaaaaaagaaaggaaaagctactaatatggaaaggactgtcaatgacatttgaaagataacaaaagtatctagctcaaagtctgtctaatgtaaaattgagagaactatgaatttattgaacactaatagcttattgagatttaagaaatcccttgaaatgaataaacataatatactatctaaaactataccatgtagtcataagctagtttttgaggaaatattaagtagaaatatgcatcagtacctgcgaatccattccatagcccacttagccttgctagagatacaaggaatgttttcgactgcattgaataatctatgtttctcacttgaatccttaatgtacgtttccaaaagcaagctgtacatttctgacagaaagcagaaccgaaaaggcaaaactcaaatcgggtatctgttaaatgcatttgtagaatgaatggaaataatcaacaactaaagatataccagaatgaatattttccattgcaatctgaaatccatagaatgcccgagcctgagagaaatgatgaacattgaagtaaacaccaaccaagaaagaatagaatatatgttaagtcaaggaaatgatgagttcttatatctgaacgacaacaaaaatggttgatgaaagaagggtttggaattggtaggaatttgtaattttatatgaagatatttttaattgagacaccttagtaaatttgattttatatttattaaggactaacagcatagttgcagggttgaaaacaaaaacaaagtcattttataaatctgagcatttataaagcagataattccagcaattttgtaagacaatgcaatacagtgtgaagaattaattaaatattctttcacttgttattggtaaatatattcttatgctaaattaaaagaatgctaataaaggttggaataaaatataggccttcaatgaaaaacttgtacctattgtaccatcaaacaaggaattagcctgaagacatgattttccagtaggataaaggataaccttgaataaaggtgtagaagtcaaaagtaagatgcaacaatgaagcacatgaaacaccgaatattaaatacagatactaagccataaattttgtacttgaaataagaataaaaagaaagaaagaaaaagttcttcatgttcttacaagtattttttctaaataaacaaagacacacacataacaaggaattcacctctggaatttgaacatcattcagaaatcgtgcagccaaattttccaaaacaatcccatcagatgaagcaaaaaatgccaatacatgacttatgaagtgtttctctgaatcagacaaagtattccactgctgaacatcatgagagagatcaacctcttcagctgtaaccccattaacacatcatgagaatacactaatgcaatttgagagccaagtgaacacatagaccaatacaggaaacaatatggaatcatagtgactggccccatgcaattattaatcatctctttaccatgatatctttctaattttgtagataatgttggattctagttcttacttaa

SEQ ID NO: 264474 - DNA, 780 bp, Cannabis indica
tttaataaacagaaattaataagatatatataggcttcaaaatgtcactatataattaatataatgttttacagtgcaagtgtagttacgttttttttttttttgaactagaggaataattttattctaaaaaaaaaaaaaagagtgtaatacttagtggcagattcaacatttaagttgacactttttattgtacatgagggagggtgtttaaatttatatattgtataatatattaaaaattgatgtaaatttgtattttagtattaaatataatataaaataaaaaaataacaataaaaatattaggttcaataattaagacactaaataaaatttatttattgatagaggttcaaaaagtaaaattcaaatataaaaaaatgggacatcacatacacaatttagaatgatagattaaaatttaagtaaatataatttttaccatccaactatgatccttataattgacttttacctctaatttttttgtgtgagaaaaatcttcttgagctatagaactaattacaaatgagtatattcaattacatttcattcattttttttatataattttctaatatagcactaatttggaaatatggtattgttaagaacagacaaagaaactatgcataatgaatgctgtaatgccaaattatatgataatgtatttataattttagagctaatatttttatgtttaatactatatattgtacttagtttcagctagcttacattagtcaattgtaactatacatgtggctcgtggccaaa

SEQ ID NO: 264475 - DNA, 526 bp, Cannabis indica
gttttggatttagggtttagggtttagggtttaagatatattagagtttagggtttaggatttagggtatagggtttagggtttagggtatagggcatagggttcacggtttagggtgtagggtttaaggttttaggtttaaggtttagggtttgttatagtttagggtatacggtttactatttaagggtgtacggtttagggtttgagggttaggggttagggattagggttaagtgtttagggtttagatttagggtttacggtttatggttttgggttttgggtttagggtttagcgttaagggtttagggtttgtggtttaggatttatggttttgagtttagggtttagggtcttctgttatgactttagggtttcattatggtttactgtttaggggttaaagctttacagtttagggtatatggtttagggtttagagcttatggttaatgttttatagctttaaggtttacggttgagtgtttatagtttagggttcagggttttgggtttagattt

SEQ ID NO: 264476 - DNA, 1461 bp, Cannabis indica
atatacatatatacatatatagcagcaacaataataagaaaagtagctcaacctataaatataaaaacaaattagaaagatcagcttttccaacaagagagattacaatgattttcctttttaacaaagaaagaacgtcactaaagctggggaaccacttactgcgtagagtcctttaaaaccctccttagaaacaataaggcgaacagcattaggggctgaagcaaattgcccagtttgcatcctttgcttaacaacctaggttataacgaaagtagaattggtcaggtaaaaaaatttgtattttcttaaacatgaaaaaccaaacaagatacctctgttggaacacgaatgagggaagcagctagtccccctatagcacctgcagtctgcattagattgcccaccaaataagatatcactcaaaaacagtaacccaacaatcatgccaaaaaaaaaagtaagcctttactgaagatagcttatacccggtcacttttcggagagtagaatatgataggatagaattggacaattattctctcatgtttttgttattgaattaaattacatattagaacattaatccacctagcgtagagtactttaatctcattgaggaactcaagatagtttaatcctacacaatcttcctcttcatatacatcatcactatctgtaaaaaaaaaaaagttgtaactttgtatccattttcttttctcatccttattgattgcaaatgatcaattcactaatctaaagctatttctcgttatttttcataatgcaatctaaatttatcctatcccacatatcaaactaggcccaagagcatatattatacataatattatctagagagctagatatgctactacatatacatttgtgaatatgtacttcagttaattttttctggaggaacgtactccaatactctatgggtcaatataaatcattatagtgaggtatacaacattttattaaactcaccaatgaccaaagtattagcataactctcttaccaggtgagctacagcagaaagattttcaggaaccatccgcaatagtttctgcttcgtaggttcataaacacctacaaagattgcagaagccctgtatatacggaaattatatcttcttataagtgcaacaaatatatttgcaaaatagaaaagaaaagccaaaagagtaaagtaattattatcaaacaaatgagacataacagacaaaacacatatcaaattcttaaacaagtatgtccacatgcgtgaattcagttcaaagtacttacggtaagacaccagcaagattaccagccaatccagaataaagacccttccaaactattttacctccaccacgaacagcctgtaataaaattgatgacaattagagtcatcatcaaaaaatagcaaacacaaattataaaaaattgaaagaaaacaaaaagaaaaagaa

SEQ ID NO: 264477 - DNA, 478 bp, Cannabis indica
gggcccaaatttttttttcctcttttaaaattatacatttttttaccgattttgaaaaatactacattttttctaacataagggcccaattttttttttccctatggcccactttgtttcaggaccggccctgctgccaatgaatgacttactccagcgattcgctcctaacaatttcttcggtgacttgctccaatgcatatcagaattaacaatttgtgtgtcggttaattctttactcttgctgtagctttctctttcgaatatatgctaatttcaatctcacattttctcacactaatctttttctagtgcaagtattaaacttagggctcgtttggaatgccgtattaggttgtattgtatggtattgtattatattgaattgtattttatgcaatatttttatgtaaaactatatgtgatattaacttttatgaacacctaaatatataatattttagtataaattaaagtt

SEQ ID NO: 264478 - DNA, 924 bp, Cannabis indica
gtacagtgataaatgacgatcctgaaatgttagtctcggagagagaagtctggaagatttaagtagatggagaatcaaatggaaaaggttctggagttgggatcattttaatacctccacggaacctctagatccaaggtgcactttgatttgagtttagagcttccaacaatgaagctgagcacgaggctatgatcgcttgtttacaactggcaaaagaggttggcactcaaaacatcgaactctacagtgatttacagcttgtagttaacaagtgtccagagagtaccgggcaaaatgagagaaaatggctagttatgtagcaaaaagtcagaagttgttgcaacattttaagcataattctataaaacaaatccctagggataaaaatacttttgcagatatgttggcaaaattagtaacaaatccataaatagagaaatacagactagtccccattgaacatctgataactccaagcacagaaataggtaaactccctaaagatagagctgcttcgaggaagatccagtatcaagcccccagatatgtgatcatggatggaaaactatacaggagaggattatcaatgtagtatctaaagtgcatagctggaacaaagataagtgcaatcatgcatgaaatacatgaaggtttttacggagatcacacatccagacccagtctttaagaaaatcatttgtcaaggctatttctggcctactaggaagaaggattgtactaagtatgtccataaatgtgagcaatgccagcgctattcaagagttccaagggccccaccaacaaagataaccctcatgaatagtcattggccttttgtaatctagggaataaaattcgtgggatcactttcaaccaaaaagggaggagtcaagtttgtcattgtcgctattgactacttta

SEQ ID NO: 264479 - DNA, 649 bp, Cannabis indica
ttctactcctgcaaacgccattgtgatttccatgggtgatacagaatctcaggatgtggaagagttgcaggggccaccagctggggtggacttctgcaaggttaggtgaaagcggaagccgtttttcttgaaggactacacagctaggaagaagaaacaacgacatgggcccatggtagtagacacagtgaaaccggcggactcccggctgttaaaatttttccagaagtggatcacttacgctagggacaacggccgtcctagggatgttcacactggcgtagccactcgatcctggttcgtcaaactgatggtgctaggagaatggctcgacgatgctgtgagttatttcttaacagaattaatttattgtgttttaaaatgtttatgcgacttatatgcgacttatatgcgatttgtatgcgatgtttacctaactacattatgttaaatctttatatgcgatttttatgcgatgtttgtgcgatttacgtgcgataattcactaatttatgtattattttgcgacttatgtgcgattagtatgcgatttttgtgcgattaatgaaacaattttggtaatttcttgtgtgatttcctgcgatatttgtgcaacatttatgcgatacatgtctcactgttttctttt

SEQ ID NO: 264480 - DNA, 666 bp, Cannabis indica
gtcgaactatttggttgaaatatgcacttgactgtcttgcagtacaatgtctacggacagcccaagagttaagaccaaataatggcagaattgatgaagtcatgaagaatggctatttacagaaatttggaaaaaaagaaaaagaaagttttgatatacatatatatttatatatatcttagttgcactaaatatgttatttaaaaaaaaaataggagataaatcatcataaataattatttataagaagaaatattataaaaacttaaaaactcatatatatatatataaattttacttctatataatcaaaaccaattttaaaaaaattagtttcttgatgaagatattagttttttaacaaaaaaatcagttaaaaatagttttattaaggcaataaattaagaaaatagcttatgcactttcatataagatttgtttattataaaaccaattttttagtttaagaaattggtttcaagattcccaactgcaacaaaattcgttcgttcctttgaggttttggtgatggaaatctcatatctaagtcagtttgagccgtcggttgccgaatgtgtgggttgctgattgtcggatgtgtcgttggtgaacggaggtcgataggtggactattgaaggatgaggcatgtagggtacttgaatgga

SEQ ID NO: 264481 - DNA, 726 bp, Cannabis indica
atattcacaaatcttgctctatcaacagtggagcgacccctaggtgggttggatgatgaagctccccctctctcacttactctagctctcttaggacccatctctaaaaatttctaacactaaaaaatttatgaaaattttggaagcacttccccttaaaaattcacatcccgagtaacaaccaaatcacaaatagaatagttcttaatcacaaacaatttttccaattaatgtaatgagcaaaatcccacaaatcacaataaaatttcaagattctccaacaatccaaaatgattcaataataattgcataaagagtctaagaaattgttacctcaatgaaatccccctttagtctacctccattgaaggaaaccttgaagtttttgaggtagaatatgatgaatagtgattttttgaaatttgggtgaggttttagggattcgggtttgattttgaaaggaaaagagtgtttgaggagaggaaaagtagtttagaatgatttgtgatgaaagattggggaaagatttgaagaagaatggtgtaggatgagattagatgaagaaaaattgtttttgaggagattttttggaggtgaggttgttagggtttagaagaggatatatttttgaaagtaagtgattttcccccttttattcacgtcagcctgttctcgccgcggcgagataggtgtgaaaaaataacctctctgcccaggttttatgcc

SEQ ID NO: 264482 - DNA, 1034 bp, Cannabis indica
taaaatagactcattgtcgttggctaaaagcgaggtcaacaattggcatacacaagataaagttaacataaagctcaattcataaatgcaattcataatgaaaatttcttaaagataaaatttaattactaatctcaaaaatgtcataatgaattgtctgcaataatatgaaataggaaataaaattccaaactaataattgaaactaaatttttcataaactaaaacaattaattcaaaaattaaagaagagttgagcttcatcttcacttggacaacctctacccttctgtccaaccattcgactcagctcgctaggatagaaatcaaagtttaagcaacttgtgctgaaattaacaaaaaaataaactttgttattagatccagaattaataaccaaagaagttaataattctctaaaacacacgagtttagagcatagatagaaataccttgtttctttgccaaaaacataggacattgggtattccagtggcccttttcgttgcaatagaagcactttcctttttttttttgcatcgggattagtagcctttttcttattatttgtgttaacagctttaagaggcttcttgctattctttcacttcttctttttgggttttgaaatagaggccgttttggcctcagttttagccataccattagcagtgtccaatcaaattctcaaatgtctaaaggttgttgattaactcgtggaagtcaaaagtcaacttgttcatgacataatttgtggtgaagggctgaaaaactggagacaaactattcaagatcaaactcacttgagtttcttgatctataatagctccatgatttttagcttcctaacttgccatctagagtaggtgatcacgcatgttctgatgaggtttcatacatgcattaataaaaatcttggttgcctcaaactaagcttgatatgatgccaccccgaacagtttagttaactggttcatgatatctacagtcgcgagagtattggcaaatcttgttttcaaggtgtcaacaatgct

SEQ ID NO: 264483 - DNA, 638 bp, Cannabis indica
cccaacaggaatagtccacgtgtacacagtgtacacgtgtacattttatgtcacgtaataatattaaaaataaaataatacatttaaaaaaattattttactctaaaaattaaaaataatttttaaaaaacctaattatttttcttttccttttttttctcctctagttggcatcagacaaaagcaatctcttcctacaatatcaatgtaaaagataagatcacatttcaaaaaatttataataacccatgtcattattcactaaaatactttctgggtgattaccatatatcatcatcactatgttacaaatactacagtaggtaaagagaaaacatatatatgggtttcaaaattccacaataaataggcaaaggttaagcacgcatgtgaatgaggaacagtgaattacagacctatttcgatgaagcaagtgggttctcgaaacccacaaagctttacaaaggggttaggcaacgacattgggggaaatgggtcgttgagatccgtctccctaagaatcggactaagctttggcttggcaccttcgatacaggcaccttcaaaggtgatttcgctaggcttaatttcccacacctctgccaccaaggctctgccaagttcggtgatttcaagcc

SEQ ID NO: 264484 - DNA, 875 bp, Cannabis indica
aaaggggtattttttgggaaattctaaattcccggccattcccgacattcccaaagtctaataaactgtcccaaactactaacatactaagttgtgatttgactgagccaaacaccgagttccatgttaccgggcaccggaaatacaaaattatgagagctactacatgacataaaaatgcacctctgaattcaacaataacagtataaataattatttaaatagctataaataatttcataattacacatgatcaactgctaatttccaaattaaactaagcggtctttacatatcgccttagaggcgtgtgagagagggaggacgagagagccccttaggcgtgtacaagagagagagagagagaagagagattatggtttcaaacttagagtgatttggaggctagaatcagacttaggttttctaggttagagttaacacatttatataggaaagcctaaaccctaatttataactgaaatcttagatatttacatattaaattgattaaatacaaaagattaaattgccccttgaaagtagatattttccatcaagtttgttaggctattaagggcccaattcgcatgtaggttgcagtccacgtaacaggctgtacaaaaaatcctgccaggttagtctttcctggccatacactgcaggatatggtcttgccgaccatgcaagctctgtagattgagatttggccgcccatgctcctgccaggacctcgcaagtcatgtgcctgtcaggatcctacatgtcatgttcctatcagcttcaccaagaggatgcaaacctttggatgtagaggctagcctttgacaagtggatgacagctttgtacaccgttctcttgtagaggttaggtt

SEQ ID NO: 264485 - DNA, 1084 bp, Cannabis indica
tacttatagaagctatagatttcgtatctatgattagcgctccactaaatgaactcatgttcccaagatgtaagtatatgcatgaaccattggttagctttcacaaacaacttgaagaacataaacaatacagttgagctgaacttaaccatatcaggattgagatccataaacctaagatcaaccactaatattgctttagaaagataaagcagtaagtttatgatatcttatccaagaacaatatcggtccaatccaatgtatactccataaattttatactggtaaactttgcttggaaaggacataacacttatccaaggtgtaagtatacattatcgctgattatcatgtcagtctaaatccagtgaactaaaaaatcatgggacttaaacttttgaatataaaattatgattatattctactgtgttgatgacactataatcatgaacaaatatatatatattatctgtactgaatagaatttatacattaagtatactcatgaaataaatcatgtgaaccatgaatcataaaataatttctgatcttttattaattagtaaatttgattatattgaaatggattttatttaggacacaaacatcctaccccatgccttgttgggaactttaagcaaaggttgtagatggatgttacaacaaactatgccatcaatgttctagttattggattctctccagccattagcggcaattggatgtaccccatgggcgtaatgctttggccaaagaagtcgtacattacttgtgagtagggtaccaaatcggttatttggtgcctcatctcatcatatgtaaatccaaaaagaatgttagaggaggctccattgtccaccatgcaccgtgcaactatcatattcctgatttgtgcaacaatgaccaaggggtcattgtgctggaagttgacttaagcagcatcttcttttgtgaaagagatagtggcatagggtctgccaataatgaaccctaagttacccctaaagggtcattgtgttggtctcgcctgcaatgtggggtctgccaataatgaccccttagttactgttggaattatttta

SEQ ID NO: 264486 - DNA, 1084 bp, Cannabis indica
ttctctaaaatctgacatttgagatcttatagctttaacactttctacacgactctcccaacgagtggatgacaatgatttcggagtcaatcctttcacattatctttcaaaatttgccatctcttagtagaattggcaaaaattgtataaatgcgttgaataactccaaaaaaaatctctagctttactacacgattcagccatgtcacacaaaatcaaattaagactatgacaaccacaaggagtataaaaggctcttggatttatgtctaaaaatttcttttgtacaccttgatgttttcctttcatatttgacccattatcataaccttgccctcgcacatcaaatatgtcaagatcaagttttttcagctcattttgtagcacatcaaaaagtccttgaccagttgtatcattcacatttaaaaatcctaaaaaagattcttcaatgctaacagaatgtggagaaacatccacatatctcaatatcaaggacatttgctcttgatggctaacatcaggagtacaatcaagtatcacagaaaaatattttgcttgtttaacttttttaatgatttcagttttaattgcagaagcaagcaaaagtattaactcgttttggatgttatgtccaagataatgaatgtgaatatcatttgtaatgcgtttaacatgttcttggataacaggatcaaactctgccaacatttcaattaagccaagaaaattgccattactattttgatataatttctcattagatccacgaaaggccaaattatgtttagcaagaaatttaactattaaaataattctttgtaaaacttttttccagtgatctttttctttttcaattagtctttgagtcgatttatcaatgatttgattcttttggagtcttagacgcaattcgtaccaagttgtcatatttttaacatgttccatgcttatctcatgctctctaagtctttcaccaatatgcacccagtcactaaagccttcatttattaattgtcctctagcagtccctgttttaaaaactttgcaacaaaaataaaatactctatctaactcttttgaata

SEQ ID NO: 264487 - DNA, 804 bp, Cannabis indica
tggagagaggtaagaatgcaagcttatgagctatcgggctgtggaacagttggaaagagtaaaacttttataacaatgtttcatttgtgaataaattttgtgattatgcatagagttatgaaatgagcatctgaattaattgttagagttagtaggattgaaattttagtttgtgcaaggaagaaagcagagcatgaggcagcagtataacgattatctgatagcgtagttagttttttattttctttatcttactcgggggcgagtaagaatctagtttggggaaattttgttaggttatatttagcctatgttttgggtctactaagtaagcatttttctcggttattggtgtctttttgagtggttttacgcttgattttctttgtttcaggttcccgaggtatcaaagttcaatttcagttaatggatgaaaagacgggacaaactggtgaaaaattggaaaaatctgctcattgggtgttagtagtcgcgactagccagaagccaggtcgcgacccttttctttggtcgcgaccatggtcacgacttgggagatttggcagaaactcggttttttgagttttgcctgtagtcgcgaccagcctttaagttggtcgcgaccaggtacggaaaaatgcagttttgacctaattcagattttttctcaattggaggcacacctttcatccctatataaggaatacgactcagaaggtcaaagtaagcacgaacagacctggaaagtggatgaaagaggagagaaagcgatcttgaagacccggagcgatatcaccttctagt

SEQ ID NO: 264488 - DNA, 587 bp, Cannabis indica
ctaatcaatacgagaaggaaggcgagggccccgacgcgcttcaagcatggcatcaagcttcttcttcttctcccagaatttggcaagagcctcctcaggcttgggatagaagtcaagtttgatgctctggccgttcgacttccagaccatgtagacgccatcgtcaaagcgtttggcgcagtgcttgcaggagacaggggttaggagttcttctcttttggcctttttcaatgcttgatccttgaagtccctcaactccttcacctccacggtcaggttggccgtagactgcaggtctgcctggtgcaattcctctaaggactttaccttggcagccatctcgtccatggcttccctgacctcccgaagctcacgcctagccttggcgacggcctgaccctctgccttcagtgcctccccgtgcctcgcctccaactcagcctccctccgtttggcttcctcttggagcttcgcctccgcttggggttccctctgtttagcttcctccttgagcttcgcatccgcgagggcctcccgtctatcagcctcctcctggatcgcccgcctttcaacagacaggtcccgca

SEQ ID NO: 264489 - DNA, 1029 bp, Cannabis indica
aaaaataatttgttaggaggagacaaaaaattaaatatatttccaataattaatattaacaaaaagtaaattcacaacctaaatacttcttttatttattttattgctaataagtattaatttgtaacgccctaatctataaggacgccacgtgtaattgtataaactatattaagactaatatattaattgattttttttaaaagttgtgagaatattaaagacttgactaaaataaaagactagaaacagacattataaggacagtaaaaatgtgttccggagatccctgttgtaaaattttttacccaaaagactacaaacaatagcaattcaaaacacaattcaaaatacaacagatacaaccaacccaaaacaatttttggcaactccgcacacaggctggtggggtcaatatgtacattcttggagaaggtagtcacctcatggcaactctaactttttcttgcccttatctgctccacatagcattcgtgagtcacaaggactcaacaagaatgcaataataattgtaatggaatacctagggtttcctaccaaatcttgaggtaaaagttcactaaaatgaaacttatattttggctctaaaaaatacaccatatcatagagctcgtcacaaggtttgaaacggtatatcaaacgtccaaaacggacacccgagtaaaaagttatggccaaaatacaaaattcgactttcaaaaactgaccagacgaaattctggttagtacatctggaattccggttctcaacagccaagaacacaattttcctcatatttaaaccctccaaactagcttcaaacctaaccaatcattccaaacttcacaggacatatatataatatatatataaaataatccttacttaactgaaattaaaatcgagcccttaaacggaaaatgtcattaaagctcagacctaatagctttaaaaaattacaaactcaatttttaactcaaatccacctcaaattcaacaagtaaatatcggaactagtcccatgacta

SEQ ID NO: 264490 - DNA, 506 bp, Cannabis indica
tattttaattagaaaatcaataattaatttatgaactaaactattttgtattattttttccaaatgtatttaattaaatagaaaattaatatttaagttgatttgattcaagacacttaaatattagatatttttcaaaaaaatttaattaaataggaaaattatacttatgttgaaaattaatttattaattaatttttagaataattttttcaacatttaatttatgtcattatatatatattcgaaaatatactttcattaaatacgttaaatttcaaatttacttatatttatatttacagaaaattaaatttgagttaaaaattaaattttaattaattttggtaccaacttacattatgtaattttcataatatttattgaaaattaatactaagggtggaaaataaattttatttattattagatctacctaaggtaaaattttataaaaagtaaattaaaatttagtatttatatttatctacattagtaattttaat

SEQ ID NO: 264491 - DNA, 911 bp, Cannabis indica
tgtttaaacaacatacttgtgagtagatctaagatcctgttaaaataaattccaacatagtattatctctcagtatcagtataccaaaaaggagagtaggtcattacctgctaactaagggggctgaacctctataaaatcctgtgttcttttagtttttggtttatattatgtaacacatggcaaacatcagtattaatacgattttgttgtcagttggctaaatgtgaggtcaacataagtgatatgcttctaaatccttaaaaaagaagttaagaaagaaaaaacgttaagaaatgtgagaactatgaaaattttatgtgataaaaggaaatttaagtaataaatagtacaaaacgtcatttatcaacaaattttaaaatatgaatatttacctatatattaggctcgcctctaagtgtaggtgagataggtttgcgtctagagtccacctaatccatgggcaaaagaaattttccttttaaaattatacattattttttaataattttgaaaaatactatatttttttttctgacacactaaattttattttcgatcatttaccataatttttcatagattctctttgggccagtttggcacagttgtgctgtgggaaaagcaactgtagctgtgctgtgagaaaaagcagttgtagctatgctgtgagaaaaagctcctaagtgtttggtaaatataattttaaaacagctgtgagttgaaaaagttgtatataagtgtttggtaagctgaataattaaatagctgttaaatatatgattactaaaataagtatgacatttgttatctaatttatttaaataattttatacatattaatatatttataaatattatttattatattataaattacgataatttttttataatatttaattctttta

SEQ ID NO: 264492 - DNA, 919 bp, Cannabis indica
gtaaaagtttcagtgttttatgcttttatgtgtattttgaagctgttagtaagaaattaacaacttttgtttataaaatggcaagaaaagagcaagctagtcaagttattaattttgctaaaattctatgaactttttgctgcagcaaatgtagcagtagctgattgttaaagtacatgaacaaaagatgacgtggcaattttggggatgacgtggcgttctacgagtggtggctggagcaaatatttggagatattagatccatgccatgtgtagggtttagttttggtaaagggtacaaaatttaaagaccttctgtacaagatagcctccaacagaaagaataggagaagaacaatttctgccatagaaactctattcgtatagagcaagaaatagagaaaacagaagaaaatggaagagaaaaaaatgatgacaagaagatttcatcatctacctttggaaaacttctcctccattgttgtttgttatttctttcttttttcttttctcatatctaactctaccagtcaaactccatagttgaattttaaattgtaatggttttttataagttagctatgagctaaactttttatggtttgaattgttaaagaacccttttgttttagtttagtaatttccgcatgcaaatatttaagtaaaaattctcatgttcattcaagtgtgctttatgttaatttcttattgtatatttgccagcaatagcttgatgttaagttatatttaattgtggaatggttacatgtaaatgacttaacttggatgacacaagttcttaatcttgttagattagattagaaaaaacataggaatatgttatgtccttgtgtaacatttgagaactgtgcttgaaaattgtattcttgagcttgattggcataggaatatgttgatt

SEQ ID NO: 264493 - DNA, 1258 bp, Cannabis indica
attcatatataaaagtaaaattgaaatcttaaataatgattcaaatatgtttagagcaattaataacacgaataataaattttaaataattacattaaaatatacattaatattaaaatttaaatatttactaacaaatacttattttaacccagatcatattttagtctatacaatagataaaattaaattttatttaaaattaaatgtccaaatgttcattttttttatattattatatatcctacctttagactaatttatttgtgcttttgtgtcaaaaagtacaaaattacctgtctcattcctatattttattttaattttgtttttattgatggcatgaagcccatatattcattatctttgttttgagtgtgatttaaatattaatgtttatctcttttataattgtggataatacttgggtggaggctaataaacgtaaatacatattaatttaacttccaatatatagaataaatttaatttaagaaatagtggtaaaaatacatatagtcatacttttttatattttattagaccatgtattaaataagttaaaaacaatatattatttctgagcggttgcttaacagatttaatattgtaaatctgtgtgtgtcgtgcaaacccaacctatattataccatgcttttttaaaatatgaatcgtagcgtgccgtgctgatattttttaaaggataggcccaatgtacaactcgtaggcttgatatttttttatgtcgtttttgactcgtgttagtccattttttttaaacaggccaattcattttttatattaaggctcgtaatttatttttaaaattaataacacaattaggaaactatatttatttttcatattcaattacatttatataccttttgaataatatattactgataatattaaaaattattagaattttataatttaaaaatttagttaaatatttaaatttttatgatatactttacaaataatttaatatatagttttaattttatatttttttaataattaaatctaattataaaattatgatattctaagttatatttaaaatttattattatttttgtcaggactagagccctaattatgtaatatctataatataggtggtcaaatatcacactttaacccttccagaaaaataagacttacaaatgatcccttaatatatattttaaaattacataaattaaaataatggagtaactcttgtaataaataaaaaataattgtaataaaa

SEQ ID NO: 264494 - DNA, 615 bp, Cannabis indica
gaagggtgtctcacccactaccggaggtgcttgctctcaaagcaccctcattacgcactacctccttgaattaaatagagagttcttcagcctcacttaggctttttaggaattgtttcctccaattcaccagccattactcgtccaccttcactaccttcagagcctcttcaatagtaataactgcaatgacctccttaacctcgtctgagtccctcgtagagcatcctagactgtgtccttcacggaaagatgcgccatatcctggtgtgcgataataagacctacatcctagaggttctttatggtcacaagcttctctacttgtaacccattggatgagatggacttacagaaagttatcctctcttccagctctagagtcagaggcggatgggaaaggcagtctagtagatgtgaaaaacaagatataaatatacatcaagcatgaggaaaagcaaaatcccaaagtctaaagaagggaatgaaacttacttgtagtattgaaatccaaacttattgtaggaaccctctttaggggaagccagaggtgtaaaagttgtagcccaccttctctttgtggcccctcatgggctgagatttgatcttgtagaa

SEQ ID NO: 264495 - DNA, 709 bp, Cannabis indica
tattattttgtaccttatatataatttgttaaatgataaattggattatgtatcttgaactcaattttcttccaaaaaaaattaacgtagccaacgtgaatccatttctagcacgaacagatgtaaaaaaaaaatattatatctctggtcacctccaggtcaagttattaataaattttattttgataaatattgagctcaaggtattaattatttcgtactattttaaaaaatacaagatttgatttattattatttaacaaaaatagagagtttgattagtaacttttgtaaacaaatggtccacgtttggaaaatggtcaccatgtaagtgtaattccaaaatagttataaggtttgtcgtgtttgttcaactataagtaattacacagtaattatataattggagataattgaagtgtctcagttatatttttcaattcttatgttgagttaaatatattatttaattataaaatattaccaattttagatgattaatgttattaaactatgcacttactaacttatttgtcaaacataaaaataaaaattcacataaaattactacttgacatttaaactcacactatattttaaaataaagtataattactttaatatataattagaaagttacttttaaactcacccaaaaaaaatataaaaaagtggcaagtgaaggctcactcttccttatcacaactaa

SEQ ID NO: 264496 - DNA, 1130 bp, Cannabis indica
agtggcaacaagtatatcatcaatataaatgagcaaggcaataaaaacacctgatttgtgtctcagaaataaagagtgatcagattttgagtggtgaaagcctttctgaatgaggtggcttatgagtttagcgtaccactgtcttgatgcctgttttaaaccatacaaactcttttgtaatttacaaactgcattttttggaatcactcctttaggagtgtatccttgaggtagtttcatgtaaacatactcatttaaatcatcatggaggaatgcattattgatatccatgtgatgtagatgccaattattgatgcagcaagggaaaaaaggatttttagggtattgaattttgcaacaagggcataggtatcgaaatagtctatacctggttgttgtgtataccctttggcaacaaggcatgccttgcacctttcaaaactgccatctgggttatattttattttataaacccatttgttgtcaattgtatgttgaccatcaggtaaagtgacagtgatccatgtgtggttgtcttcaagagcctttatttcaattcccattacattgttccaaagtttgtatttgcaagcttgggagtatgacttgggttcaaccagctgatgtgcaccaagtattgctactctaaatgaatttgaaaatctagtgtatgccagggtattggcaagaggatgtgaagtagaggcagggacttgaatcatgtcacacaagtattgctgtaaatgcttggtcttgtgtgtaaacctgccagatttagtgcgatggtcatgaacattttctgcattattgctgatgttgatttgatgtgtatcaacattttcagcattattgctggtgttgagccgaggtttatcaacattttctgtattattgctggagttgattcgattttgatcaacatattttgtattattgctggtatcagcagtgttgtttgttgttgattcagaaatatgttgaggggttataggtgatgaaaaaaaactattgaaattgtctgtgggggattcatcagtcatagggtttagggtaatgtaatgagaattgaaaaatgtaatgaaaaatatgttggtcgcccacatctttgcaatgaaaaatttgaattagtg

SEQ ID NO: 264497 - DNA, 607 bp, Cannabis indica
agcttaccaaaaaggtggcaaaatacttcaacaccaaggttaaagatagaaaattcaccattggcaaactagtcctgcgaagggtcttccagccacccaagaaccaggagtgggggtacttgggccaaattgggaagggccatacaaaatcaaggatgaataggctccaacacctacaagctaaaaagaatggacggatccacagtacctagggcctagaatgtcgaccacctccacagatactatcaatagttaaagaaaaaagtttatattctgttaaataacctatgcaggacaaatatgtgtgatatcctatgcaagtttcaagctaagtgacttaaaaatttctttcatatcacttaggtggtattaggcataatatatgggaaaaaacatgacgaatataagaaaataaaaggaaaaacaaactcaaaagtcatacaagttgtttaaaagataaatagtagaaagcctggggtcgagccataaaaagtttccccttaaagaaagcataattgtcttataagtaggggaaatgaaccaacttgaagccaaatatgaagaatggtccaagagaattggtgcaggaggaccagaacccatccgg

SEQ ID NO: 264498 - DNA, 853 bp, Cannabis indica
ttaaaaaaaaaatacaaataggactcaaatagtgcatatattggatttctcaagctacatttatatcaaaaactatgcagggataccacaggagaactgtacactaaaactttattattaaaaaagaaaatataaaaaaatatattaaattgagagttgtaacttccgactcactaatagaatgcctacaaaataaaaaaaaatatatagaacaaatatttaataaaaatataaaattttatataaatattatcacaaaaatatattctgatgtaaaaattagaattactattaaagcaaattgaccttacaaaattaaaactagtcaggttttataaaaccaaaactaattatattggccttataaaataaaaaacgacaaaaaaaaaaaactaagcacactggttatataaaataaatttggaaaattctacaatacacccccttaaaatggatatattgatgcacccctatctgttttagcatccgaaataattttttagtcaaattttttctcatggtcatgtacgttatagttatttaagacatcctgcaaaattttaagaaatttagaaaagtttaacacaccgaaaattatgttcaaacagtgtgttgcacgcgtgactattttattttatacgcgtgtaaaatagactgtttgaacattgttttctatattgtaaattatttcgaattttttaaaattttgtaggatatcttaaatagctataacgtacatgaatatgaaaaaaaattagactaaaaaatttttttggatgccgaaacaagttaagggtgcatcaatacatcccttttaagggggtacattatagaatcaccaaataaaactaac

SEQ ID NO: 264499 - DNA, 5442 bp, Cannabis indica
gaagcattgttcaaaaaaaaaaataatagaagacaacatatgatataaatatacatagatatatataaatatatatatatataagagtttaattagtcctatctcctccttacgaattcactcaaccagttgagttactctctagtctttttctaaaatttaattataattatttttatatcataaatcactcatctacttcgatgggcagccattgaacataatggacatcaatttgaagatttacctttcagattaaaaagattgtattgggactgttcagtccgagccgactgagaaataattttaggtgaatttcatatcaagccagaatccatgtcagaataataaaaatatctaaatgtgtaaattccaaattaatcaacaaacagtaattgcataataccaatcatatttacaatgcctctggaatgaaaataatgacaagctggtaggtatagcaattgtgttaaagtcttgcaaaattgaaggcagttgggcttcatgtacaaaatattgataatgatagcaacttctttcccatgattgccaatcaatgtttggtttgtcaatagtatatagcacataaactaccaaggtgcaataggaaagaaaagaagattggcccaaactcaccagttagcttcaatccgtcttaactaccaagttcagttgtgatttttaaaaatctttgaaaagtaaagggtacctgagtatcaaatgttgaaaacagtagagcaaaccaccttatgagctgctaatgggggaaagaacactagattccttcacattcccatttcccacctctgtattctgaaactgagttgattggattgcctacatgaccccctttcttatgattaactgtcaagagcccaggtctttgtaaacaaaaaaccaacatacattattgcttgcttttaccactgaagctagacaataactcaacaattcttgacacttttgccaaaccattttgtgagcctccgatcaaactgttttccctgatgcccttgtcaatctcagtaccacctgatggatctcgaatcaactcattctgtttaactcgagactcatgcttggcagcaaatgcaagtgtagataagagtgccttctgagctgaatgtgcagtgtctttatggaacctggatgatgaaggatctggcgactgagcaagagaaactgaagaagatggcaaagttttcgaggttgtgcatgaatgcttctgttcatccaatggatattgtctcccgttaacgctactatcagagccatcatcgcagctgaatggcaactttaacttatccaaagaatcattaactgaggattttctgaaagagaagaagtttattccctttggagtcactgcaggttgaattccttccaacatcaaatttgattttggagctgagttagtttgattaagcataacagaattgtcagaagacagtttcacactgctatccccacttgatggcgtgctcactaatgttctactgctgaaatcatcctgttgacttcttccaaatgaaagaaaatttactccctttggtgctactatgggtgcacttttgtttaaaatctcattggaattctgcactatgcctgatccatgttgttcaagatgattcccaaccccggcaccagcaattctatttggagataaaatttgttgtttgagcttaacagaatctaccaaaggcaaactcccaacagagagaaagttaattcctttaggtaccgatttttcttgtttcaaaaatgtctcatttttgttctttccagtattcttgtgagaactaatgcccgtagagaaggatgaaacactgaaaggctgctgacaggcactcttttctttcagttgctccttaaattttgaattattcattaaggtcgcaactttcttctcaggttccatagcatttgatgaagttgtggcatcctccttaggtacaatctgggtataaatttataggcagtaggttaagcaattggatataaaaagagctaaatcaatcattttacacaggcaaaagaatgtaccttgtgtgagaacatgcaattgtcacctctgctgcaatagcctgcagacgcaaagttgctacaaggatactttgagagttgatgatcaaacggacagtcatcccctttcatgcaagaattacgtgcaaaatgacagcaaggctgtaacagagagaggaatgttaaaagaactgtgatatttgcattgacctacgaagtatgggagaaatttcttaaggtgtcaaactgtaatatcaatagttctacaaattatgtgaagctaaatagaaaaatatttgccaatggaaacaatttgttatcaaagtgtacttatcatattataagatacattgttacttaaatagtgtgagaaagcacaataacaagaagttttaattaatgacaataccttggattttgtcaaaggtactgtgtcatgcgaaaatttgcacttgtcaccctgtgaaacacaaagaaactaaggttacaatacagagaattctaaaagcaaaagcaaaaggaatcgattaactgattacttctttcatgttatttaataagttctttcataattatgattaggctcacgcatgcaactgacaacaagcaattttctagcaagtttcccaacatgcacatcaataatcctctgtcctagggtaagcacaaagtgaaactatgaatcaatggaaacatcatagttcgaataatgttcaatgttcaatataagagtggaagatcataatcccaaggggtggtctagtggtacagaggagtgttagaaagtgctggatggcatttgttcaaaggtttgaatccccacagactcaaataactcttgaggccattgggaggtcttccggtcgaactgccagggccaaaaaataaagagttgaagaccatacctcataacatcttcccaccataaagtgacggcaataagaaacagtcttcggtttcaatattggaggcagtttcagccttttaacaccaagctttctgttattttctgctcgtttcttttgcttctgcaactgtagagttgtatgattgatcaactatacaactaacaaaaaagtatacaaaaaaacaaagagcttataccaactagaatataaaaaaataacaaactattttcagataagtgcagaggataaccacataaagtccagtaaatttttcttggaagattacagattttaccaaatcaaaaaaggtatgccaacaaaactttgatgcacatgcacatatataaagcaactacataaaatagaacaggtataaacaatacttttttcttagctctcctttcctttgtaggaagcctccgctttttcttaccactgtcttcagtggcaggctgcaaatgatcaacagtaaaacacacggttatcaacggtccaaatataggtataaaataatttttgaccagcacaacaaaaaaatgattcttagtatctagttagaacaattaaaaagtgctgaacaagtacttaatgtgtctaaggttgcaaatcaacgggaagtgcaagctatatacataaaatgtatatacactgtaaatatataaatacatatatggatatgtatataggaaacagaaataaaactttatttctttacagtttaagcaggttatcaaaaaattagaccctaaacattactgcaccgaaacaatatactcaacactgtgatgaaaacaaaaagtgaatattaaagaccagaaacctcacacggtttgaaacaaagattcctcaaacactaaatgttagcactcacaaatgacacaaagtctattgaaagaacactctaaaatgacaaaaagactacaactattatgatggcatcttcctgctatcttattgataaaaaatctatcaacacttagaaagaagacaaagtctattaatagaacaccctgaaataaataaatatcaatacaactctattcatagtaacttcctgatatattatgtgtattggagcagttgcacaaggaacaaaacagtctatacataataatttaaaagacagtaaaacacatttgatgtttattcagaaaagaaagaaaaacacctttgatgtaaataccttgtcatgatctgttgcatcctcttcaattattccatgcaatacaagcttattacttccaacgatattgtttttttcaataattgtagtctccagtaaagcatcatttgcatcgaccttactagccctctgcaatatttcgttcacagaaacatcaggtttactaacagctttagttttatcactttccttgaaccccattccattattattgtcaaggagaaagaaagtggactcagaatctctttcagtggctactttacaggataactcttctttatcaggtatagactcctcgtttactttgtcaccctccaataacactgcatcctgcagcaacatatccattgaaatatcatccacggagaacccaccagaaatttctccctcttccatatctacatctcccataataccacaagaaactgactcgtccaatttcatatccttaagtgacatttcttgcacctcctttaatgcatcaggttcccctgttgtcttgtcatcgtttccattattaacgcctgaagtgtttgccaatgtagttttgttaaaggaggaggcttcagaaaaattctcaccgtggaactctgtcctctcagtcttccctgcttcaataatggaaacagatgagttattcaaatccatggcagcagcataattaagttccctatcattttgttgtcttactgtaccagcatccaagactgttgtattcaacaaagatggtatatcctcactattctctcttcgaacaacactttcgccaataacaacattattcaaagataaagccttttgactcacatttacagacatttcgctatcaatttgcttactgtccacatgttctttttggttattaaataccaccacttcatcaatgccactttggttttgaaccaaagaaactactgggggctttgaattgttatcaaggacagtgtcttcacttccttttacaatacactctaactcatctattaacactagttccgggccaaactccggctcttggaaatcactagcatccttttgatttggcaaatcctcattttcatctattctcatcagcttatcaatctcatcaattgacaattgttggctatgcctactatccagagagcatttatcatcaacatttaaattcacttctgtgtttttatcagatttcaaaccctgaggctgtgtgttatcactaccaaccaattcaacaaactgagaagcctgactctcggttctttgccccaattcattactgcccttctctgtatacagaagaataaaatcaatcatagaaaaataaacaactaaagctagaaaaagcac

SEQ ID NO: 264500 - DNA, 794 bp, Cannabis indica
aaagtccctccatgaccaagccttcctctaccattccactagctattcatctccctatacaaccaataccaccctcaccatccagcatctctcacaccccaacagccgcacactcaaataccacaaaccagcagccacaccagcaaccgcaatcaccccaacaacagccacctcgtcagtctcatccaatggttacacgctcaaaggctggtattttcaaacctcgcactttccttacctcacttttgcaaaatctccacataccagccctctccctcaccacaccaacctcagctgaaattgcattaactattcctgcttggaaacatgccatggatgatgaatactatgcccttaaaaagaataagacttggtaccttgtccctcgtttgcctcatatgcatgtttttgataacaagtggatctttcgccataaattcaactccgatggttctcatcaacgttgtaaagcgcgtcttgtggccaagggatttcaacaacaacccggtgtggacttctttgatacatttagtccggttgttaagccttccaccattcgagttatcctttctcttgctgtcaccaatgattgggatgtccaacaaatcgacatcaacaatgcgttcctcaatggcaccttggaagaagaagtttatatgtctcaaccaactggttatgttgatcccaacttccctacagccgtgtgaaagctcaatcgtgccatctatggcctcaaacaagccccctcgggcatggttcgacacacctcggcaagctcttttacgtcttggctt

SEQ ID NO: 264501 - DNA, 2436 bp, Cannabis indica
agaccgtaaccgaattttcgattccacgtcatcaccgaatttggcagtcggtttcgctttttttggcatgacggtcagttttggtttttgaaataaaaaaattgttaaaccaaaaaactgtcaaaatcgtcaaaaaccgcaataaaccgcccaaaaccaaaaaccatccaaaactgccaaaccgaaaaaccactaaaaatcgccaaaaaccgtacggttaattttatacggttataatttctaaacgatcaattataaaattgtaaaaaccgaccatcaccgaccaattttcacccctagtctccatcaagattaagaagttgctcccacttggcaataaatttattatttccgtagtcttgcaaaacttcctaaatttaggaggacaaagtttgtcccaagcttcacataaaggccatttttttctttatccccaccaaaaaagtgtcttaccaaactatctattcgagtagcaagtttattagatagtatgatagtttacattaagaggccaacaaattttatcaaattagcttccttgatacttctttgcatattcaaatctatgaaaaaatttcttgagaaatgtcgaaacatcttaatgttaatatgcccataaacatgtcaagaagaacaatttgcatgaaagtttcaatctttaaattctaaatttcacatttttcatgaaagttcacatcttttaacttttttttttctaatttaaaatacaaaaaatactgaggattaacacaaagtggaatttttggattaccaatcaaaattcaatgggggacgaagacccatggttaggtcgagacaagttgtaccatgtcctcttctgcttttctctaacccttttcttctccaccttggctaacctaacccgctacccttttctgcgtcgccactccatttggattggatcaatcgcttccctcttcgccggcgccgccaaagaggtcgccgacgaattggggttttttagatcggccggagcctcgtcaagagacgccgtcgctgatatcctcggtgttcttattggtggttttgttctatcgttagttaagcgttgctctcgacctaattataatcatgtaacggatcaaaatcgagggatttcgctggtttgagaaggggcataagggaatttgtgttgggttgtgaaaagggataaaatttgtttggttgctgagaaattttttgcaaaaggtacgattttgataattgggattcaatcatttcgatgcaaatttatttgtaagtgaagccaatgtaaccgatcaattactttagaacattttcttgctgatttccatttctctttgtaatgcattacattagttactaacatggtctcattatcttggtattgcatattgactggatgctgtttcgatcatttttctaactgattgggaaagattgaattttgtttacaaaaaagaacacgcagaacttgtgatttagaatttgataaatatattgaggagccaagttaatctttttattaagtaatacaaccaagataaattgtctttttgagacaaccatgattaattaaaattgaagctttgcccatagaatgaaataagcacactgattggagtgagtatctgtataatgttaagacatgagataatactttagatttctgttttttgctttactgcatgatcaaccatactcatgaaagggaaaaagaaaccaagatcactaggattgtgaaattaggcctcatattataagcttcttattattccaattttattatagaaaggctacattgctgtaagaaggtcagcttggactaggagagagtggaatttctgacttgattgtcaatgatgcacattactggttttagtttataaattatatctatgtacccagatggacttctatctgtactagagctcatactagagttgagttcctttctgaacctgaattattcttatatatctaatgacagtgaacctgtcaccttctgaagctcctccttgttgaaggcttgtcattatcatcgcgattttcctctggcagcttgacagcagaatagactcctgcaccgcaaagtgctccaagaataggagctgtgaggtacacccatatggcttcgtagttgtttgcagctattgctggccctaaggtcctcacagggttcattgaagctcctgttatttccctacaaaatcaaaggttcataactttaagtcatcatataaaatacatgtatttatacatcttattatcacacatgcgatctgtgttgtgtgtatgagtttagaaatatgctaatgtagttaattatgtgtacttatgtctttactcaggaagctcaatatatggtaaggtcagagttcaaacataccctgcaacaagaatgttgagcataacagttgctccaccgcgattcctgccagctctcccacctgc

SEQ ID NO: 264502 - DNA, 546 bp, Cannabis indica
aaaataagcataattctattctaaatagaataataaagaaggaaaacatctataaaaagtgactcaaaacgtaggctaaaaatagcctaacacatggtcaaggaaggggggctggattgataataaagatataattatacacaatctattaatacaagttactaccaaatataatattgtattaaaataatactatacaatacaatataatctaacacaatacgatacaatacatcacaacacaacacaacacaacacaacacaatgtaccaaacatacccttaattaattatttaacatgaattaataacacgaagttgctatctttttatatatatatacatgtacataatatctatacactatatattatatatataaaagaaaggtagaagaagatatatatatatatataagtatatatatacactcactcacaactttaagtgtagaatagtgaggatcaccatgacttgaataaggtattacacctttctccaaaagcttatttctcctatctctaagcactaagggaactctcataga

SEQ ID NO: 264503 - DNA, 697 bp, Cannabis indica
aagagcaaagcatgtcttccaaagtctgtatggtcctctaaggttgtctatctgtttgtggatgcctggcaatactcaagtgaagctcaattcctaaggcttgttgcaaggccttccaaaaccttgatgtaaattgaggatccctatcagaaacaatacttgaaggcactccttttagtcaaactatattttccacttaaagttgagctagcttggtaagctggtaatcctttctaattaaaataaaatagcagacttagtcaaatgatcaacaattacccaagcaacgtcatgctttaaaggtgtcaatggcaatccagtaacaaagtctattgtaatattatcccacttccattctggtataggcaaaggttgaagtaaacctgaaggtcttttatgctcaaccttaactttcttgtaaacaatacacttaactactaagctagccacatctctcttcataccttcccaccaatattgtctcttcaaatcttgatacatctttgtacttccaagattaacaaaaaacttggatctatgggcctcaataaaatggactccctaagattagagatatcgacaacaactagtcttcccttatggtataagtaccctccgacattaattgtccacccatctaatttcttaccatcacggattcagttccaaataagtcttagcttttcatcttgccact

SEQ ID NO: 264504 - DNA, 1296 bp, Cannabis indica
attactgaaagaagaataagtggctgaaattaagtgggaaaaattttaattagtgaggcccattagtggcctaaccacttagtgtgttcttttgcccattattttattcttttttaatccatatattaaatcctaaaccctaggtgaaatactataaaaggagcatgatgctctcattctcatccaacatttttcaacctaccaaatatagttttcattcgttgagaactatgagagactccttctatagtgatttcacatctccttcattgttcttcatcaattcgagccatagtgaaagagtactatgcccacacatagcaagtcaagtactcaatcatagtgcgaaagacagtggtaagcaatccgaaggagagaaagagatccatcttgctattactctacgacagagaggaatatgggttagagatctgagtggaaggagtcattataattctgctgcatcaatgtaaggttttctaaactcttatgtgtttaatttcattgtattacagaattcatatttagggtgttaatgaaacatacatgttagtaaatctagatcctggtaaaataaatcccaacaatatggtcagatgcaccactcatttttatagaaaaaaatagagtgacatcataagcagatgatttataaaccttcttgtccaatgatatactatcttaagcaatttcttaatgaaaaagctaagaggaaaactaaagaacaatttcaattaaaataagaatacaatgatatcccgcttaggtgacagtcaaagttattcttattttataaacttctttattcttttagtattgtacacactaatctaagttgtcatctattggggatgagtcaactagatgtcgcatttacaaaatacttatcttacgagatctaacactgttatgatgtctaacgaatgacaatctattggggattttcctattaaaaataacaagccaagttagactaacaatgaagtttcaaaattgatactacataatcaataacaaaaaacaatacaggttcaatataaattcatacacaatttttagaaatttataaacatttagcaagtaatgaagacatgaggaaatacaaagcaaacacatctcaaattttccaaggttttcaactagatcatataagtgtcccatttagtcgacaatcaaatacatcatcaattgaatagagttgtcagcttatctaaaatggacactattttagcaaccttttattcgatcaaaataagaattcgatgttatatcgtttaggtgagagtcaatgtcatt

SEQ ID NO: 264505 - DNA, 863 bp, Cannabis indica
agttaccattttttttcagctttagccaattctactccaaagtgttccaaatcacttccacttgattttgaaccatttatacaccttataaatgaataaatcaagtctccaatagttatattttcaatagctatcattcattcacattcataaataattagtaatatcttttactaatttaagagtgaaaaagatgtgagagttacatattgtgatcatcaaattaaaggatttacaactcctattttgtgatcattctacacacattttgtaactttatattgtatgttacaatttgacaaaattaatactttgtcacatttaattatttataacttaattatttaatctaaatattatattatataaaataatataataatttcgaacgtaaaagttgactaagaaattgtaattagaacttttccgtaaacatataattattttaacttgggagggttctacgtgtgaagaatcgggatatgtgtacatctaatattattctacttaaatgtaacaagtgcactatcccaagtagggatgcacacggggcgaggaattagcggggagtgctctccccgtccccatccccgttaaggattttaatccccatccccgtcccatccccgctttattctccatcggggacggggcgagaaatcccctaatggggcggggacggggcggggaatcccctattgtaaaaataaaatttattttaaaaaattaaatgtataaaattattaaattacataaaagataaaatattacatattatttactattcaatatagtaattattatacaaaaatacaacttcaaaattataaaaataatattaatatactaaaaaaaaacaaaca

SEQ ID NO: 264506 - DNA, 529 bp, Cannabis indica
atctcgaaagataagttttttttgtaagtgtttattttagcatggatcaccctaatggtggcgacttttatagggcttacaaaagtacgaaacaggggtggaagctcataagatagaatggccttgactctcgcctaaacgggacaacgatattagtttgttgagcaccttggaaattaattaggattgtatgcttcagtattttcgcttgtcattcctacttggtatgtgttaataatttctgaattgtgtgtgaatttatattgaaccatgttattttctgttatttttgtaatttaatttcgaatcttcattgttggtctaactaagcttgttgtttttaatggaacaaatccctaatggattgtcatccataaaacaaacatactaacgttagatctcgatagatatatactgtaaatgcaacatctagttgttcatcaattgatgacactttagactagtatttacaatatgaaataagaagattgtataaataagaataactttgactctcgctaatcggagc

SEQ ID NO: 264507 - DNA, 602 bp, Cannabis indica
ctagtgagtctactacttgaaacgatacgtacacttgcgtgtgctaaatatcgcaacaccaccctgtaatatttcgataagcctaatggtcaataattagcatttatatttatattatgcgttgatcaagtaataagtgagattatgatcctataatctatttcaatataaaatttaaattttctataagtgagtaaattagcataattttatcaattacggagatttatatagcatgtgtgaatgtaatatgagctatgtgaaataaaaatatttttaggttcggcgaccctgaaaacccgataagtgaataaataagtgtaatttattaattacaaaaatttatttgaaatatgtggatataatatgagttatttgtgaaaaaaaaaatatttccaggttcgacgatcttaaaagcccgattggaggccaaaaatgtgaagtaaacgtttcttagttgcgaaaaaataataaaataactattaacaaaaatattattaatattaattatataattattattactattaacataaatattattatattatttttttataaaacattatcatactaataaattttatatatattataagttt

SEQ ID NO: 264508 - DNA, 450 bp, Cannabis indica
ccatctgtcacgtcttttatggaagtttcaatacgtcttcccccatgcggcattaaatgcgaagtgattgttcaagtaatctctttacctctcggacatgccttctcatggccctagcctcccggagggtagtgatgtgtgttatgctctccttcgggaggcaccttccctgaggtgttccttttttgtctaagacttagttaattttcttgagtgatggttctgtcagacccaagtgtcacccttatcggcgtccacgtattttgagaaaaaacaaaggcaacagtatctatttgtaattaccatcgttgatatatgatgtgataaaaaaaatataaattctggaacaatgactgtaataatgagtgatttaaaggagttaaaatacgaggaattagttcatatactctttttttttttaatatttctttcaaatttacggtttgggtt

SEQ ID NO: 264509 - DNA, 1378 bp, Cannabis indica
ttttttttttttaaaatgtgggacccgatacttaattagaccagtagcgatattgagatgtaagaaaagtgcttgtttgtcaccactggtcgcttctagcatttctccaaccattattattattattattattattattattattattattattattattatcttctataaaagctttaagctctctaaaaaagaaaagaaactttgggatttactctttctctctcttgggtttttcgctgtgcatttgtctctggttcatgatctaaattctaaagtacataaatatattaatgtatctaacctttaaccaaatagcattgtaggctgtaacatgtttcgtggaacccttggtgccggtcattttctcaagatagtcgatgaagagactcttcaaaacagcaagcttgtaagtatcatctataactataactatatttttgtgttttttcccactaaagatttaatttttctgtttgggattctcacattttagcctctaatgatcagaccccaagtaaccacatgttaaatgtatatcttttttatgtacagaaggtctcatctcatgccttttgttcttttttgggaaaagggttacttgttacctaagaacgtatcttgtttgtgttattgcatagtcaaaagggttttagtatctggacccgttctttctcatgccttttattctttttagaaaaaatggttacttcccctttcaaaaaaagaaaaagaaaaagggttgcttgctacctaagaacgtacttgtttgtgatattgcttaacaccccatgctcatgtgtgggtatcccttattataaactaagttgaatttggaaaatcatagatttatttacatacttagtctgagcctctgaggcatattctttttattttgcagctcattcctgacatatttacaaggaaacatggtgaagctctatttgattgggtgttggttaagcctccatgtggttcgaaatggaaaatggagttggcaaaagaagacaaccatatttggttagagaagggttggtcaacttttgcaaagcattatgccataaagagtggctttgttataaactttaaatatgaagggaattctgaatttaatgttgccatatatgatttaagtttatttgagatagactatccctctgttcctatcagtttggttgggtctaatattggtgatgattcagttgaaaaatcttcaatgccaagttctaggcctcaaaagaaaatgagaactatgccaacagctaactttcaaagcaatccacctgggcaaaatctcgagtccaaaacagaaggcatgaagtgattttactttggaacttgatattctttttctttaatatatagctttaacaagatt

SEQ ID NO: 264510 - DNA, 525 bp, Cannabis indica
caacgcacaatctctcgttcaagtagtaaagctgcatattgaagtttggcaagtactgtaactgaactcacatgaattcactctctctttacagaacttcgtatacagcttccaaagccacctgctgtttgatgtgataatcttagcactatcctcctcacagctaatccagttcttcgtatactttatgagagaaaaagttctccaacaaattgtccatatcaagcatgttctagctattgatcaactcactgatggtcttacgaaggtaatctccagtcaaagattttccctgtttcgatccaaacttacaattcaagatcttactgctgccacagatgactcgaattgtaaccttaagggatcgtgttaagggtatattattagttagtaacagttagtttgataggttcgttattcactattttgtaacaaactctcttctaactaactctagctagccttgtaatctgtagctataaataccatgtaagattactcttagggtcggccttgagttaaaat

SEQ ID NO: 264511 - DNA, 1005 bp, Cannabis indica
tccaattctattgagtcgaaaaaatcagcatgattataatttacctagagtgcgtacaaaaggttcagtcgaacccaaaacaccgaacagaaaagcaatatatttgcgaaagacaagtgaccaagagtcatacgtctgctcggtcacttgggggcacctatacctgtacaaagcatctggtaaacataaaacaatcacaattgcactgcaattataaacagagaatgaaattcattaaggataacaagagcataaagtaccgggattaaaagctgcccggtcagcccgttgtccaaaaaatgaaaattaattccaagtttaaagaccgcttggccggtcatgatgtcttaaaggccttacggccatatataatatatatataaacaggagagataaaaagatcaatgttcaaacagctggagtcccaggctctggatttggttcttctgagccgactggagcaggaggatctgttgttcgagcaggagaagcatcagcagcctggtcagaagcttggccggaagttgaagcagccacctctttcccaccataggcaacttgggccgcgcagtactcgaggtacatgtccttggcgtcgcccaagtagtcgaagttggcctggggattagccttccaaaaatcaaagaagagctcgaggccggcagtctccaaagcatcaaccttctccttcaagcggttcgcctcgaccgcctgagcgtccttatcatccttcagccgaaggaggacctgccgcagagaagtcctctcatcttgaagacgatcaacctcagcagataaggtctcgatggtttcctcaaagcgatcagcagcctcgaggtcctttgtcagcacggtgaccttcttctcagcggcaaaaagcttcttgttggcctcacccaactcatggcgaacagctgcagtctccgccctggcctcctcagcttccttcttggccaagtccgcctccgccctcaaggtgtcggacagagccgtactcttggaagt

SEQ ID NO: 264512 - DNA, 742 bp, Cannabis indica
catactcacttgtagttgaataatgaatatttcctttcaggcaagtccattctgatatacttattgtatgcttgaaatggtttgctttgaaagcaagtggctttgaacttctctgcaaaagcatttaagaagaaaattccactgggtttttttgtattattcaataatagtataatgaaaaattaattattttttttggttgatttcacgaaaataagtttgttacatctgtaatagttcaagtgttcttgatgtagtaggagtagtaggccagtaacgttttatatctgacaaagttttagattatgttttgcaaattttttttattattattaatcatttcccattctagctattatgtaaattatttatatggaagaaaattcttcagtgaccatcttgagtgggttgcttataataaaagtaaagagataagtacatattttattgagtaatttgcgccattaatacttaagtctatctcaaagttatagatacatatccaagtaaaaaaatttggcggtaaaaatactttctgttagaattctagaacttctgtaggtacctttctgttaagtgacatgtaagtttccacatgtcatctttgcattggtccacatcatttaattattatttttattatttaaaattcattaaaatatttgaaaattattttaaaatttaaaaaattaaattaaataaaattaaaaataaacgtgattataaatttaaataataataa

SEQ ID NO: 264513 - DNA, 1615 bp, Cannabis indica
aggctgatttatggtttgtcaactattcatcttgtgtaatactagcttagttttattatttagtgtttgattatggtatcttttttctttttggtgtttacagctgagggtgcggaaaatggtcttgagttcaccattgtgagacctttcaactggatcggtcccaggatggactttattcccggcattgatggtccaagtgaaggtgttccaagggttcttgcttgcttcagtaatgtatgtgggaaatttcctttgtcattcaatgtatccattttttttgtgtttatttgtaattaaacagaaccaatacttttgctgcagaatctcctacgtcgggagcctctcaagcttgtggatggtggtgaatcccagagaacttttatctacataaaagatgctattgaggcagttcttttgatgatagtgagtttattttctagtgaatactttcagatctaacatctgaagtttttatgctttttgtttataacaatggtgccaatttatctcaggaaaatcctgctagggccaatgggcacattttcaatgtgggcaaccctaacaacgaagttaccgtcaggcagcttgccgagatgatgactgaggtcagatcattgtcttaagtggaatagcattgcatcgctttgttctgttctgttatgttctacaaatttatttgtcaattaagatcaacaagtctttcctttaaacgtgcaggtttactcaaaggtcagcggtgagccaccgatagattctccaaccgttgatgtcacctccaaagaattctacggagtgggatacgacgacagtgataagcgaattccagacatgaccatcatcaatacacaacttggtaaccttattcaacttcatatcccaatctcattattcagatcgtgatttagaatcgaaaagaaccatttctaatgaaacttgtgtttgaaaacagggtggaacccgaagacctccctttgggacttgcttgaatcgactcttacataccaacataggacatatgctgaggcaatcaagaaggcgattgctaaatcaaccagctaaatttcttgggtggtctctggtggcactcaagagaaggattctttctttcttgcttagaggtttgctgtcgtttatcataatcatcttcatcaccatcgtcatccagtgtttcttaaaattcttttgtttttaagaatgtgaagatatatatatcttaatcatcgaatcgaatatacactacaatttttttctttttttttatatataacttctctatggggtcgttagtcctagttatagtatcaccatcatcatcatcatcatcgtcacattcactagtagaatgaaagagaagaaagatctgaaatatcatatatcttccatatatatatgtgaaatgttttctactagagttttcattttgggctaaacgacaatcaagggggacaaccaacttgttatactgagggggaaaagctgtcgtttctctctctttaatttttcttgtttccttaagcattgtcatatcatattcctttctttcttctgttaaaagctgtgttgtattatttatttagtttgacctcttgtgggcccattaaattattattat

SEQ ID NO: 264514 - DNA, 2890 bp, Cannabis indica
tgacatggacatcaatatttgacgtggaagaaagaaaacatcctggagttaagtagtcccaagtcatagcagtcaacctggaggggtccctaaccctgtacctaggttgactttgggaactccaaaataggtgtttggatcctaccaagttgtttccaactcaccatctttcagtattctaaatcaagaagaccagaagaatcaagtccaaggcctgaaaactaaaaatatatgaaactgcacctcggaagttaacccaggaagtaagtttcacccagcgcccaaggtgacatcctaactagggcttcaatttttgggtccgactcagtgcaaatggctcaaaatttatacttttacatgaataagacctatcacgaacatatttgaggatccaaaatctgaatcagaacacttttatttttgagtgcctgaggcaccaagcgcccttggcacctgattcactcaacacctaggttgaactattttcaacctgtggcacttccaatcacaatattgaagaggtatcctaagcattttattcatatccaattaaaacaaagaatcaagtagttttgagaaagaaatggattgacttggagaccaaaacagggacccagggcccagtttcacactttgttaacttgtgccatttccatcagcagtttagaataattcttctagacataccctttgttttcatcaaggattaagatttgggtattttagggaacaaaaaaagtcatttgggagccagaattgggacccagtgcctaggttgacctaagtgttgggcccatcacccaggttgacctaagtgttgggcccagcacctaggttgacattttatcaacttggactacttccaatcaatttttccaagaagtcttctggcatattctttttttttttgataaataattaagataccaatgttttcgggaatgaaacggaaccacctagtggaaaaaatctgccccagtgtctaggttgacactggtgttaggcccaacgcccatgttgacattttgtcaacctaggctatttccagttagttttcttgaaaagtgtttcggtaatctctttttttaaggaatagcgaagatacaagtgatctcagggagcaaatgagatcctttgggagccaaagcagggtcccaatgcccaggttgacatatgcattaggccttgtgcctaggttgacatacaacctgtttcacatatttttactcctcaagcgtgatattttttttcaaaaatagggtaggagatctcgttcacaatctcaatatttagaattattgaaacgaggctcgagaagtcactcgggaagcacccggcgcccaggttgacatgtagcctagtgcgctgggttttgcttatcagaatctaattccgtcttgaccatctgactattttttcatagtaaatgagagcaacgacttgtgatagtcaaatccacactttgatatttcactcttttaacaaggtggaatatcggaaaaatcaaggagttttgagtctacccaatttcaccagaaagtgacatcttcaagaactggtgaacgacttcaccaaaacaatgaatctgactaggcgatgccaacatatcattgggtacgggtatcagtctgggtctgggttcgggtccaagtttgggtccagatctgcatcttgcttcgggtcaaggtcttgggtccaggttctgtcctggtctcaggtcccgaatcctgggtctcaagtcccagtccggtcttgggtctcaagtcccagtccggtcttgggtcttgggtcccagtccggtcccgggtccgtgtctgggtcccggtccggggtcggagtcccagaccaggtctgataccggatcctggtcttgatcccagtaccggtccgggttcggctctgagtccgggtcccgtgtcctggtctgggtccgggtctggttctcgggttcgggtcaaggttcgggtcccgagtcctgggtaccagtctcgggtcccgggtcccgggtcccagtcctgagtcatgggtcctgggtcccggtcccaggttcgggtctcgagtcccggtcccaggttctaggtctcggtcccagtctgggtccgggtcagggtctaggtcccaaggcatttgagtttggggttcgagtcttgaattaagattttttaaaataaatttaaatcgagtcggatcaggtctgatctagaaaaaaaattaggcggaggggagcggatctgatccaagatccaataagtatcagaaggtttcagatcaaaggttatccatcggatcggagctccaacccgctccaactaaatggatctttttgacatgcctacttaaaattcagagctattcaagttagattttgaggacgaaatccttttaacggaagataattgtaatgaccgcctaattttaatatgttagattattaaataattaagatttaattataaaattaagttattaatcatgatttacgcatttgtggagatatatttaaatgtagaatgtgttaattatgttatgtgtgtaatttcttgttttttatttttgtgctcggtaacggtggaacgcgacgtagggccattagagagtcgcattttcatacagttagaattttttttaatagcagggcatcatggttagacattggaagtattgagaaatagttggggtttggatgtgaccagtttacccttggatgtcattagactttggtgtatgtttaggggaaaaatggtcattttgctaggagagtctttttgtcttttatgggctttaggaatctgatttttaagttagatttaataaataaaaattagatatttatcttgtgaaggttagaaaaataagctagaaaatacatttatcttctctctctctctct

SEQ ID NO: 264515 - DNA, 695 bp, Cannabis indica
atactccttaaaaactattatattaaattatatgggacctgatacttaattggaccaatagtgatattaacacataagaaggtgttaagtaccatttaacatttctctataactaatattgtacataaaaaaacggcttacgtttgaaaaggtcaatattatacgtacaaagtggaatttctcgtccaactaataacaccgatcgatatgtcaacagtcaacttattatggatcataaattcataataatttgtaatttgtaaggatggtaatatttgcaaaatattatagaattatctgtacttaggtttagttttatatatatagcttttgccataaccattaatccaatgagttctgccttcccatgcaatttccaggaagcttattaatattaattagctagtagagaaacaaacgaccatgacctctattatatatattaaggattaagccaaagtcaattgccttattacctctgcagccttttgtatctatgaacttcccgcccaaataacgactccttcctcatcaataactctttcgtacgtacgttttattaactaatcatctttctttttctttttctttaatatacttttttccatttatatatactagtaaaaagttacgtgcgaggcacgtatactaaattttatgttagtttttttctacgttattaaaaagtgatacaa

SEQ ID NO: 264516 - DNA, 586 bp, Cannabis indica
gcatggagaagtaaggagcacacacaaaaagaattacatggaaaagcaaatgaattatacaacctactgccaagttttttttacatcctacaaaaaacaagtccaggaaccatagtacacatgaaaattgcagaagataacaacttcgtgtaatttttttgtagcactagatgcttcaataaaatgatggaacaagtccagaccactaatcattattgatggaactttcctcaaagctacatttggaggaacattgctctcagcctgtacacaagatgcaaatggccacatattttccctagaattctttgttgtggattcagaaaattacaacgcaaggacttggttcttttcaaaattaagggaaacatatgggatcagagaacaacagtacttgatatcagccagacacgagagcataataaaaacagctgctcatgtatttccagatataactcactgctactgcgtgtatcacctattaagtaaccttaaaataaccttcaagaagaatgctagcaaactcgagtaaccattctttgcagcaacttgaacatacacaaagaggaagtttgaataccatatg

SEQ ID NO: 264517 - DNA, 998 bp, Cannabis indica
ggtgcttgaggttgcacttcttcatgctagaaagcacttggacttctccatgagcttgtggatcttgtttggagtaaaccgattcatcctcctcttcattatacttgtaagacaaacccttaaatgtgtttgcacctaaaacgtcgaaatccttgagttataggaccacagtttcatcttcaatagggatgcctagaagtggaaacaaatagctaaggagagcaccatagggtaaggcttttctttttttaggcttgtagacattattgatggttttaatgacgagatagcgtaagttaacatttttgctttggacaaagatgttaaaaaggagaatttggtcaagtgcactaacttcatctcggtgtccctttcgaggagctaggttgttacatatgaaagagtgtatgatttttctttggagagtgagattgtggcattttgatttatcaagaatatcttctcctacacaaactctagttgaaaaaaaggtgtggttatagttggcatcattcctaagtctaggtctagggtcaagtaagataccttcttttggggcatctatcccaccatctgactggttgaaagaaaggttgagccttctacaaggtgttaacattcgcaagtgaaatcttcactttctcctccacgtcgactacctctgggcgtgtggtttattagaagagtcggggatgactagagatgattcccttagaaaagtggccaattgggaagatttacctgacccaactcgcccttctcaaaaacagcgagctaagttagtgttgaccctcaatactctgtccaagacttgtgccctaagcataaggggtgtgaggctagtaacttgggaggtaaagtgtgcgatttgaaccttaggctttcaagtagagctgggtggtcgcccacacttctctctacagaccttactatttatactcatgataagtataaatattcattgcctctttatacggaagtagatgggaaagttcata

SEQ ID NO: 264518 - DNA, 931 bp, Cannabis indica
ttgaatttgaaaattagcgtttttaagaaaatgagatgcagaaatgataaaacagcaaaattgcataagtgaggcccattatccaaatcccaggccggccactattgtcggcttttatcaattttttttgggaaacttacaaaaatactgtattttgacctaattcttacaaaaatactgccacacggtaaaaataacttttatactgttttgggactttttttttcttttatactgtaaacaccgaaaataaaaaacgagggtccatcttctacacccacacacagaaaccaccacaataacaccagaacaaccgaaaaacaaccattaaatccggtgagatgaagcagaaacattaaaaccattaatattagggctgtcatggtttttctaatgttgtttttgggttgttccactattgtttcgtatgtttaacaaatattggttttaaattacacatgttaaaccaactactaaatatttatatgaggtaaccagaatgaaagaattatggacagtaaaagacttaccttccattaaagtggtgaaatcctagaagaccaaaaaaaaaaaggatggaagctggctgggaaaaaaaaaacaacataacaaatgcagtaaatgtgggaagctggggcacaacaagagaacatacaggaggagacatcaaaaatgaaaagaatgagaacagctaaaaaacaacagtggaacaacaaaagaaaactgaacatatattgaagtatatgatactgaagaaataacttacatgcaaattttattatttccctattgctattaaaaataaagcagtacaataatattttaaaaaaaatgagataaaaaaataaaagaaaacaacagtaaaataacattaaaacaataataaaacaataacaaaataaaccatcagagccatcaaaagatacaaact

SEQ ID NO: 264519 - DNA, 740 bp, Cannabis indica
gccgcctctgccattccacctccggtcatcccttcaagattcattcctccgatgactaatggtaacgctccttccactcactctgtcattccaaacactaaccccggttctatgcagcatcctcccgatcgtccagccaacgaagacaatccgtatttcgttggctccggtgatcatcccgggttgattcttgtgacaccacctctgtccgaccataacttccagcaatggcgtcgggattttcacttagctctcggagctaagaacaaaaccggttttattgatggtacactctctcaacccgatcctactagtcatctcttccattcttggactcgctgcaaccaaatggtaatgtcttggattattcattgtgtttctttggatattaagagcagtataatgtttcttgatactgctcatgagatgtggaatgaacttactaaccgttttagtcaaggaaatggacctcgtctttttgagcttcaagaatctcttacagatttacgtcaaggtgatgaatctgtcactgcatatttcaccaagcttcgggctatatgggatgagatcaatgagcttcgacctcgtcttccatgcacttgtcaagcgtctgccgataacacaaaatttcaaaatcaagagaaggtccttcggtttcttactggcctcaacgaatcatatcaagcggttcgggatcaagtgttaatcaccgaaccatttccatctctttcaaaggtgtt

SEQ ID NO: 264520 - DNA, 1236 bp, Cannabis indica
aaataaaattgggcataactctcattgttatgtgcttcacattcctaccttgagatgcccatttggttaagcacacacacacacacacacacatacacacacatatatatagatatataaaattcaaagagatgagtatttttacaggcaaaaaggcaaaagagccttttatgattgatgagttcatgcctactaagctcaattcaatcttctatctccaataaactataaaagtagagaactttatcactacactagccctttaccataacaaccaacaattattcattcacacagacattttatcaaacattatatatacataccatgattaataccataccaccgcatagatgttagcataataccaattttgtaggaatatattcatacacaacaacattaagattaagagaagaagaacccacaagtaataagaccgaagaaagctcagaagctcacttcccaagtacccaactggaagagagagagagagagagatgaggagaagttggcttgaaaatgccttgaatttctataacatttatctctttctattttcttatttattattttgactaattttgcttttttaaagaattatttttgagtaattaaatatgagtaaataatattttagattttgtgtgttgtaaaagttattgattgaattttatatttgataaaatgataaaatagaccatgtgttttctaaaatggtaaaaaatagaactatgagctcaattttagataatttattttttaatataaccaactttaagacaatttttaacacgaacagatacagaaaatgtaatcaattttgtcatagcacgtcttatttaacaaaagagacagttcaattagtaagttttgcaaaacatatggtttaaaatagtatttacccattaaatattatatttgttagtcatcattttcacactaaacattgctatgcattagtggtgctcactagcctcacctagaggtggtgtattgcaattagttaacgatattttacaaaaattattatattaaattatatgagacccgattttcaattacactgatatgacacttgaagggtgctaagcaccactgttttagcatttgtcctttcacagttttatctgttttgacatctaacaaaaaattttagtcttttgtcccctaaactgtgacatgtaccaaatcatgccccctgaaattttaaggtcgttaaaaatgccccttgaa

SEQ ID NO: 264521 - DNA, 885 bp, Cannabis indica
gaagaccttaatcccacctctaacctcatcatgcttcatcctactctcccaaacagaacctgaaaccacaccaacactactcctagttccaactcttctcttactaccaatatcatcatccattatctcctatttatctcactttctctttcttcttttttctttctagcaatgagtacaatgggacatagatgcttaccaattgaaaaggaagcttgaagctgaagaaaatggcggttggtttggttggtagtaccacgaagctcaacccaaagggaccccttccttcttcttccttctctctctgtgtttttttttttattttaattaaataaatgaataaaataaaagggttagtagagaagtgagtggggttgaaattgaatgattaggggtgtgttttaactgttaataaaggtaataatataaaagaaaagagaaaatctttaataattattattctcctttaacttttttttatttattttctatatattcctcaacttttgtataattgcgtaggatctccctattattttattttattttttttggttactaaagagaaaaagtgatctctttcttataagttcacatggaaattgaatagagagaaaaacagaaagagagtctggggatgatttgggcacagaaagattggaatttgttggagtgagtgcttttctatttccacaacctctcttttatcacccaatttttagaattaaattaatgtgtttttaatttttttttaaaaaaagaaaaattatcgcttatactatttttttaacttctttttttccaaatttacagtttagatttctaaagtagttgcagcgctagttgcaataggggttttatacaattttttgttgcaatttaggt

SEQ ID NO: 264522 - DNA, 537 bp, Cannabis indica
ctcccatccttgtggaaatccctaatcaatctactactgataaggttagtattctcttttgtttgatgcgtttcactgaaatttggctttaaaatatcccaattcaagaaaatcacgaccaaactcagtaaagaaaatcacgatcgggttcgactcatgcaaaaccctcttcttcccaaatggacaatgaccacgccttggagaccaccaacgatggcgagtttgggggtagcgataacaacgaccaccaccatccacatcagcaaatagaggagcagaattacactcccaatccgatgcataggaagaacaagttgtttcctgcattgatgatgatgatgggtcaattaagtttatcttttaagacatgatttaaacttctatacatttttttaatatatttgtatattaaaatggacttcttgtttttttcagacccaaaaccaattatgtttttttttacagcctttgctcatgcctgtggctgtggctccgatcgtttacttccatattttaaatagagagagagagagagag

SEQ ID NO: 264523 - DNA, 763 bp, Cannabis indica
actgaattgtgatgtcaaaattgagctaactggcacatgtgcggtagtggccgctagaaaccatgaaggttccctgctttaggtagctactaagaagttgtgcttctcatatgctctttgtggagaagctgcaacttgttgcttagctttgaaaactgcagtggagttaaatttcaagttcatgactgtggaaagtgattctagtgtggtaatcgatgctcttgatggtgtcttgtctttttgacatggttgtgtggttttgatatgctagtattaggttcattttataaagtattttaaaatgtttcaattgattatattcatttcgtgcagaattactcttgttttctacttattttaggtataaatggtaaaattcataatgtaaattaaaattaagaataaacatgttaaatgagattaatatgatgaattatcatggaatatggagttctatgatatgagtggtgaaaaattttaagttttggatgctcaacacactccgtttgtgcttgaaaatcaagtttgaagcttcaaatgaatttttgactatgatgtgttcactttgaggaaataaatctctctttcagcttttcaaaacatcttgaatcgtccaattccgagcaatattaaaagagttatggctaaatattatcagttgtcacactaggaagctcgctgccaaaaattgagcttcaagcactgcgacactaccttccgcctattttaaacttcgagaaattaggttgtttatctttttttt

SEQ ID NO: 264524 - DNA, 1053 bp, Cannabis indica
acaaatcacaataatgaaaatccctattgaaatctttgtatacgaaatattaactagaacttgcctagaaacaatagcaagtagtcgattagtgtcaaaggaaataaatgaagccacgtacgaaaaaagattcacacaacttttttacaaaagagccaacattgcttcgggtgttcatattctaagtctaaagtatagtgttttctacactaactacatctccacaccacactcttctccaaaactattatccttgagagattttcttcctcgcaatattaaaattgcagcagcaaccaaacaaggtcttcttctttgcatcgatggttattactcgccaaaatacattgtttgtaaaccaacaacacaacaatggcgaactattccaagacccaagactcgttttttcactcaaaagtgtatgatgtttactataggatctaaccctcttcgatacaagattgttagattctcctcaagaaacttaggaggtgattgcatcaaatataatggtaaaattcatgttgctttccgttgtgaaatttttgactctaaattttgggcttggaagtgtttagaggaaacaattaatattccttttgaagagtatcttgattatgaatcaatgatttgtatatcgagatacatatatgcccttactagaaaaaatagattatttgttttcgatttagagaaggaaagttggaaattcatttctttggatcttgataaagcttgtgatgataagtataagtgtagagcaagatatcaacttgtggagcaccaaggaaaattgggacttcattgtactttgagaagtgatcactttgtggactacttaatgatactttggattataaaaataaagaaaacatcaacatcatggagtttgagcttggagaaacaacattgctttcaaattcttaaggaaccatatgcttctatggtagattttcttgactatgatttggtggtcacaatgggattcgataatattctacttcatgatgttaagacatcaatttcgaagattagaacgcaaataagtattcc

SEQ ID NO: 264525 - DNA, 630 bp, Cannabis indica
aaatttaggactatcatacttaaaaaaaaatatataaattattactgatctttttcgaaatttaagactaatatgtatcaaagtaactttttaaagttttaccacaaatttttcttaatttaattctattataaaaagaaaaatcgatacttttaaatgttatctcaggtgatatttggcataatggtgcctaataatgctcttaattttaaccaaaataaaattaaataaaaagctaaactgtaatgctcttaattttgacttcattggcagaatccaacttgtaatctaataagcttgacagcattgttaaagaccaaaataaccttcatcatatctaccctttcgcataaagtgaatgttcaatgaataagggtaatatggtaatatgacatgaaagcccgacaccacgaaagaaatatgaccgttggaagagatcgacagaagaaaacgaaaacgcttcaaatcattaaatactttcaattatatcccttactttctttgaattatataccaaatctgaaattcttcactttagtaaactttccatatgagaaacgctctttctcgctcttcttctctctctaacaagctaagaaaccccaaaaaggaaagaagaagaagaaagca

SEQ ID NO: 264526 - DNA, 1449 bp, Cannabis indica
ttatacatgattttaaaaaaattatacaaataaaattaaaataaatattaaaattaacataaaacaatgtgagaaaaaaaatttaaaaaaatattaagactgatctttaaaaattattttaagtttaatttttttaaatattaaaatgtacttttgtggggtaaatatttctttatgatttcagtaaaaatattatttatatatatttgaaacaaattattcattttttaaacaatgaccattacaaattatccatttatatttgtaatgatatatgtttaatccatatcaatccaactatacttagggattatataaataaatacatttctcattttcacatttaaatagttttagttttaattttttttatatgatagtatgtaatgtaattatttaagatattttataatttttttttgagaaattcaaaaaattttaactctccaaaataaattcaaacattataatgtaccatgttatttttattatataagcgtgtgaaataaataagttgtatcatactttttatgtcataaattattttaaattttttgaaaaaatatgagatgcctaatataatattataattgtcatataaaaaaggatttatgatttattttaaatactaataatatagatgtctctacatgtaaaagtcttacttgcatttttttatattaggaaagaatgtatttaaatttgtgacttacacaagatgtgctttatcaccaaggccaattctaaactttagtaagttaaactttaggaaaaaaaaatgtggtaatttcaaaattagtaaaaaaaaaattatttgtattttaaaaaaggaaaacatttttttgggacgtccttaggttatgtaggccctaagcgcaggtggttgatggtagggatactagtatctgtaaggacacttaggtttctcataacaaagatttttacccgaaatttaatggttcttctgccactaattttagcaaaatagttgatcttttgtcaaacaatggtaattagaatgcccagaaattaaatagtctatttgatagagagactctttgctatcttaaaaggaggtagaccctctagccaaggaagagataaatgggtttagactttggaaagtaattgtcgtttctcttgtaaatcagcctaccttatccaagcaatggaaagggctcctcactgtgaagttgctccttctatctgaaataagttgtggattagtaaaactttggagcaccataagatcctttggtggtgtatcctgtctaatgtgctctcagttcgctctgtgctcaacaagagattccatattgaggatgtgggggtgttctctttgtggggttgaggaagaatctatggaacacctgtttctttcctacaatatggccttttatttatggcggtcttcaccgtggaatatctttctgttaattccatttttgg

SEQ ID NO: 264527 - DNA, 901 bp, Cannabis indica
tgggaaaagtttatgcatgttatatgggaaataagaataatattgagagaatttcaaaacaaaaaaagttatttgcagcaacttgaaaagaaaaaaaaaacaaaaaacaaaaccaaattttttgacaatatagtgtcatattgaaagaaaataaagagagctgttgcaaggttatcaaagaaaaggttctctcgtgtatttaaaaaacaagaggatattgggatcatttgtgaaaattatagggtgatttgaatggagaagcttatggtacaggtgagcataaatgaaaattaaaaattgagaattaaattatgttaaatcatatagagtagatgcaatcgaaattaatcatcctaagctttaatcattgttaattttaccttaattatttgttttctttgttgtctatttagcataaataaaatatattttcttatttttattgtcaccaaatagaattaggaatttaattttttggaccttctattttgttaaatgataaaatagaccttgtattttctaaaattgtacaaataggaccctgaactgattttttgtcaaaataaaacttaataataattcaatttagagatgttatgacaaaactggttacattttctgtatcagttcgtgttggaaattatcttaaaattgtttatattaaaaaataaaattgttgaaaattgagttcatgatcctatttttactattttgaaaaacgtatggtctattttatcatttagcaaaaacaaagagtccaatcaataatttttacaaaacacaaattctaaaataatatttcctataaaaataacccaccaacaagaaaatcgtgcgaagacattacccaaaaaaaaattagtgagcatcaaacaattttttaggagagagagagagagag

SEQ ID NO: 264528 - DNA, 1301 bp, Cannabis indica
tggatggagtatctctctcctgagcaaataaataaaaactgaaattgactgcgtgtatatatagatatttaaaatgtatatttacacatgtatgtaattgtgtgtgtgtgagaaactgagaatttgagctctaattttgaaatttgaatttgaggaatttaaaaagttgagtgtatgtatttggttgatcgtaaaccaaagcgagagaattggatttgataatttgagatatacggtttgttagagagatatgtgggtaagataatttttttaatttaaaaaagattgtttaatttttgggtttatttattgggtttatttgttaacgggagataggttaaatttaacagaatattcttttatttttaaggtatattctgttaaaccaagaaatgccgttaaataggcacttttaatatataaagatatatatataagaacatttgctgaaatcaagttaaagaaatatttttgtaactaatatatatcactacattacattgacatcatgtgttctatatatatatctcaaataattgaatcatcagaagaaccattatgtgaggatataaacccttaaaacagggtgtttgtgtagagaaaatacaagaaaattaaatgcagccccggcatgaaagcaaattgtagtagtaatagtaggaccccaagtcacgtttcactgctacgtacggttccccctctttctcttaactactcttctttcttagctaggcacttcatttaatttacatgcattattgtatattatataaactcattcaattcatcacttactctatcgttttcttatttaatgaaaatacttttgacttttcttgttagtcctattcatcatcgactgaataccacaaacgtagattaatgaataaaggctaaggtcagaaaaatatgcgatttagttaactaatatatacttatgaataatccttacattttttttttttgagaggatgaattaacccttacattacatgcatataatataatatggtgatgtcgttatacttatattataattattattacaaaaatatgtatgtatagacatttatatagcatgtgatatgcgtgcccaacaattttagtaccgactcacctcaattagctagatcatgagcagtagcatagcctcgactaatgaaagtgaattatattatctttttttttttgaaaaaaataagtgaattatatatctatgtatctatatctatatatatttatagatatatactgtacgtactcactactagaaaaactaaatgatgtttggcaacactttt

SEQ ID NO: 264529 - DNA, 533 bp, Cannabis indica
tccctagagaaacggtcttcccccacttctccagggatgagcgtcatcttttaggttcgttcctgaatgagcgccctcccattagcgtatcactcagagggttgatactctcgctccgctatgctagggaagatcgctattttcgtgggttagttaggaaacttaacgttcttcttcctccacgcgtcaaccctaacattacactttaaaacaggctttattgcgggttggacattcgaatatgggtatgacccaaaaggcatggattgggcgtggcccatgtgagccactgggcttatgggttctttgtttctaacttatataagtgggctttgtaagtacttcgatcgttgggccttttcattgggcttagagcaatttttggccactacagtttgtcccttgctctttaagttgggttatactcaaattaaggagcattacccgcaggcgtgcatgattgactcggagtgcctatagtgtgattttagatcgagaataattgggccggcataagttgtagtagttagttt

SEQ ID NO: 264530 - DNA, 1690 bp, Cannabis indica
attgctttgacaattaatgaataaacaaacaaatgcagcctcctaaaataaataaagaaataaaaagatattccgtagaacaaagtattaagtatcgatgtgtttgaatgtaaaaccaaacatagaatcagattagcaccatacgagatgttcagatcagtatggtgcaaataattcccaaaattgacctaaacttaatttccattatcgcatttttcttttaaaaagtaaaatggatccagatcatcaatacataactttgaatcagctcttaataaatcatgcaagagtaaggtgcacaaatttccacaaaatcgacattaacttgaattccataattaatttctctttgaaattagatatggattcaaaaatcatcttcagaacaaccatcaagcatgtaaacacacccaaaaataaatatgaactcaacaattgggataattataaatacaatgatggtaaaactaaaaaagaaatatgaacccaaaagttgggataattatacatacgatgatggtattgagattccatcaggcttcaagaacctttgggctccatcaaggcattcaggagacactcattatcaccaaaagaacccacaattcactaacctaaaacaaatgaaagaatacaaaaaattaacaataaaagtgagacatagcagaaaacatataaaaaattataaaccaaaagaacagaagtccagtaccataccaaaatgtcagctttttcaggagccttccagtaacgcatatcacaagatattatggtaacaacgctttcccatccctctagtttaaccaagctctgcatcaacaagatagtgttaactcaagcatgaaatacaatagaatataccaacaggacaggaatagacatttacaaaaccacggaacggattcctaacgtagtatttccattcaagactgaaactcacatgaagtgtaacaactgcatttggatttttctcaacagcgtaaactttaagcttgcgccctgtttcttcagctgcctacataaatgagaacagaaatcaaataaaaatatattcaaaaaagaaccatgaagaatgcacattatataaacacatccacaacataaaaggttgacattaagacccatgtagcccaaaggttgaacattaagaccaagttttcttttaaggtattgaggaaataacctgtaatgatgcccttacaagaggtccacgtcctgctcctacaaccatcaataccttacacacaaaaaaatatagatgtattagagctgcagccctcacgtactgagttttctttgaaataagaatcatctgacacaaaaggtaatattggtgtaagcgggcagcttactgttgtaatagctgatgcctctttatcaggaaccctgtccaataaagctttagaaactgccctttggtactgcataaacaagcagataaccatataaatcgaattaacacatcagaagatagttttcctttttgaaattcatcagaagataagttactaacactcctttcccgcactcttggagctgcatcaacataaatatactactttattattaattttttttaatcattttattactttattagcatatttagctatggcattaaattataaactatttatattctttttttattattattattactttatctaataacataataagaaagtta

SEQ ID NO: 264531 - DNA, 602 bp, Cannabis indica
ataaaagaaacagaaattatagaggtacataaaaaaattttgattaacaattaattaattataaaccaaaatatatactgaatcaatacgtacatatatactctctcttaatttggttgatgaagaaattgttaggttgataaaaaagaaaagagtgatatcagagagagagataggtaccgtacacctaggttaattttaaaatgttgttcaatttatatatgatatatggttattatttattatatatattttttaaaacaataaaaatcatgatatatcaatatttttttaattaagatatttgtaattagtatatttttaaattttgttttaaattttaaaatatttttatggcattttaaatgttttttaaaagtacattttttttgaaatattttaaagtacattttaaatgttattaataacaaataacattataaataaatttttcataaccgactaaatcatattttgattatttacatttttatatacataatttttaatatttcacattttgagcccaaaaaaataacattttttatttatatctttatatatttttatttttgtcaccattaaatttatatttttcattt

SEQ ID NO: 264532 - DNA, 942 bp, Cannabis indica
ggagtcatttaattttgctgcacgcaatgtaaggtttctcaaattttatatgtgtttaaattccattgttttagaaattcatatttaggatgttaaacaacatacatggtagtaaatctagatcctggtaaaacataatccaacaactggcctcaaagctatggcaatgatttactttcatgaaatatggatttaaaacaatgtttgtgttgatttggatggtttcatgatggtttttatgcatatttgatgattgtatggaaatcgcaatgtatgttataaaatatttctttgtttcattatgaaaatatttttactggaaagtagacaaaaaattaatgaatttaggcttttacagaacctaatttggattttttatgaattagttataattttttgaatttggatgaaaatatctaaaattggatgcacatacgagcgcacgcataagggacattgtgcggctcgctcggacaaaaccccttcacataggggcatgttcgaagcttgcccccactcacgccgaggtttctcggccatagaggctgcgtggagcctccagtcttggtcaggtgccttcatccgcgcgcgcaggggtatacaatgcatacccgtgtgcctcaaatttgttttcatcatatcttttgattcaaaaatcatttttcattgaaacaaaatttaaattttagtagaattctgtgtagaatataaatttttaattaaaaatataattatcagaataaaattaatttttattaatttttaattaattaaaattagttttagatattagtagcctttgaatttgaaaatttgatttttccacaaaaatagccttatgattaattttgaaattttttattattttatttattttaattataagatcagatattacttattttattattaaaatttggaatgatcttattttgatattaa

SEQ ID NO: 264533 - DNA, 577 bp, Cannabis indica
aagtccctatagtgaagagtaccttgtccactcatatcaagtcagtactcaatcatagtgttgaagattgtgatgaattccatcaatagagaatatccaggttcagataatactctgcgacagaaaggaacaagggttagagatttgaacagaaggagccataatattccactgccaccaatgtaagattttctagatatttatatgtgtttaattcattgttttaggaaattcatattttaggatgttagattatagtgtataatcaaacatacatgttagtaaatctagatcctggtaaaataacttccaacaggtaagccttacagaggtagctaaatataaaagagctagtgcccatcgctttttagcatggcctcccatcgctcttcagcgatggcctctgcttgatatctcaggtagtgttagccaaaacatgattttaaaagcaaacactaagttgtaagcttttgttacacgaaagatcaattgtgtctaaaccacttgctaacaaagataacttcttaaagttagttattctttttcagttccacaagcatacacctggtagcacccc

SEQ ID NO: 264534 - DNA, 419 bp, Cannabis indica
atgattatggccggtgaaacttccctgttggcctatggatggcaggattaacctggcaagactctctatacaacccaaaacgtggacacaaggcatgggctgtgaattaagccctaaaagcctaacagaatggctgaataatatctagatccaagggcactttagtcttttgtatttatctaacaacctatgtaaatatctaggatttaaacttgtaatctaggatttaggcctcctatataaaggccttaactctagcctagaaacctaagttgcctctaagttacttagcctccaaatagtttaagtttgaaagccatattctctgcctctaagttacttagcctccaaatagtttaagtttaacagccatattctctcttctctctctctctagtacacgcccaatagggctctcc

SEQ ID NO: 264535 - DNA, 722 bp, Cannabis indica
gtcttttagtggaattttaggtgcgttgtaatctgattatttctttaataatttagttagaaaaagcttagttcatcccatttcattcaaattaagaaaaacaccaaaaaaataatatttcctctcccttctctctctttctctagaacaccctagaagccagcaagaagctagggttttctgcagcaattaagagcttaattaacataataattgaggtttcaatcctaggaaaacttcctagctcctccttttatggtttctttagttttaagttaacttctcttgcataattttgtgaaataaggttttgtgattttatagttgttggattttttgttttgatgatatattattgttgtttgagctgatttgaagttagtttgtggcttggcttggttttgagacaaggtttgagttttagaactcaaactttggtctttaatggtgttttgagttttaaggggtgtttttagtttttgttgcatgaattctctctattatgatgttattaggtgatctggaagtttgtctgaagttcggagttgaattgaagtgagtaggtgggtttttgtttttcctacactaaataagaatttcagttcagggggacctgtaggaaccgatcgatcggttggtccctaggataccctacagaactggaattccagttggggaattggtctcccggttggggcctttttaggaaccctagtttttct

SEQ ID NO: 264536 - DNA, 842 bp, Cannabis indica
ctaaaccacacctatgcctttcatgaacataatatttactttgtaaaataatttaactagcattgtcttgaattttgatttaaatatctaatgaattaaaaaattatttaaataaattttagaagttttttatttttaaaatttttatttatatttgaaaaagattaattaaatttttttgcctcttgaattttagtatataccaaattatgaatattttgaactattgagattgttagatttaagaatatttatcttattttatttaattttactaattctgtgattgttcatgtactaaatcatagaaatttgttaaattataaatctcgaactttgatatgtactaaatcaagttctatgaactttcatttaaattttttttattaaaattaaaaaaaaatactttagatttaacaatttcataattcaagaagattttgaaccttttaaaaatttaaaaggtatgatttggtacatattaaaatataaggattaaaaattctaattagctttaaaataattttaaatatattttttctaattttattaaacatgtattttaaaaatattttaccatttcaattagaaaggtagaatgcaaatgtgagtacattgagtacgacaccaaaacgagtgataattcgcaccaaataaatatattagatgagttattttagagttgatagatttaattaaaaatgaaatggcgacaatttatttaaaggagaggagtgctaattataatttttagtctatttataaagataaatgttttgctttgttatagttataatattatttgaataaatttttaaatttttttgtaaattttttttttt

SEQ ID NO: 264537 - DNA, 3701 bp, Cannabis indica
aaaataactataccaaacacttaattatttaaggttataattgtaattttattatcaaatttttaactaaaaggatattttgttaatttttttaataaaaggacatttattaacttaattgttagattgagagtcattttacatcttggcccttaataaaaaggggcaaaagttccaactttactaatgggcctagtatgctgttattagccgaaagtttggaaaatagatccattaggttcattaattaaaaatgggcccatagcttacgtatcattaccgaagcctaaggttaaccctgacttcaccgaatacggcagttaatcatgaccgtcaattttacaagaacaaatcataaccgttaaccatgtcggctccttcgatataaatctaatctttaatcattttctcactagaacagggctgtttcgaaatttgggtcttagtctttgtgtttgtttttgctattgaaggtacttcctctcctctaatttctccttttcattattcattttattttttttttcgtaattgaatgttatagaatgttcagtaatggtagatcttgttttgtttcggcgaagctgataaatagaagttaattagggttttcgcttttatgaaatttcccaaatttgagaagaaaataactcaatatttataattttaattcattgagtctgtttgaaaccgggttttaaattagtagcattatattaacagaaaaaggcaaaatttgtttttgcagattgaaaatgcctcgttacgatgatcgatatggcaatacccgtctatatgttggtcgcctttcctcgaggacgcgttcccgtgatttagatcgacttttcagccgatatggaaggtatgattcttgattcataatctataacatggcttttcgtatatataaagatatatatttataattcagtagcttgttcgttattttctgcatgtgtacgtgtgcttataaatcatcttcagtgttgtgctgtttgctagtgtcaattgttgagaacattatttgtgcatcaaacagataaccttgacttgctcgtaagttaatcagttagtaagagatatggggattttttttccaccattgtggtggggcaattggatcttcgccaagcatgatgcggtgcttggtttaatgtgactatacatgttatatgatggagctcttagctccaaggtgtcagtgtttttttaacttgaatgattttgttgaaggtttctgggggtttggcctaacctcgaggtctttggtgggagggtggtggccttggtggaaattcttgccccgattgtataggagtgactttggcgattctttctgtaatgttattgcgtgtttttatgcaaatggcaaccattctcaaactggtgtttagcttgtctctgacgggcaaagtatcataaatccaaatcagagtttaagattgatgtatgatgcttactgtttctggcaaccatttacgcagagtacgagatgtggatatgaagcgggattttgcctttgttgtaagttctacttaccttaaatctgatgttgtgttataggctttgagaatgtcagttgttttttctaattaatcatgaaatgctgtttataggtcaaataatgcactgtgtgctgtttgtttggttttttgtgctcactctcttgttaacaggaatttggtgatcctcgagatgctgatgatgcaaggtacagcttggatggtcgggaatttgatggaagtcgtctcattgtagagtttgctaaaggggtaaggtttatgaaccaaattgatcaaatgtaattagtttttaaggtcaatttttcccaagttctccagaagattgttttagttttgtaatttaccttgtcaacttatataaatagaagaatgattttgggggaattatagcatcaatttgtcattagatatattttcagtaaataacttattgtttatctttttttcttctgctctgattaggggcctcgtggttctcgtgaatatctaggcagaggtcctcctcctggatctggacgttgctttaattgtggtcttgatggtcattgggctcgggattgcaaagctggtgactggaaaaacaagtgttatcgctgtggagagagaggtcacattgaaagacagtgcaacaatagcccaaaggagctaaggtaaatcttgtggagacaaatgcagcgtttgttatttcataattagtagctagttagcatattttatccctcaattctttaaatttgtattgcaggcgtgggggcagtctttcacgatctccagttaggtcacgctcacctcgtcgcggtcgaagtcccagtcgtagttacagcagaagccatagttataggtcagatatcttagacattcaactttgttccgaccagatatgtgaaagcatcatcagtgtagtatattgtttttttaactttgtctcttttgacagccgatcaagatcgcctgtacgaagagggcgaagctatgatcgtgatggcggatcaaggagtccagtcccttccaagactaggaaacgcagtcgaagtgtcacacctgatgatatcagccccaaggcaagagatagcatctctccaataaatggtagattggctgatgagcaagacgatgactatagtggtagccctagggcaaggagcagaagccccatcagcccggaacgagatagcccagttggaaggaggttccgaagccccaataaaaccaatggccgcagccaaagtccaaatcccagccccagccccagccccagccctaaggatgatagaagtcctgttgatgatgacgatgagaaccgccattctcctcggaggggcagtgaatcaccttaagcgagtgcaaaagccgttaaaatagatgtttcattagtcatatttatgtttggaaacatactgtggttgccttattatttagcaaagttacttgaactgcgtacttgagatgcttagacttttgaactattgaacattcataaatgtgtctttttatgtgttactttaatagctaattttcagttttgcttgtttggcagtgctatctccgattgggccatgcttgtattattcttcttcacgtaattggtgattttggaggtcggtaatgtctgctactgcctccaatcccgaccgaaattcgaatgtgaagaaggttggatgagtcagttcaatgtaaatgccccaacggggtttacttaaataaataattaggattagagatgcgtagaagactagtgggtgttcagaaaagttttttaattcattatatttatgattgttagggcattcccaaaataatagttagatgctaaaaagtttagaaagtcatcaataaaacacgctctccaagtattgagtgaactaaaatagcgtctaagagcacccatcagcaaatctttaaaattaaaaaaaagaacgagtgaaagaatccttccatcaaataagattttatcttcattttacatatagctacaggattttatcttcattttacatatagctacaggattactgttcatgcttcaaactatattttattaatttatcacttattctctttcctttctctattttcttcattttttctctctgcttcttcgctttcttggtgccaaacatagaaacatactgtttgtacttggagagaatttttttagggcttttattttggtaagat

SEQ ID NO: 264538 - DNA, 394 bp, Cannabis indica
attgctgttcaagctattaaaagttcaattgcaatgtgtctaaatttagattgcttgtcgtgattgtcaaggattgttatcattcctaaacaaagtttctacaatttttgttaaacaatctgctaacaagtccgctcattgcttatttgaagtaagattatatttttagtgagcatgatgctccttttcatttaaaacaattgtacttgcagaaagtttttaaataaaatcatctttattaaaagtatataagaaaaagagtagacatatagagaggaatttcacattatcaatgattttgtgattaaggaagagtaatggtggagaaaatgttgtgtttaattcaacctttcagatcctattacgaggagtttattactactacacttgattt

SEQ ID NO: 264539 - DNA, 977 bp, Cannabis indica
ctcggaccccatcgatcacttgtctcgatttaaccgagtaatgacggtcatgagagtcagaaatcgacgccaagtgctttatgctttccactgatgttaagcggttccgcggaagaatggttcaaaaagttggaaccaggatctgtggactgctggaacaaattacaagtcaacttctggagacaatttgtcgccgcgaggaagattaatctcgaagttagtgccctaactaacatcaagcaaatacccacaaagacattgaaaaatttcataaagaggttaaaggaagagccctcaaaaactaagaaagttgatgaaggacaacagcttgcacttctccaagctgggatccgtaccggaaccctgttctggaacgaattacaataagaaggagccgcgaatctccaagatttccaggagagggtccaaaaatatatcaacttggaagaggcccaaatagtggcctacggaggatagtatccaaccggagtggcaggatatgtacccagagttcaactctcgggaaccctaccttcggttactccacaaatgagcggtatacaattctccgctactcaaggatacagtaagagccaagccttagctcccgcatctttgcactacgagaacgcctccggcgtaagcagacaagtcccgtctcactccgctcagactgcaagcctaaccggaccttctcaaggctcccagagcaagaggtcctcgaaaggcaacaactggacggaggacaagcgccaaaaaagagggtatactccccaatacacccagtacatggagctcacgaactcacaagaacgtgtgtcgtttgccacgaggtaaaatacacactactggagaccgcctcccctgtaccgagatagttcccgaagggatcccaacaaaagatgcgagtaccaccacgacattggacagagtaccaatgagtgcaaaaacctgaaagatgagatcgaaaatttgat

SEQ ID NO: 264540 - DNA, 739 bp, Cannabis indica
tttttttctttcaatttctataattttggtggtgagagtttttcctttgttactacagagattgtttctacttttgaacgaaataaagatgattttttttacaattattataataagaaagtcatgttctgtgaagttctttctaacttcatagtcttcacttttcatttaaattgcttgtgtggaaaataaataaattaaatgaaaatttgatcattcctttgaaaaaaatcattaggggggagagagggggagagtctcctttgaagaaattcatgaggggagagtgagaaagagggttggaaataaatcgagctccattgtaatgaatatggacgtcagagatgcgcccatcgaaagaccttgttttcctttcacatatgtgcctgcatataacaaatccagacaaaagtctcaattctcacatcatttagaaaatggagtgggaacagatcttactggtgagcttgatttgattttactattatttttatattttaagagtttttctttttgtcagacactttttcagaatttttcagatttttttcagtagagccaaaaaaaaatcatacgtaatgaagtccacacttataattatattcctaagactactgcaccgttggatcatcaatcaacgaataataaattgtccccaccataggaacagaattgatgtgcttattgtagatgtatcctatataaatatatatatttcgagttatttgcggcataacct

SEQ ID NO: 264541 - DNA, 1662 bp, Cannabis indica
tttatgcttatttttgcatgtttgttttttgaatatatcttcgagtttgctgtagaaaatacatagaaaaccctaggttcagaaactctgtgattctcctttgtcatggtttcatgcaattttacagtccataatgcttgctttctgaactacataatgctggtctttcatcttgcttattctaagcttcatgaaatttttttccctaactcgagaaattttcaaatttttgagttttgacttttctttgaacatttttattctttaatctattgagtactcctagtcgacgtatttgcttgtttatcgttcgatattccgacgaaacactcatcttgtgtgttgtcatttgtaaatgaacccaggtgagttttgggaaagcgaacatcgaatcgaccaggacctgcttcagtcattgcacgaggaccatcctcgtctttgctctagcctaccttcttctagcgaaggacattctcccttaaatcttttatccagccatgaatgatggctcgtaccaagaaaacaacgagtttggccgacgcatctgatcctcaagtggctcgacgccactttgcccaacgccgaataggatctaatcgtccaggaagagggggatcatgaaggggacgctaaggtccaagagattgaggagtaggacgacgtgcatcctagcagttcctccgaggcggaggaagaagcagaggttaaacccctaagctacggggaatacaatgaggctagggagccggttgatgctgagatagacgtcctggttgagggcgtggactaagtcagtgaggaggttactgctgcggttcctcacagaaggcaaggtggcttgggtgccaggtgggtaagtcctccgtctagggttagtgaggcgtgccttcagactctcgaccagggtggctacctggacgaattggattgctacattcctgcccacaataatagagccacaaaccctgaaaaggggatgtgcacttggtcgggtgctcatgccagcaaggggcattgatgcctttgcatcaatactttaagaatgtggcggacttcttcggcctctacccggcccagttcactcctaagggaattaagtatttgtttgctctcttcgtcttttacgcttcccagaagtggggtatgccttctcccaacaaagttagctggttctttgattttaagtgcacccttaaggaagccaggtcggggtacttctatttctctcaactagacttcaaggggttgacgagcaccgatgactcggtcatcagtaaaattgggcgttttggagatgagtacttcatggtggatggtgcgggcatcactcgtactcagttccagcagattccaacatatcactcccctccctcactcttactcttcgggatagagcttaaaggcttgctcggctaccgagggaagaccagaatattatccagttgacctccgaggataactttgtgaagtacaggctctatccaaaggatttcattcctaagtcagtgaaggggaggaagaggaaatctaatgttgagcgggctaaatgagctcagccggagaatgagctgattcaactgaagcgcgaggctaagttgaagggacgggcaagggccaagcaatatgcttaggagcccttgaatcctgaagatgaagttgagg

SEQ ID NO: 264542 - DNA, 953 bp, Cannabis indica
acagtagtacatactaaaaatgtaaccactcaataatcatctatatagaataactaggtgtggttaattggaggtaataaaatagaagtggtaataagtaagaaattaattttattccatccagtttgttggttgttattttaagtatataatggaattgagttttcttttatttggtgggatgacttatttattttgaaatagaaaaaataatgcaagatgaagaaaaataattgattttttcttatttttttacgcatatgaaatttcattccattttattcatatttctattcttcatttttatttttatttctttccaatctaaacactatagatgtatatatatctactagattaattaatattacgtgcaatgcacctatacttaattattatttggatgaataatgcttccactactacaaaaaagatttattgttttgatttttaagtgacatataaagaacttgcttcagttagtgtaactgacgctataaccgtagacgcaaatagtgatgtttttttcttcagttatcaaccgacgctaattggttatttgcttcagttataaaccaaaacaaaaaaaaaaaaaaaacttttgcttcagttcataaccgcagcaaaaaactagtgcactgacgctaattattttttgcttcggttataaactgaagcaaaaaaattaaaaaaaaattaaaaatcttataattatgacaagattgatgccacacaaaatttttcagtttcacacatttttttcaatttcacataaaaaaatctcatatctcaaatttacaataatctcaaactttcaaagacgggagagcaccaccgcatgtcgcgacaccaccaccactacaccacgacaataccaccaccctaccaccgcaaacttgaaaaaaaggaaaatatcatattaaaaatagagagatcgagagagagagagagag

SEQ ID NO: 264543 - DNA, 813 bp, Cannabis indica
atatagctagggttttgcctataattatagcataaaaactactagtgagagacaaggttatgtactttcccactctaatggagttttaaaaagcttcaaaaattaataaaacttattagtaaagttaagtctatagcatctaattattgttgatgacacttgtgctttgtggaccttaactctcaaataattaataaagcaaaatacaaaattatgttctccaaattgagaattgtcaatatacagtatgttttttacacaccaggctcactttaattaattaattgattgattttcactttttacttgtgttattaaaagagaaaattattggtagatgagtagatatatatcccttttaccgattaattataattaggaatgaattttaattccttgaatttggaaattttgtacaactttttcttgaagtgggaagtctttatttttgaaatcaaatataaagcctttattaatttatcaaattagttaaaaaaaaaaaataattatatatacttcaacaggaacattacttatacagtatatattgaacgctaataaaagtataaacaaccataatagcatattgtttaataaaaagtaagaacacattgtttaaagatgcaaaaaatttacgacaatcatcaatataataacccaaaaaatagcataggttctgaattaattcgaatggcttgcattgctacaaaaacaatccgactccagcttcattaattctctcatggatgagttttgaaaccaactctgaaacacccattctagcaaaacaacccgacttagacatcactaaat

SEQ ID NO: 264544 - DNA, 673 bp, Cannabis indica
tgatataacttaataaatgtagaggttaattttagagataatattttagtcataatataatttttttataattaaatataatttttaattataataaaattaataataatatttaaatataaattattattgtatgtgaatgttttttttaaatataaagtatgaccaattaattaattttagttacaataagtattgtgattaaaaatacatttaatcacaataaattattatttttccataatatttataatatatatactgagtccacaatagtgtgagttaataactttcataataatataaaaaagttagagtttttcgttcctatatctatagctattagatgttatcttttttctcaggccaaacctgtcagctttttttgagcttaggtacagtttggtcgggattgtgttttgctactgtaattcaattttttctactacaattagttttgtctatgtgatatgattttgagtattttaatcttatttatgtgacatagttttatttcgttagttcttatttgttcttcgatggctcaccatcaaatcgctcttagtagttgaaaataatataaattctctacgagtaatgtgattgttagtagtgcaattacgtatcatacacaatagttaagtgcttaagctacgaggttgaatgatcaaac

SEQ ID NO: 264545 - DNA, 686 bp, Cannabis indica
ttttataacataaaggtggagaatggagtaagcaataagtgttatagtcaatttcaatatgcttttaaagagatcctgccgatggaaaattgttttttggagtcaacatatgaggtgaagaaaactttaagttcgatagggttgaagtatgagaagattcatgcatgtccaaatgattgcattttatatcgtaaagagtatgcccacatggacacttgttcggaatgtggtttgccacagtacaaacccaacaagagtaaggagattcgaaaacttactccaaagaaagtcttgtacttgcctttgattccacgactcaagcggttctatcgaagtgcagaaacttctaaaaacttattatggcacaagaaaaggtgagtgaaagaaggtaaaccccgacatcctgttgattcacatgcttggaaaaagtaaattatttgaatccagactttgcagctgaaccaagacatctatgccttagtcaatctgccgatggagtaaatccacatagatctcttagcagccgacatagttcatgccatgtgttccttgttatgtacaaccttcctccttggttggtgatgaaaaggaaatttatgatgctatcgctaatgatttcagggcctaaacaatcgggacacgatatttatatttatttggcaccgttagttgatgacttgaaagag

SEQ ID NO: 264546 - DNA, 846 bp, Cannabis indica
attacaattatagatattatttgaattctcataacatcttctagtcattaaaaaaataaaaaaatcatcaatttccttaaatatttgttacaaatggatgactcagaagtatttttgcagatggtcttttcgatggaacaatttcaaaacattttagcaaaaaatctttagcgtcttcagaaatatacttactcaacttatctttccaattccattttttggttagcatgaatagaacaataacacccacagcccaaatatctgaatattgttcttgaattttatcatttctacattcaggagcctgatactcataagtacctctaactggagttctttcatcattagccatcttcgacgacccaaaatcagaaattttagctacaaagtaatcatcatcttccttctctttgaccaacaatatattatctggttttagatcacaatgaacaatacctttattatgaatacactcaacacccttcaaaattgattgtacataacatttaacttgtttagattcattataaagcggagatttgtcaataaactcgagcaaagttccacccgaagcatattctaagaagatattataaaataatactttattaacattgccatcatcgtcaacatttgtgtcaattgttatgtcgtctccataacattgaataatgtaaggaaaatcgatgagaagatcaagaattttcttatcattgagtgattcattgtactccgaagcacaatctgtgtttgttgttttaacggccataattggatggtagtctttgatacgtgaccctattgtgggtggtttgatcattttagccatgtaaactgacgcaaata

SEQ ID NO: 264547 - DNA, 664 bp, Cannabis indica
aaaaaattctttattcatatatgaggttctggcttgtagctgtacagagaactaaaagcacttagccatgaataaaacagtcagtaatatattaaagttatggatttttttaattaatagttgcaagtatgattcactgatgcccattcttcggtataaagaatctccgttcaaaaaactgatctattaagacatcaaagtgaaggtgttatatataataatgattacatatgatagggaccaatatgaatgaagctatctttatctaacaagtcgtttactataaagatcttattcatattataatgatgatcaatagtagatcggtttaaatcttaagtaatcgtgaatcctgctcatgttagtttcttagagaagatggttcttacaatttttgttttaggaacctaataatgtgaataactgggaacatgctttaaagttatgaaatcctcactttcctaatagatgaaatggtggttccttgtaggttttaattatagaaatagaatgttatgcacaaatttagatgggatctaaattatacttccactagtaaattaatggtactaaaagataaagaagtaattcgaaaggtaaaatagtaatttaatcaaaattaattacgaaccaacacatggaagcataatcactggaactgatt

SEQ ID NO: 264548 - DNA, 628 bp, Cannabis indica
aaaaaattagacaactcaaaaaattgtgagtatttgagctacgcaagaatacccacaagcaaaactgcgagtattcacctaaattgacgaatactcaaaataaaaataacaattagaaattgtaaaattgagtatgtaaaacacaatagaattatagtggttcagccaaaatttggtctgcttaatctattttttgaatgtagttttgttattagtcttattcatatcaaatcactcctttatatagaaagcaagtgatcattcagttacaaaatcgaccagacaagaccgttacaatattaattactcttaattgaaataaaaaatatttgtaaaataaatgaaataacagttttttgactgttcttatttaatacacaaacgggtgcgagtaccttgattccgtactagttgttcgtatttttggtaacacatgaactcgtgggttcaattgagctaccacatatattggatctttggaccgtgtcatgaacacataaaccttttagggtttgtataaatgcatgaacctatcgaggttccatgttatagaatgcttgtgattatacccatcgcttattgggcattcctatattgacaacataggctcatgggtctatcacgagtt

SEQ ID NO: 264549 - DNA, 1148 bp, Cannabis indica
gggtttttgggatcccatgctggatccaggtttgagttttgggtcccaagttcgggtctgggtctacattttggtcccaatctgggtctgggtcggtattctgttctaggtctaagttcgtgtccatgtctagctccaaatcccagtctcgatcaagggcttggtctgggtccgagatcaagtcccgagttcaagtttgggttcgggttcgagtctcagtcctagtctaggttcgggacgttccgatctaggtctgggttccaaggcctaggtccaagttccccatccaggtccgggtcctaggtcccggtctgggtccatgtttgggtttgggtcctaaacccagttttgattttgattcagtttctcagttcgggtttgggtctgggtttgggtcggggtctaactcctagtccgagtctgggattgggtttgggtccaggttcagatcccggtctgggtctagggtcatttcaggtttgattttgagtcccgggtgcgggtccaggtctgggtctgggtcaaggttcatatcaggatccctatctacgtccgagttagggtctaggattgggtcctaggtctaggttcgggtccaggttcagattcgagtctcggtcttggtctgggtacacgaccgtgtctgcgcccgagtttcggtctcagtaaaggtttggggctatgttcgagtttggtcgtaggtctgggtctgggcccgagttcgggtcttggtctggttcaagtctaggtcatgggtcgggtcttgggtcccggtccttattttgttgccctggtccctatctcgattatgggtctaggtcctagttttggtctaggtttgggtcctggtctaggttcaagtttgggtcctagtcgcagtttgggttggggttcgtgttcgtgtcgacgtttgagtcctagtctgagtttgggtttgggtacggatcttgttctaggtctggatcgggctccgggtgtgggtttgggtcctgggtcatggtctaggtggtttgagtcctagtttttgatctcgatatgagtctggaattagttccgggtctaagtcgtgggtttctatcccggtctgggtttaagttcagattcgggtgcaggtcccaggttcgggtccaattttgggtttgagtcca

SEQ ID NO: 264550 - DNA, 1459 bp, Cannabis indica
tttcattcaattttttttttatttcctctcagggcactttttattgtatagtttatttcagactttgaatgtggctagatattatattttttttttatttttacaccacatactgaaattttaaactttttttcttttttactgtggagtggaattttttttaaaaaaaaatactgtgtttttttttttacaaaaatactgtgtaagtttcatactgtgtactatgttaagttttcactgttattttacggttgtttttttagttgttctactgttgtttttaattgttctgttttgttgctttatggtcgttttaagttgttttataaaaaagacaattttttttgtaaaaaatatcatgttgcagtaaaattgtaaactttaacccaaaatctaatatttttgtaaaaaaaaatttctaaattatagaactgttggaataaattttgtctagaaaaataaaatgttaaatgaattaaaataaaatagcataaaatttatatttctcttattttgaaacaagaattaacatttgttaaaaaaactataaataattatatttttttaatgaaaatattgttaatttattaattaattaatatgtaaatcagttaataaaatagtttgaagattagcaggaacaaatcccttactaaactgatgacatgaacaagaacaagtaaaacatgccaaataattggtcgctttgttcccaacttgcttatcaaagacaatagaaatattatttaaagaagtcagtagacatttacaatcagaaatattcaaaccaaacagagaagacattgtataataaaagaatttttacaaaaatactgaatttttagtaaaagtttacaattttattatcacacgaaattttttataaaaatactatttttttataaaacaaccgtaaaataataaaacagaacaattaaaacaacagtagaacaattgaaaaataaccgtaaaataacaataaaaacataatacaatacacagtgtaaaacttacataatatttaaaaaaaacacagtattgttgaaaaaaaaattacctataataaaaatataaaatattaaaaatttcagtatataatttaaaagctcctataataaattagatgaacgaccactttacaatcaatttgaaggaaccacttgataaagggaatgtgatatttaaatttctttaacatccaccgctttgtgtcagatgtattgattatcgaaaaaaagtattatttgattattgtgtgagttagttgttacctatgaaaaatgaaagggcaccaatagtgcctagcacgttctatgtgtcagtatccctattggttgggtcttatatagtttaatataataacttttaaagagtatcgctagccaatcgcaacgtgacatatcgagaaagtattaaatatcactggtgtctaataacaatgctctacctatataaatat

SEQ ID NO: 264551 - DNA, 1531 bp, Cannabis indica
ctttgtttttgtgtgcatattttttcgtggccactctgacactttatttgtttgtctttttgaagcagccaagccaatggaggagcttttggcgactcttgcccagacctatagtcctgactctgcccttcctcctgtgcctgaccagacggtgacgctggggaggtcttcttctagcgtcaccttaggccaaatcgtcccgattgacggagacggggaggtcgaggaggaagaggaggaaggtgagatcctggcccccttggaccaaaaatgcaagggtaaaatggtggaggctatgtcttccaaaaagcctatgagggtggatactccgaccctcagctctgatttggggattccacctgaagcggaggaatacactgtgcctcccagcatcgtccttacccccattcccgcagatgaggagagacatcaactccggatcgccaagcacaattatgctatggctgagtatacaaaggggaatgccgaggtggaggctctgaaaaaggtcttacgagaggcccaggagaattccttgcgtgacgaggcttataggaatgcctgagacctgaacatggaccccctgacggacttgttcaactgctttgttgggcctacccttgctccctatgcctccgagttgacgagccacttcatcaccaacttgacccaactcccggccaaaagatatgcagcatgcgcttccacgaactccatctatgagattcaggatatcagcgctgctatgaccgctgtaagtccctgtaaatgttcttggccttttctttatgacactcggtcccccgtacttactcctttttcttgtattgtcagattgttgcagagaccagtcgcctctcatagactttaatcgatcgtgggtacatcatgtccgagtttgggggcatggacgaggccatgaagagtctgagatacttggcggctgagaggaaggcgtttcaggaggaggcccaacagagggaggctcaggcacagcggaggcatcaggaggcactgaaggccaaggctgagaaggtgaaggctaaggatgacgccctgaaggccagggatgaggccatggccaaggcaaggcgtgagcttagggaggccaaggaggcaattgaagatttgactgccaagctgaagtccctggaagagctgcatcaggttgacttgcagacgacggccaacttaaccgttgaggtgaaggagctcaggaatttccaggatcaagccttaaagaaggcgaaaatagatgagctcctgacccccgttacctgccagcactgtaccaaatgcttcgatgatggcgtctttatggcttggcagactaacagccaaaaccttaagctcgacttctatccaaagcctgaggaggttctcgtccacttcttggacaagaagaagaaactcgatgccttgctggaggagcgcagggggcctcgtcttccaccccgcattgattaagccaatccttgatcaccattgttattatcactatctctttttttttcttttatatatttagtcc

SEQ ID NO: 264552 - DNA, 633 bp, Cannabis indica
atatgggattggcaaacaaaaaaaccatcaaaagggtatggtgattttttttttaaaaaaatctgggtatgaatctgtgctatagtgatttatgtttgtatactggtggtggtgacaatggtggtggtgagacagtggtgatgatggtgagattcgaagaaaggctaattctgattaattttgttttaataatttgttttgagtgaatttattttatttgttacttgtattgccatgtcagctacttaaaattatattcatcgttagtatgatttggcatgtgttagaatgagccacgctggtactaaacggtggataaggaacgaaaccttaatacatgtttagcgtcataactaatttttttttctttttttttaaaaacaaaaatattattttttgaaaacaattaggtttgtttggccttgttttttgaaaacagtgtttagaaaataatgttacaaaaaataagaattttgaaaacaacaaaatatttttttctgttttaaaaaataattcacttttagtcaatactgtttttaaaaaatactaactaaacacgacttgtgttttgaaaacatcaaaaactattttttgttcttatttttaaaacactttttttaaaaaataaaaaat

SEQ ID NO: 264553 - DNA, 3555 bp, Cannabis indica
tcacatattttttagtgataatagagttgatagacatatatatatttattttcttagctgtcacaaaaaccaaaggaaattttacaaaaaaattgggaaaaattattatagtgtagagaaaatatggtagaataaaataatgtaaaaaattaaatatggtcattttatataaaaaaaaattaaaatgtttttaacaaaaatatggtaatatatatagtttacaaaaacgaataaataaacaattttgatgatttaaaaaacttgaactcatgataaatatcaatttaaacagcattttgtacaatcattttgaactatttatacatttttttgagctgtacgtattcgtaatcttttgcattttttttttttttgtaaaatttcgatagatggaaattctataccctatttgacagggttttaaaaattaagattttcaatcaaaaaaaaaattaattttacttgataagaattcgaaatgattgctcaatgtcatttttataagttgcataattttccactcgggtatatatttgagataaaaaatgaatattttttctaaatgtaaatggtggtgatgttcattaaatatttgagaaatgtaactatcaaaatcatagaaacttcaatattttaatcaatcaaaatatttaaaacttctcaactaaatgaagtatatatatgtgtagtagagagtatccataataagcaaattgttaaatctccattaataagaattaaagagaagtatagtagaggagctgtaattaattcagacaaaatatatcttatctccattctcaatctctctatatataatagaatattattataattacatttaaatagggcacatggaattgcagggtgtatgacatgatcgatgaggcaaatgagagagagagagagagcaataatacatatttatctcaagtttatgacaaggcttaattgaccatttttctactatagaaattaaaaagagatcaatattattattattatttttttaaaagattattattattattattattattattattattattatttatttttctttttaaagtaataatatatcattgaactaaaaaattaatgtccaacaatttaagatctaataaaaattaaaaagtaatttgtggcataaatacataaatttaatttctagttgtaaataaatattttagtttactttttgacgataataatacttaagttaaatttttagaacttcgtaagtacctccgttaaataaaagttatatagaacatatatttttatttttaatgtttaaaattaaacaataaaagtggttataatacatttttgttttctaaaaacacaaaaaattaaaaaataaaaatgttacattaacaatgtcatttggtttagtaattaggtagtttagatggtaattaagggtaatcagatagtccaacttacatatatataattttaaggttcttttcttgtgttataatatgacaaattaaactagactgcattttaatcaagtttgaaattttgtgtatatatatagtttgtgactagatgactactactagagaggagctataaggcaacaaatacaaattaaatgaaaggcggcttcaaattctattagtgtgttagtgatatatatacacatatacatatatatatatatacatatatttatgtatatatagctttcagtacttgactacatgggtattggggttggcaagtttagagggaccccttagttggtgttgtctctaagctggtttcaaataacctaaattggctaaagtctttgcccaactttttcccacttaataagtgtaattacattatatgcatgttcttcttcatcactacatctaaataatagtgatataattataattccctcagatctcaactactttgtggtggtgattactcattcattgattaattatcaaataaaccctgaaaatatgcagtctaaaataattccacaatataataatagagtcctatgtgtattcaaccaaacactgtactatatatatatatactcatatgtaatatgcaatatatatataggtataccaaatcaatacaagagtaataactaagatttttaatggtaaaaatggaaaaattaatctaaccaaaaaaatgtagcagaaatagtgtaccagtagtgcttagcattcatctcaattggtgcaattaaacactactactgatataactcataacaatataatacatgtatatgttacatattttaacatgcatgtatgcgtgtatatgaatatagatatataaaaatgggctatatatagctaggaaaataatgaagtagaagatgatgatgatgaagatgtcaattctatatatatatataaattatattttgttgaattggtattaaatgatgaacattatgaaggggaccacatagtatttattagccggttccattagtgagaattgataactcatctctatgcttttgtgtatcattatcgccggtaatgggtgataaatgatcatgggtccccaacttaattcatacactaaattattaattacaaccctactacttataattataattaactttatacacatactcaaaaacccctcatcatatacatataaaaaatatatatacgtatcttatctctccatatatattattccttttttcttttggtcacatatatatacacatcaagttcttgttctctgcaagtcattaattcaactcagtgagttacggtaaatttggttcatcttcatttactttcagtcatgagactcacttttttttggtaaaacattaatgacccaaatatctaagatgtgtgatttttttttctttttcaagttttcaatcaaatcagctttacacgatagtcaaattaaatggggatcgattaataaaaaaataaataacaaaaaaaaaattataaaaataaagttatataaaatttaaatatttttacggtatttaaaattttatttatataaaatattatacttgtcattgttttttttctaaattttatattgttttgatattatttttttattattttcacgtggtaaaaatatatataaaaaaaatgtactaacaataacactttgtgtaaatttccactactacaaatatagtttttctcgacgtttttaaatagttgttgaaagtatttccgtcagtttatataaccgtcgcctatacgaccgtcgtaaaacgacgatggttaaaaattgtcgctaatgtggacttcttgacggtttaaaaccgtcgcctatagtatagggcacggtttaaaatcgttgcctataccctgttataggcaacgattttaaaccgtcgggaatgtaaaaaaaaaaagaaaaaaataacattaaatttatacaataacaaaataaatatatataataaataaaaaagtatataaataaattaatgtatttataccgagctcggagagagagaaagagagagaaagggagacggacaagaggtggtggtggttcgacgtatgagacggagatgagagggatacc

SEQ ID NO: 264554 - DNA, 742 bp, Cannabis indica
taggaggtcggccaagatattttttttttccaggaaggtgttttattttaaaagagtaatgatcaaaccatgttgccaatctcattgagtattggttgtcttgttctttttcaggtttatcattccttttgatgcagcaaaatcggtttccactaaaaaatgatggtcgatgaggtggaactcaaattttgtgattcccatattgattgcaatcagttctttgagtgtggaatgataatggagctgggaatatttgaagtgttcactcttgtatccacatattcatctttttccctgttcatcttgctctagaaggatagcaccccaatgttgatcacaggcgtctgtttgaagaacacattttccgtcataaagaatttgtagaggtggtaaattttgcatgatttccttcagttttttgactgccactgtttggtcttgtgaccattctgaactattctttttaagcatattgctgaatggccttgtcaatacagacagtcggggaacaaagtctcataagtaattgatgtgcccaagaattgttgcacctgaactttcgtgagattttcatctgggaatttgagtagttcatgggctatatgtggttgggcttcatattgtcctttggataatttcatcccaaggaattctatttgcgtctgtccaatgatcatttccttttcagacaacatgataccatgggctctaatgatagaagcaaattgggccaataacgctt

SEQ ID NO: 264555 - DNA, 2185 bp, Cannabis indica
tacacaatatgggatttaaaatttaatttacaaatatatacctttacatttggataaatgccacaaaagtgtggaaaagttaaaaaagccatatttatcaaacttttttgtagaatcccgtatttggtgtaatttttactttttattttagcgagctagtcaatttttattataaaaattaaatgggctccctatatgcatctaggcccaaagcaaatatataggcacaggcacaccctgatttggatggatcctatcatgttactagatttatacatagatgaaagaagattacaaaatttacctgtaacaaattattaagcagagagctcgcatgcatcgaataggggacgcgtgttagcgatttgtgaaatatatctcatatatctccaaggttgccaatcacaaaacaatccccacattgatgagatggattcgtgtcttcaataaaggcaatgagcctaagtctcccattttcttcattgtaattatagaaataaattacgttcccattaaacttcaatctaagagtaaaatgctattataagagctttcgaaaggaataagttattcttattcatattctcacaagtcaatacaatagaaaggagagtaggctactgcgtactaactataaggggttgaacctctataaaggctagtgttttctcttctttatactattcgctttttgttatttaatcattctcaatcgctttaatttgactcaatgtcgttatctaaaaacgagatcaatatatctaactattagtatttttcttagagtaaatctttccttttcttttgtattaatataatttcgaaataacatatattattttataattcttgttttttattttaatgtttattatcatattatttacatttcaaaagaatttttcagatttttataagacaagtctttcttatctctatttcctttattgttgtctccggattaatttagtcttattataaatcttttcttagattttgtttttcttatgccatcaatttcttatttaaagaaagttcaattactttgttcgcctcatatgttataattatagtttttaagtatatatgatagtaagaccatgctgattttttgaactaattttttttgatgattttgatgccttttatacattttgtgctacttttatagcttaccgctaattatttagagtatatttgttgtatggtcaatgaataatggaagtgtttcattttatactcatgacttctacaaataatttttcaaatttgacaaataagtgtttcaagtcttgaattataatatggattgttttaccgtctttattgatattatctatttttttattaaattgtgtggtaatagagttttacttattgttattctgtcggtcagcttttggaaatacctactgttacagagactttgccaagtttattttaatatataatctatttaagagttgttatcttctaactactgagaatttcttatattagtttttaatatcatttgtagggagttaattcactttttaatcttatttcaatgttacaagttgaagctcttttggtgtactgtttgaggaagttataaattaattaatttttattggtgtcatacagctattatagtgtaattaaatagcaagtctcatataaattaaaaaaataatttttaaaaaatattgctaaccaatcgtaaaatatcacttataaaaaaatgttggacaccaatagcaatgttatgcaatatttcatgatcatacttttattcaaagttttttttttttttaagaattcatttatgcaaagttcattctcctatatatggctgttcttttattgcaaaaatgaaaaatctatttctgtttgcattaagcatcattgcttgttctttttgatcacattttatgaatttgcttgtttttcctatttttaatgctacaacgtacatatacatagatattacattagttataatttatattttctatgatgcaaaataaatttatacattacctaacttatagcagaaattcatcattaatgcgtcaatttaaaaaaaaaaaaaaatgagtcgtcaatgcacaatagttttcaaatttattctttatgaataactttttttttttttggggtataaatgaataacttcaaactctctattcagatcaaaattgaa

SEQ ID NO: 264556 - DNA, 706 bp, Cannabis indica
ccgacgtcaagatccgcccggtcgtaagtcgcaaagacctgggccctccggagaaagacctcagtaggcgcggtccgctcgtaggggggaatcctgacccactctgtgagaagctccgggtgctccacagctcggaacccggaggagaagaagaagcggtggcgatactccttaacatgagtttgccgattataagggaccaccccatcatttgaagggtgggcccggaatccgtaaaaaccgtctttaagtttgtccccctttttggggacggaaacaagttcataaaaatacaaaatctccgccggactgggagagccccatccccgggcggagtaaaaaataaacaagcctgaaagcaggcggtaagcttggggaatcagttggtatggcgcaaggccgacaaatactaaaaaattaataaaatagtcttgaagaggaagcatggccccggccatcaggtgcgtctggctccaagccccgaagccgccatagttatggttgggcgtctccgcatctcggggcggccggtgatacgtcccggatgtcgagggtttaattccagccacctccacgatgttctccagctggtgggggcaggttagggtggaatgaagctcagccgcctcccatcctgtggcccgaggtttatacccctcctaggcaacgggacccagcgtgacgtcttcaagggtagccagacgct

SEQ ID NO: 264557 - DNA, 2952 bp, Cannabis indica
tatttgttcaaccgcaaacattttcaggctttcccttacatctgttgcctgtctcaaaacaaattcttgccttatggttgatgaactttgttttttattctatgtattcagtcactcagatttcaatttttttaatgggaaatcacactgttttcttttactgtcatgatatcacatataaaaagaaacacaaatcaatcttatttagaaggaaattcataaaagaaagccatttactttaaggtttcaaataagttcatgaattcatcacttgacaaaatttaagtcactactacatttcccttgttgtcaagactaacaagaattgcatccccttctttaatgtctcctctcagaatcctctcagccaaggtatcttctaagagactcactattgctcttctcaatggtctagccccatagattggataatttccttctttaaccaacttctctttgacctcaaaccccactaccagggtaatgttcttttctttaagtctttgaataacttctttcagcattatgttcactatctattttagctgagcagattcaagttgcataaataccaccacatcatcaagcctattcaagaactcgggcctgaatgttttcctcagttcatctgcaacttccattttcacttgcccaaaaccaaattgatgccctttaagaattacattgttgccaatgtttgaggtcaatatgataatagtatttttaaaatccacagttttacctttaccatctgtgagcctgccgtcatccaaaatctgaagaagaattttaaaaatgtctgtgtgagccttttcaatctcatcaaagaggatcagagagtgcggcctgcgacgaacagcttctgtcagttgtccaccttcatcatggcctatatagccaggaggtgatccaataagccttgcagaactatgtttttccatgtactcactcatgtcaagcctgataatggattctttggacccgaaatactcagctgccaatgcatcggccaattctgtttagccaaccccagttgagccagtgaacaagaagcttgccactggcctgctggggtctcttattccagcacgagctcggcgaatggcacagctaatgacctccacagcttcatgctgtcctaaaattcttttgtgtaatgttatttccatgataagcaacttgtttgaatctgatagtgagagtttttgcaatggaattcctgtccaggttgaagccaaatgttggatatctgcctctgtaaccatcacttgaccttttgtagctacttctgttttctgaagctgagttcgggaaccagcatggtcaatcaagtctactgctttatcagggagaaatctatcactgaaagcaaatatttgaaatgaaaccacaaaacaaggaaacaaaaacatcagaaagccatccctacacttgaaaatgaaaaacaaattacctgatgtaccagtttgacaaacgagccgctgccactatcacctcttgcgaatacttaacactatggaaactctcatatttgttttgtaaaccattcaatatatcgattgtttcttcaatagatggttcaggtacttcaactgtttgaaaccttcttttcaaagctgagtctttttcaatatacttcctatattcatcctgagtagtagcaccaacacactgcaccaaccaatacaagattttgtatgtaatcctgaaacaaacatatatacatgtgcttaaaaccttaaaaatgacaaaccttaaggacacctcttgcaagagctggtttcaagatgttagcagcatcaagagctcctcctcctccagctccaataagagtatgaagctcatcaatgaagaggattattctccctttgctactttcaacttcttgaacaatcttcatcaacctctcttcacagtcgccacgatatgtagcaccagcaacaagtctaccaatctccaaagaaaatacctgcatcatagcaattttctcaagaaaaatgacaactctaatgttttaactcccaaatgtataaactgtttataccttattgccctgaagtttatttggaacttgagcattaacaatggcctgagctaggccttctgcaattacagtctttccaacacctgggtcaccaataaggcaagggttattttttcttctcttgcatagtatctccactatgcaaatatcaagttagaatactgaaattcatttggggtttacctcttgggccattttggtcaaatctaaaccatattgctgaagagttggaacataaaactgctgctgttgtaaacaagcttctccatttcacatacaagttgatatttgtgttgtgttttgtaaagatttatctggtatagtacttcttttatactatgatatttacacattactgtctcttgggatacattggtacctatttcgaagaggggctttgttttatcatagtggttgagttcaaagacttttgcttatgtgacttgtggtgtttcagtattccaaactaagagattggattcataatagtataaagggggattgatcaagcattaataaggaaataatgattgtacgttgttatactaataattgagaaaacaaactcatttaaactaaattgtatcataaatgttcccaaatatcatttatttttatttaaaaacctaaaaaaaaattacaagaaattaagatgaaatttatcttaatatatattttctttttcaaaaatagaacttcattcaaccaacaaacaaattacctattttatgtctaaagatttaatataaaaaatttaaaaatgttatttttctctaatcagtgaatgagaatatggaatctgttatagtttatttacgttaatttttgggcttattaaaaacattttattcgggtttaaatgtgtacaagaattcttgttttaggcaaaaaaggctagaaaaatatat

SEQ ID NO: 264558 - DNA, 525 bp, Cannabis indica
tttaattaaaaatatctattttaataattttatacaaggttaaatatgtaatgatatttttggggtgtaattataattttatggggtgtaaatataacacccctaataatatagtccataagcacgcaataatattaaaattacaattttactcttctcgggtcaaaattaccaaaatacccctggctcactaacgaagtcttaacatatcacttatcagtataattcacatatatttaattatatcataatataattccatataaatacacatttaacttgttagggttcgctaacccgttctcttaatcttagggtattgcactatcgggttgttggcgtttgatctcacaacaagcttgtccttctaactgcgtaatatgcaagacactcattgtaagtgtttacatacgtatcatcatcaatattagatgcatcaataattccagagaagactcctatatcactacaggaaaaggcctttttaccggcgcagttcgttaaatgcgccggtaaaagttgtcg

SEQ ID NO: 264559 - DNA, 765 bp, Cannabis indica
tctacttcccaaaaatttaaaattactcaaataatatttccaaacactcaacaccataatacaacattagcaaacccaatatcaacaatatttttcacaacacacaattattaccacccaaaatctataacaaataaatcaaattccttaaagattgttagaagtgatacttacaacccaaagaagctttactccacctccattgttgaatgttcttgaaagcttgaggttgaagatgaagacaatggtatttcggatttgggataatatgggtgatttttggtatagtttttgatggtatgtgtagattgatgagtgaaattgggtttttgaatggattgggtttgagaaattgaagaaaagatgaaaggattgaagatttaggaaggaaaattttgaaatttttgaatgggaggggctagggtcggctgagaagaagaaggtttgaatttttggtgtagggttgaatggggggaaaattgggattttatagaaaaagtcgtgagctagtcgcgactagcttaagttcaaatttatgctgtctctggaaaaatggcaagtcgcgactagggtcacgacttgcaatgaccctagtcgcgacttctgggagttaaaaatttcctcatttctataaagtcccaggtcgcgacctgggtcgcgactaccaaaaagggtcgcgacccaggaacctggtggtcgcgaccactgagctcctggtcttaaaaataattttttttttcacgtttttcacgattcaactggaaa

SEQ ID NO: 264560 - DNA, 636 bp, Cannabis indica
ctaggtccaatttcagttatgattccaagtccaagtcctagttctagtcccagtcaacttccggttttggttccaattttgggtttgggactgggttcaggttcgggtgtgtgttcgggtccttgtcagggttcgggtccaaggctgtgtcccaaatccaccgactatgggttttgtccaagccctaggtccagatccagatcccaatctcgggtcccagtctagttccatttctggtgccaagtcacgagctgggtcctaggttcaaattcgggtctgggtcataatctaggtcccggtccttgttctatttccgaggtccctatcccgattctcggtccagatcccgattattgtgcaggtttgggtctcggtctaggttcgggttcgagtcctagtctcggttcgggtttaggtctctgtctgggtttcaatctaggttttggtttgggttttagtccttgcccttgtcctagtccttgttcggttctagttcaatttgtgattctgagttcgagtttgggttttagttcgggtcggaattcgagtccttgtctgagtttgggttcgggtccagatttcagtctaggtccaaatcaggctccgggtgtgggttcgcgtcctgggtcttggtct

SEQ ID NO: 264561 - DNA, 1288 bp, Cannabis indica
gtacttcttttaatggcacgacttcagcccatttagagaagtaatctgtgatggccaaaatatacttatgggctttggaagagggtggcgtaaaaggaccaatgacgtccattccccaagtttcgaaaggccatgacagtatagaaggatggagtggttgagggggttgatggatgaaatctccatgtaattggcatgacttacaacatttagcaaaattaattgcatcttgaaccatagtaggccaatagtaacccaaccgctttaattgagctgacaattttgggccagcttgatgggcgccacatgtaccggcatgagtctcttgaagtgcatgtgccgcttcttctatcgagagacatctcaataatatcccatcgaatgaacgcttgtacaatgtgtcattaaagaccacaaatcgaggcgctcttcttcttacatccactcttttcttcaagtcttctggcaagactcctttttggatgtagtctttgattggctgacgccagtcattttcatttgcactatccaggaaagttatcaagttgactgtattttcttcttcaactctttccgtagattgggataatacatggcgttcccctatggtaatttggatatccctttcttcaggaagtgttagtgatgcagctaaattagccaatgcatcagctttaccattttttgatctggggatgtgatttagagttatatcttgaaattggccaagcaaatatttagccttttcatgataagggactaaattctcatgcttgaccgcaaattcaccactcatttgtttaataaccaaaagagaatcgccaaatacctccaatgattgtattttcatttcgagtgcaacttcgagaccgataactaatgcttcatattctgctacattattggtgcatatagatagaatatggaaagaataaggtatcaggcctcctgacggtgtcacaaagacaattccagcacctgccccactacttcttacttccccatcaaaatataattgcaatgatgaagtatcaactgtgaagacttcttcgtcaggaagatcttcttgcaactccatatcatgtggaattgggtgtgctgccagaaaatcagccaaagcttgtccttttattgctttttgcgggacaaagttgatttcaaattctgacagcatcatggaccatttggcaagttgtccagacaacacgggcttggatgggatatatcttagagggtcagcttttgacactaaagtcacaggatgtgagagcaaatagtgtcgtagttt

SEQ ID NO: 264562 - DNA, 2699 bp, Cannabis indica
aatgggataaaaacattggacaagagagctgaaaacatgctcaatcaattcatgtacgtttatgaactttttcaaaaactggttccagatgttcgtaaaacaaccataaaataacataaaaacaactgttttcagagaactcaaaatttaatttttgtaactcctctccgaattaaatattccttcaacgtctcaatacccatttaaatgatataattgagtattgtaacagtttttaaatacaagaaacttatcccatttattccataacttccatatgtaattactcacttaattacatgtgatccttaagttacaatctatttttagatttgtaacttctcatatgttacaatttttatgtatattgttatactatatatgatataatacaacctccaacacataatatatattaatctcgtattaatatataatacatcacatttaaataatttaatccatattatattataacaaattatataacatcttcagatctacatggattgcatcaagcttagtcgtttcgtttttttttttttgcatcaaaaagaacaatgtatctcttctcatacaattctctccatataataaatatatatacatatatatatatatatatatttcccatgggcatatatctaatgactaaggcttgaaaagatatagagggaaaaaatgtaggaaaaaaaatgaaaaaaaaccttatttggtatgaaaagaaaatttttatagaaaaacactcaatttaacaaaaattttcatttgaaataacttgaaaaattaatttttttttttccacacttttattttttcctactcttttcttttttcaccgaaattcaacttccaaacataacctaaatattttgaaattaatgctaatgcatgcatctatttccttattttctaatactaatagttttttatatttaccaattcattgatatattctttagcataatcatatgatgggtttgctgagatatatatttatggcaacttacatagtccatatgtacataataattcgagtaaaatgttgtcatgtcatctaacaataaagttaggacttcttcgcttgaaaagaagccttaacttgatgttctatttatgcaatattaaggtgtggaaaagatttagaaacattgaaatataatgattaaaaatagaagattatgacaataatattttttaactaattgcgcttatataaagtagaacctattatgtagactattatttgtatgtgatgtttgtgtgtgcacataccattaaaataaagtaataaaaaatattaggcatcaagttgttttaataagtaaaacacaaactagctacttaagccctatgaatcttcaaaacattcattaattagagctgtgtataagaatacgattttactttattttttaagtatgcagcttattttgtggaccagattaagaatttaacacacattattaattaacaagtgggccaatttcttgagtggaaattctccaaaatctagcaaatctggaggaaaagcaatatatattgatgtcaaattttttggttgtcgaataaggcttgtcggaagttagttaactatgctcaattttagttaattaattgttcaactaaaaatgctagacatttttctaaataaaagtatattttacggtagatttggcataaccatatagatatgatataagtttcactattacattaaataagtaactatgatagctccatttatttttagcagttaaataattattagacaaattatgattaatttaaaaatttagtaaaaataattaataaattacacgtacatactaaattaattttatttattttttaaaataataaaataaaaaagttataaatattaatatttgaaaaaattttattaaataatttaattaaaaaattaatttataattttaagtatgtaattaatctaagtcgaaaataaatattttaccaatatgttactcgaggtcataaaaaatgtaactattatagttacattttgattgtagcgattatgatttatatatataaatattatgaatatgattttcaaattgatgtcttaccaactacataaaagtcttagtaagatgtttagtaccattataagttggtgtaatatatttatatttatatgtaaacaaaactacaaagaaattattttcttcatgattcagtatgatgaaaagtaatatatatggtaactcatgaagctcatgaagaaaatatgataattttttggttatttatttatgggctgatatgggatcatttgttatatttttttaaaaaataaaaaatatatttaaagtttaaatttaaattgtaatatattaagaagagcaatattttttagtatatacctaaattaacaagtattctttaatattacaactcttattgttagcatggaactctttgaaaacaattttcccccacacgtttagctttgaaacactagaaattgattcacttttgttagagcacaaagaataaagaggactttgtgttaagatagtcagtttatttagttaggtattacagttaggttgttatacttttctgttatgaatgtcatcattccctctctgcttatataaggcttttttttccactttgtacatttatccaattcattaataaagaattgttctctctctttctctctctct

SEQ ID NO: 264563 - DNA, 1717 bp, Cannabis indica
gtgtattctgacccaccatcttccccgtggcttctttcgtgtgtctacggccctccatatatgaatgctaagaaaaaattctggtctgagttcttgaaattaggggatagatttggtgggccttggctaattttgggagatactaattttgtcctgagtggaactgaaagagaaggctcctctggccgtgatcccttcatcccggtcatctctaagctaattgagagtaaagggcttatcaatatgcccattcaaggtgactttttgacatgggataaccatcggtctgggaggcaccatgtgaaatcagctctggataaaggcctagtgaatggcgcctggatgaggttatttccaaaggctattctctatactgtccaaactaccaactcggaccacagacccctctgccttcactctgacggcatggagtccaagtttaagagaagtttcaaatttgaagaaggatggacccgtgacgctagaagtaatctggtggttgcccatgcttggaattcggtcacccacaattgggctcctgctagaatatacaagaagattggtgccaccagggtggccctcctcaattggaatagatcccaatttgggaaattggatgtgaccattaaagctcttgaacagaaactcaactcccttcaaagtctccctgctggctcccgggactggaatcaggagcgagaagttcgtcgagagttgaatgaatctctggaaagaaaggccatttactggaggcaacgagccagagtatcttggctcaaggaaggtgataaatgttctaagtttttcttcctatcggctgctattaagggaagaagaaatgccattgagagtattttaaacaaagataatgtctggatctctggcagaagggctattgggggtgaatttattgagtattttaaaggtatttttgccggggttgacagtgatgttgagtataattgtgcccagttatttcaagagagaatttctcttgaggattcggaggccctggtttgctgcccgagtcatgatgaaatcaaaagagttctatttgccatgaataaccataaggccccgggccctgatgggatgtctgttctgttctttaagcactattgggagtcagttggagaagacttctgtgatgcggttttagatttctttgtcactggtaatatgcataggggaattaatgccacaaatgttgtgctcatccctaaggtccaaaatccgactcgaaccactcaatttagacctatctctctatgcaatgtgatttataaggttatctccaaaattattgcaaacaaaataaaacccctgcttcccactcttatatgtccgactcaagctgcttttgtccctggaaggaacatccacgataacaatgtgattgtccaggaaattattcattcgttcaatcggaagaagggcaaggaggggttttttgcaataaaaattgatttggttaaagcctatgacaggttaagctggaaattcattgatcatgttttggattgcaatggaattccccagaagtttcgtctgtggatctcgcagtgcatctctactacttcgctaaatatttgtctcaatgggggcccggtgggtagtattaacccaacttgcgggattcgtcaaggtgaccccctctctcctatttgttcatctgggctgttgaagttttatcaagactgttccatgttgcccttga

SEQ ID NO: 264564 - DNA, 879 bp, Cannabis indica
gacttgaaccccgactaggtcctggactcagatcgagacctagaacccagacatggatgggggacttggacccgggacacgggcatgagaactaggattgagacccatgacccaaccccagacccggaccttgacctaggacccgaaccgagacctgggacatgaagtggaactagatagggacccgagatcgtgacccaaatctggacccggggcttggacctaacccgtagtcagtgtttggatcaaggacccatacccaaactcaaacccagacccaaactcggaccaagaccctgaccctaacccagacccgtaccccagacctgggtccgagtccaagtctacgtttgagtccaggaaccggaatctgactaggacccagacccagatctggaccgggacgcggacccgaattaaaactcaaataacgacttgggacacaaacccgaactcagacacggacttggacccaatccaaaacccaagacccggaccgagattggtgactaagacctagacccaggagcccgacaaagattgggggcccaaactcaaaattagaactagaatcgggacccaactgggactggtatccaagacccgaccccggtctcagtcctaaacccagacctggacacgaacacagaccaggatttagtatccgaatagaaattagactaggaccaaagattgggatatagatcatgactcacgaccggggccttgactaaacccgtagtcggtgtctagatcttggaattgtaccaagacccaaacctggagtaatttttaggctaggacccaaaccaagactcagactcgcgacccgaaattggaacaagaaccggaatgaagaccttggaacaggaattggac

SEQ ID NO: 264565 - DNA, 691 bp, Cannabis indica
ggtattgatagatgcatcaactagatggtcacatgtttgcttattatctactcgtaatgtagcattttgcaagattgcttgctcaaataatctgattacgagcacaattcccagactatgcaatcaagacaatctgtcttgataatgctggtgaatgtacatcataggcttttaatgattattgtatgtcaatagggataaatgtagaatatcttgttgctcatgtacatacacaaaatggtctagcagaatcattcattaaacgcctccaattaatcgcaagaccattacttatgagaacaaaactcctaattttagcttgaggacatgctattttacatgttgtggcacttgtatgcattaggccaacatcatatcacaaattctccccattacaattggcttttggtcaggagccaaatatttctcatctaagaatctttggttgtacagtatatgttccgattgctccaccacaacgaacaaagatgggtcctcaaaggaggctgggaatatatgttgggtatgaatctccatctatcattaaatatctcgaacccacaactggagatatatttacaacacgttttgctgattgtcattttgatgagacaagtttcccagctttagggggaggggaaaagaaacagctggaaaaagaaattaaattatatagaatgcacaatcatta

SEQ ID NO: 264566 - DNA, 477 bp, Cannabis indica
tatagtaataaaataaagagaaaatgtaaaaatgtttaagtaaccgtgtataaatatatatgtaataaaaattctattttgtatttatggtgtaaaaatttataatattaatagtaataataacaacaagaacaatgactatgacttgacactaaaattaaattctcttctgtcttctcttcaccttacaaaaaagaaaaattgaatactactcttgagtttcttgttgttttttttttgttgctaaaaataaataaatatctcaaatgttatttttctcatttatacattttaatatatattttttcatttaatttttaataaaaaattacaaatataaatgcccaaatcaaaactcacacagcaagacaatcaaactcaattcatactttatattgcaacccaaatcacaactcaactcaaatcaaattatacatgagaaaattatataatatatctattttaatttttaccttt

SEQ ID NO: 264567 - DNA, 704 bp, Cannabis indica
attggagtcatccaggtgacttcatcagcagtatttatttccatgatcacttcttgatttatcattgggtgagccaatacatccaccggaattacatcgagcaattcgacttctctagtcgaggccaaacgggccaatgcgtctgcgtgtgaattgcgagcacgcggtactcgagacacgactaatttcttgaatttttgcatcagttcgcatacaatggctagatacttagccaacctcccgcctctggccagatattctccattcacttggcacactacgctttgggaatcgctgaaagcctgtagatactcgattttcatctcgagagcaagctttaaccctgcgattaaagcctcatactcggcttcattgatagatgtagaaaattcaaaacgtaaagcagcgtgtaccttaaaattgctgggactaagcagtaggatttcgccaccagaacctttgcaatttgaagccccatcgacgtacaatgtccatacttccccattgggcatagcaatgtcaaccttgtcgtctatgaatgccacttcggtgtttgggaactcgaggataaaatccgctaaggcctgccccttgatcgtagtcctcggtttatacctgatgtcgaattggcttaactctactgctcatttcaacaatctccccgacgtctctggttttgctaagacttgcctcaaagggtagtt

SEQ ID NO: 264568 - DNA, 613 bp, Cannabis indica
ggcaatcgagcttgtcgcacttcggtgaaaggagaagtcccatgcagcttgtatatgggctttctctactgctccgcagtgaaaggagaagtcccataccttgatcgatactcccggttaaggcagtattgacttgtgttgccgtaggcatcgttactactgcggcgatgttcgctgggatattaactccagtagtcacagctgctgcggtaggcggttgatacgattgtttacgccctgatcacccattcggggatcacgaggctcttcgacatcccgaggcgtctggaagtgtgccgtgaaaaaaacgttaaggtgatcgcagagatcgcccctgtgaacctgatatcgccctccttgcagtgtttccaccgagcctgatctagtacctgctgggcgtgcagccatgcgagaatgaggaggcggattcaatgtcattgtctcccgattggggtctgctgcgaggattacgtcgttcaggatcctcctccgtctatgcctcctgattgaggtttctcacggattgatccctcgacgttggctggttcaaatcgagtccctcctgattggccctccgttccctgcgagtcggttactacgacgtctagaatta

SEQ ID NO: 264569 - DNA, 726 bp, Cannabis indica
cttcagcctttaacgtgatgcttggccaaccagccctatatgacttaaaagttgtcacatcaatatttcactcgtgcctgaagtcccataaaaagaatggggtagggtgtcttagaggaaaccagcaatctgctcgggaatgttacaaccttgcagtggccaaggctaagaaggaaatatcctccagccatagcccagacaaagaaaaaaacattcccaaggcgaggatgaagatgtggatcctcgacttggggacccaagcagcaatgttggacctgtggaagaattagaagagatcgagatcaatccagctatcccggccagaaagttaaaaattggaaagggtttgttgctcgaagtaaaatcagagttgataaaatttctgagcgcaaacctagatgtttttgcctggtcacatgtagatatggtcggaatcgacccttttattatttcacacattctgaatatcgatcctaacatccggccagttcagcaaaaaacgaagattgctggataaagaacgagcagtagtcctgaaagataaaagttgaaaagctgcgacaacaacaacttcataattgaagatttttacccgactagggtcgcgaatcccgtactcatgcccaagccgaacaagaaataacgagtctgtattgatttcacagacctcaacaaagcatgccctaaagctaatttccacttccaaggatcgatcagctcatagat

SEQ ID NO: 264570 - DNA, 1354 bp, Cannabis indica
attattactttatattttttaataaattattaagtgaacattaaataatatattaaatttacatcaagatttacaattatgtattggagtacaataataaaagttgaatgtaaaaatatttacaaaattattttgttataaaatatagctaaaattaaaatttagtcacagaaaatttatattgtgattatcactaaaattaaaatttttgatagtatattatcaataatactaaaaatcatattttcaataatgaggtgataatattgataatatatatagtattaattaattaataatttagttattaattttccctttgttttaacatcttcatttcagttcttgtcaaaattatttatacctattttttaattctttttaaagaaaaaagattgatggaccaaaaaaaaataaaaatattatttattgaataaaattgtagtgcgctataactttaattctcctctattatattatatttagaatatgattccaatagaaaaattattctagctgtaattctttcaattatttcttgctttttatgacaaaaaaaaaatacaagaaaaatcgatggtggaccttctaaaaaggggtgttttctaccttcaaacagttttaaaaatgtattgtagttatttaatatattttatataaatttttctaaaattttgaataatgtgtaaaggttaaatataaaatttaaataatttgttacatgcgtctttcttttattttatatgagtatcaaatagataatttaaaccttaatttttttaaaattattcttaattatttcttaaaactttgcgtgatattgaaaatacggcaaatgcatcaatatatttattttagagatgcactataaaaacgtccaaataaatattttttaaattttatttctttaaatcacccatgtttctttaatggattaatcatggaaagctagctaagctatgttatatgttgttaataacaccttaaacttaaaattctttatataataaaatatataagtttgtagaatttaaatattatttgtaattacataaatattatgataataattgaacacatgtgacctctttgaaaagattgtaaggtttaaagttcaattattgtatagctgttgtgacacgattatataatatcatgataattagaagcatattggatgtatccttgttgaaatacaagaagaagaccaccgttaagactgttttgcttatgtgtcatatttagctcaactatctgtaacggttttgtataaccaatttctgtttcttttctttcttcttgtatttactaccagtataaataaaagctaaaggccaatctagtttgattgagc

SEQ ID NO: 264571 - DNA, 734 bp, Cannabis indica
tgtttatgtttaattattttgtaggaattagatttttatatgatttttattattaatcggttttgtaggaattagattttaagttttatgtgtttgttaattttgtaatttttttaatttaaaaaaataagttttatttaatttttaaatatataagaattaatgataaaaaaattgattatatttatttttgtttattttttatatttttaaaattatttttaaacatttaaataataaataaaaaaaattaatgacatggaccaatgaacgagtgacacgtagatactaacctggcacataacggagaggtacctacggaagttccagaagtgtgacggaaggtatttttaccgccaaaaatacgacttaggtatttatctgctactcgggataaaacttaggtatttatgccgcaaattactctaactaaaaaattatttcagataccaaaacagatacatgaccaggatctcttgtatttgtaaatactcgtcttaaaactaaatatccaatgttgaagagccttgaccttactcttttattgaagtgtcttgtgatcctttgttggtatgtaacatttctcacttgagattcatctctcatttcatctagcaagtccatagcaagtccatggattcttcaagttattctgggttcttatcttgattataaaactctcgcctatgtgatgaaatgttaacttcgaatggaagcattgcttctgagccaaa

SEQ ID NO: 264572 - DNA, 521 bp, Cannabis indica
acattatttggtcactcatttaggtaaaattctatacatacaagcaattataataacgccaaattcttagtttcaagctccaagtagttttgaacttcaacatccattaatcagcataaaagttgaaaatggtcagattgcatcttcaagataatcacccttatatcactaaacaatcatactataaatatcatatacaaagatagagttgaatttagttgagtccactaacaaattaacagtagaactcgataccacttgatgtgtgtgggcactcactcattcactcaaggatttcaaaaatttagagaagaaaagaaaagggaagaggttcggcctatagagaaaagatagaggctcagttttcatctgacagaagttcaagtgtgaatgagagccatcactatctatttataggtaaccacctaggtttaggttgtggccggccatgggctttgataatgggcctcacttatgcaattttgctgttttatcattcatgcatatgattttctcaaaaa

SEQ ID NO: 264573 - DNA, 581 bp, Cannabis indica
tgtatatagagttagtagaattgcatatacacattcttaataaacatacaataatggaagtcaagtttaaatgggttgaaattctagtcttttgtttgaagtgcatattgaataatggaaagagagtttgtattttgagataaattactttggtctaagttttttgatttgtcatccaataattgacttgttagtttttgtttctttttagtttttagttttagttttatttttttctaattgcttgaggacaagcaatagtttaagtttggagatgtgatgagtgcacatttgtacactcattcttagtcaattattagatggattagtatttatttttgtatagatttgatgtgttttctttaagtgtgtaggtttgtgctgaaaagatattttgtgatggactgagatctttgagttaatttttgacaatgatttcatcattttctcgaagagcttataaaatccataatgatagagctcgttcccagctttccaaaacatgttaaatcatctcatttggagcccggacgcaaaagttatgcatgattgactaaacaaggtcgaagcaaaaaaatttt

SEQ ID NO: 264574 - DNA, 882 bp, Cannabis indica
ataacttattgataacttagatgtcaacaaatttaactaaaatattatgtgatttcttttactttattgtaactcatgagtggttaaatgtatattatatagttttatttgaatattattgtgaagtatactaaacagaactatttaataaatatatattatatgatagctaattagattttacaataaatttaaagtaattaaaaatgtaattttaaaataagtaattagcaatttttttttatagaactaattagcaatttaggtgtatacatattttgctaataagtcatgtgagttttttttactttattaaaacttattagtttattaaatagacttggaggtaacataaatattgttacaaaagaaaaaaaaaagtaacataaaagtatctaaaacaacaaaacaatgtaatataatctaaaaaataaacacatagctttcaaagtaaataaaatgtatataaaatggtagcttgttatattacatgtcaactcattagttttgaaataaacattaacgtaactcaaatgaattttaaataataagataccataatataacttaaaaataattaattgattattaaaatgtatacaaataaattttgatggtaatcaaaatgtatcttaaattatatgatatataaataaaaaaatttatgtaaaggtcactaatcagtttcttattagcatcataattaaaagatttttaaaaacgtaggaagaaaaatgaaaatttagaattaatttcatttcatgcatattagtttgaaattaaggtattttttgatgatgtggcaaggtattattgtaattgagatttgttaaggtatttttgtaattagtttgtatcttaagtatattattgaaaaaaaaa

SEQ ID NO: 264575 - DNA, 1065 bp, Cannabis indica
agattgttatggtgaagaatgtctatgacaaggctaagtcgttcattagtactatcaagacggttatatgcttcattaaggtttttggagtaattcttcatatgttggatgatcaggttgggtagtattgtgttgtgaagtaccacttgcaccattaaaagaccgcccccaccctcgcaagtgtacagaacgacgtccaagaatacgttccataatatttttatcagacaactcttctggagtgtgttgatcccttaaagctttcatttcattctaagtatataattttattagttagtatttaaacatcataaaacttatcaaaattgtaaatttaataaataaattacttacatataatgtctcaacatctggtccagtccatcccttttccatatcataatgtttcaaacgccatgtttcaatttgacctgtggaagaagctaagtccattccacgtcgaatgtggtgtcgtggtgtagagactgatccatttcttgattcccacttccttttagatcagttgttagtattctttaatgctctttcctaaaataaataaataaataaataaataaactaatgagatgtaacaataatttaaaagacaacaatacattagattattaacacagtgattgtagttgaaacataaagtaagaggttgtttagtgatataattagagcttcttcaaaacttttaaaaattaaatattgaacaaattgaataataaaaaaagtttctcattggcataacatatgttaaccatatatccaataaaaatgacagcatttaaaaaaattagactattcatttgtcccaatgatacagaaagacgagtgaacctccaagcagatgatacaaataatacaataactaagaggataaaatgaaaatcaataagaacaactcataatgacataaaataccaataaattctatttttgcatatttaatttcaactaatagaaatgacataattaatttaagtcctatcagattagtttaacattacatataacaaagaccaaaaaataaatgaaggccaaagacagtttccaaat

SEQ ID NO: 264576 - DNA, 425 bp, Cannabis indica
tacttgtgagtagatctaagatcttggtaaaataatttccaacactaacctcgatcagctaggctgtaatgcactctttccacgcacatcagccctcatgcgcgcgcaggggtatgcaatgcatacctctatgcccaatattttatttgtgatattttttaattcaaaaattatttttcattgaaacaaaattcaaattttggtaaaattttgtgtagattctaaattttcaaataaaaatccaattatcagaatcaaattaattttattaatttttaattaattaaaattatttttagatatcagtagcctctaaatttgaaattttaatttttccacaaactggccttatggttaattttgaattttttttattattttatttgttttatttattttaattaggagatcagatatattatttt

SEQ ID NO: 264577 - DNA, 640 bp, Cannabis indica
cctaggttgctcttcctgggtttttgggattcccctagtttgtttcctgcctcctggtcttagagcctcgaggtcttcctcacgatcttcttcctgtaggatcaggttggttctgaggaactgtcccttgtgcggccctcgctgttgcaagctctcgttccaactcagtgttttgtcggtttgattcagccaaacgttgtcaaagttgcctatttcttaactccaccaacaatacgtatctagttaggtcataagcatcctcactcctaggcacatatctggcagagttattggcaccttcgctcattctttatgggatttgatcaccattaccatcattcctccttgaacgtggtgtttcagaggtgttgggtctttgggatcccatgggttccttgccagggcgatgggttgtttcctcaggttgattactattgtgttgatcatcaccagccattgaatatgggtagataatgtttataaggagggatgagtttttatcacgaaggccctcaatgaaagcaccaaactgttgatgcagatttttgttaaccaaattattaaaatttttgtaataaattcaccacagaaataaataagttataaatgataaaataacaccaaatattttacgtagttt

SEQ ID NO: 264578 - DNA, 672 bp, Cannabis indica
tgctgaagcaatgctgaagcgaaatcagtattcaagcagtgacgtggaaacacgagtttcacttatccacatcagcaaattcgtcccagtcactcaaaatacaccagctggctgctgtggaatgaaggggactaaacctagtgggccaaagtgcaaaaagaagtgggcttctcatttttgggagtgattttgtaccttaggaaccaaacaactaaaagggggaaagaaagaaagtacatatcttcaacctccattacgtgagcagagctgctgcattttttttagaagagaagtaaatgcagaaaaagtacagcagaggaggaagagaaaagggggtccaagctttagtgtttgatttttcttttaccctctcttaattgttttctttctctttctcttttcttgtttcttttacttagatattaaaacttgttaacttgtaaacaaagggcagcagccatggatgaatatttttttactttggattttattttcttacttgaatatgagctagacttttgaggcttgaatggctatgaacttctatgttgggtatgattaatttttaagcttactttagcattttttttgcctttgttcattcaagtgagttttatttttatttgattgttgttccttggccatgaataacaatttgctaagctagatctt

SEQ ID NO: 264579 - DNA, 644 bp, Cannabis indica
aatctatcggaggttgtttttttctctggccaggcctgccgaccttccttggacttaggcgcggcttggttgggattgtgttttgctactgcgtttagtcttgtctgtgtgacatggtttgagcgttttagtcttgtctgtgtgacatggtttaagcgttttagtcttgttgtgtgacatatggttctttttcgtagttggttcttctttgttcttcaatagctcgccatctaattattattagtggttgagaataacaagttctctgcgactaaaggtgttgttagtactgcaattacctaccttacacaatagttaggtgcttaagctacgaggttgaatgaacttgctgcaatagtttctactgttgtattttctgaatggtggatgaaacagactatgtgttcttaaagttaattgtgatgctgcaatatttctcatttgattttatttatgattctattttgtcaaacgattcaggaattaaatagctgattatttgattcgttttttttaattctaatcttagttgtgtctctaaaaggggaaatatcttgattggattacaaactattattttagttgattgtcattaataaaattctatgatttattaaaaagaaaacttattattattattatta

SEQ ID NO: 264580 - DNA, 702 bp, Cannabis indica
ttcatgttatcttcaattgcttgggaatcagacattttatcttcatgctcaaaagacatatgcaatttaattttattttttcgagaaaaataatatacaaattagatgaaaaaacaaataaacatgtgctttacaagaatttaaaattttcacataagtttcttgtgaatggttgaataggtaaaattgtatctaccaattatttgatttacatatatattctatatataatatcaatgtactacacgttgtgagaatatatatgacaacgattaaattaggtagtttttataatgtagcttaatatggaatctcttattattcatatattgaaacatacaacttaagggatccctttgtatatagggcacgcagcatgggcggacctagaaaacatttttagcaggcgtattctttgtttttttttttttttttgttaaggtctaacaggaaatattcaaatacaatttaagtaacaaaattagactaaaaagcctttagcacattaggaatatgctcccatacttagtcagaggtctagagttcgtctccacatatccttaaaattatagtacattttcttaataaaaataaaagataaagaataaattattagggtagtatttgttgaatatataaactttctttattaaggtcgatgaaatacattcaaaaaaaataaaaaataaaaaaataaaataa

SEQ ID NO: 264581 - DNA, 542 bp, Cannabis indica
ctctattagtatcataacacgtatttacaaacatgtcaatgactacactaacacgacttaactgaacgtgtgtactaagaattcatttcatgtttgtattgttataagtatatggtcagtggtagtcattgttttcatatatgatagacatgttaagaatttctattggttgttgaatacatgcatattctggataactctttgatgttatgtgtgcacacttgttgatgcgagccagtagcttagtctcggtgctatgattgagtggatccagatcagtagttatcctcgtgttatatgaatctcaaatgtcttgttatgtattatatttgtatcctgttgatacaatatgatgcataataagttttatggacattagtgtttcttgagatttatgtgtgttgacactattgcttagtgagcacatattgatgtaattatgtaatccaagtaagagaacattagaatattttatatggacttacataattaagcgttgctctcactgtgtcgataaggataactgtatatttatatgcatg

SEQ ID NO: 264582 - DNA, 923 bp, Cannabis indica
ttaacaaatggatatactgaacagaattttttaatagtaactctagatttaggtccaacatgcactagttaattagtcatatatatttagtgaaacagttttttaacaaatggatatactgaactaaattttttaatggtaaattcagatttatgtcaaacatacattaattttgtcatatatatttgaccaaaactaaatcaagagcattaatttgatttattttataaaatatgttatttgaattgtcatctaagtaaaatttagtcgctttttcactacaaaagtcaaataaatactttttctaaaataaattatttatttatttaagtaagaagtgcaaatttagctactcacactcacctaacagataattatttcgatcctatcacttgtaatactaaataaaataaaatgatggtacgcatcaccagtttggatcggaagtggggtatgtaaaagaaaaaaaaaatgtagtaagagaaaaagtaatttgtaaggtaagaaaataaaaatcttatttacatgtaaaatggtatagcttcgccataggattaccaaatatgtaatatgaatactgaaataacaacagtctcataattcaataaataaataaataaataacaccaccaatagtaataataataaggctaattagtaatttttcccccgaactttgacatgtactaaaacgtgccccctgaacttttttggccgttaaaaatttccctcgaactattgagattgttaaatttaaggacttttatctaattttagtaaaaaaattgtaacatggatgaaagttcatggggcgtgatttagtacatatcaaagtttgaggggcatgatttgatagatatcaaagtctggggagcataatttagtacttaaacaatcactgaacagtaaaattgaatgaaatt

SEQ ID NO: 264583 - DNA, 538 bp, Cannabis indica
gtcctattattgatgaggaacctattattgacaaaggttttgttgttgatgaggaaagtgttatcagagaaatccaattgtggaatatgtcattcaaaatgatggtcaacaaatagaggtaattcctgaagtacctcctatatggagatctcaaagataaaagaatgtcaataaggtgtgatgataatttgtttaccttggagaaggtgaatgtgatcttggtcattttgaggatcctctcacttatagtgaagcatttaactgtccacattcttcaaaatggataaattaaagctatggatgatgagattaagttcatggacaaaaataatgtatggaagttagttctactatcttatggtttcaatctaataggttgcaaatggaattttaagaactaaaaggataaaatgggacagaatgaaaggtataaatcacgtttagtgataaaaggctttcctcatagagtgtattaattacactgaaactttctcacttgttttccctaaagattcattcataattattatggatttag

SEQ ID NO: 264584 - DNA, 2754 bp, Cannabis indica
tggggcgatatccaagggtttttatttttccaacttaggtcaatttttaggccggtcccggatggggtctggtcctctcgcacctgtccctctggatcattcagcctatttgtcttccagttgttcctcccctcgaacaactttcttggggatgacgacaccagccttttaatgcatgattttgctagggctgaattagattgttagggtaggattagttttattgctttttccttgcatggacaatttcttgataatgttcaaacgcccttatttgtctgtctcttaaagcagctaagccaatggttgagcttttggatgcccttactcagacctacagtcttgacctggccctgcctccggtacaagatttggtggtgacttccgggaaaccctcttctagcttccccttgagccaaatcgttttgattgaagaggacggggaggtagaagaggaagaggagggtgagattctcacccctctagaccggaagcgtaaaggcaaaatggtggaacccgaggcgtctaagaagcccaggagagccgatactctggctcccagttcagattcaaggatcccatccaaggcggaggagtacactgttcctccaagtattgtcctaacccctgttcctggcgacgaggaaatattgtaactctggattgccaagcataactatgctatggcaaaatatacgaaggggaatgcggaggtggaggctttgaagaaggtcctaagggaggctcaagacaatttctctcacagcgagtactccgggaacgcctgggatttaaatatggatcctttcacagactggttcaaccgcttcattgggcctactcttgctccttttgcctcaaaacacttcgtctccaacctgacccaacttccagcgaagagatacatagcttgtgcttccacaaactcggtctaccagatccaggacataagtgtggccatgaccgatgtaagcttctatcttttagtatttttcagacttttttgtcttttggcacttggcatcacgcacatacacatttttctttgttttgccaaatttctgcagagaccgaccgtctttggaagactctgattgaacatgggtccaccatgtccgacgagtttgggggcatggatgaggccatgaagagtcttcgagacttggaggtacagaggaaagctatccgagaggaatcccaagagagggaggcccttttggagcgaagccacaagaggcgccaaaggcaaaggccgaggagctgaaggctaaggatgatgcgttgaagtccagggatacggctgtggtcaatgcgaggtgggagctccgggacgctaaggagtccgtgcaggaattaactaccaagctaaagtctctagaagagctgcaccaagttgatttgcaaacgaaatccaacctaactattgaagtgaagaggcttcgtgaatttaaggagcagacttagaaggaggcagctaaggcgaagagagataccctcctggccccaattacctgccaacactgcaagaagcgtttcgaagatggagtcttcatggcctggcaaaccaatggccagaatcttaagctcgatttctaccccaagcctgaagaggtccttgttcgcttctagataaagaagaagaggcttgacgcagtgttggaggagcgcaggggccctcgtcttccaccccatgttgattaaactggtcgtttaccaccattactatcattttctcttctcttttttctttgttacgtatttaatccttctcccttcttcaagataatttatttctttttcttaaggggagacacgtatggcccgtcctcaggcccttttttatctttttgaagcttttctttgggatccaaacaacttatatttatatttgaatacatatttagctcttaaatttgttaaatttggtctgtatacatttgtccgtgtgatatgccttactacccccctgagtgacatgaaaataaatttttaggtccctcagtcttacaaaattaagttaaaggttgcatatatttttccggtacaaatttacttaacagaatataaactttattttccaactattggtaatactttcggaggtcatcgacattccaggccctaggcaccatggttgtctattcttttcagcttataggtcccggaacagattttgtcctcaatttcgtacggtccttcccaatttggcccaagtacccccacttcgggttcctgggtagctgggaagacccttcttaggattagatcaccaatagtgaatttcctatttttcacttttaagttgaagtgtttagccaccttcttttgataagctgccattcgtatttgagactcatcccggagttcgtcgatttgatcaagtgcttcttgtaataaagacttgtttgctgtcggattgtaagtcgtcctcctatgggataggaacaatgtttccatcgggaccatggcctcacaaccgtatgccattgagaaaggagagtggccaattgtggttcttgggggtggtccggtaggccgataacactgttggaaattcttcaggccaattatttttgcaggccagaagcttcttctttagggtgacctttaggattttattgacggcttctgcttgtccatttatttgtggtcttgccaccgcggagaagcttttgatgactccgtgttggttgcagaagttggtgaattcttcgcagtcaaactgcttcccgttgtctgagactatcttatgag

SEQ ID NO: 264585 - DNA, 519 bp, Cannabis indica
ttcgtactcttttgtccactcaaactttttgttgactcgcaatatgttaaaagaatggcacacacttatcagttgacttcaaaatgaatctgttaagtgccggcatttaacctgacagggcctgtacttccttgggctttgtcggggatggcatgtctattaatgccttgatttttcagaaattgcctcaatacccctcgcgttaactatgaatcccaaaaactttcccgaggagactccaaaggaaaatttttttgggtttagcttcatgttatatttttttaatattttaaataatttcgcgaggtatgaggtatgatccttactctttattaatatcaccaacatatcatcgacgtaaaccttcatgtttcgccctatttggcttgcgaacatttcgtttactagtcgttgatatgttgccctagcattctttagtccgaacggcatgactttataacaatagagtcccatgttggttacgaagcttatatgctcttgatctgggacgtacatttt

SEQ ID NO: 264586 - DNA, 867 bp, Cannabis indica
aaaaaccacttgttttactttgtgacaatactggtggtatagccaatagtaaaaagcctcgaagccacaagagaagtaaacacatagagaggaaataccacatcatcagagaatatgtggcaagaggggcatactagtggagaaagtggacactgaagacaacttagctgatccattcaccaaagttttgactgcaactacatttgaaaagcacaaattgaatttagtattaattgaaatgtacaaatagttttatgttagtgcaagtgggagtttgttgggctttgtgccctagataaaactttattttaatgtaatctattctgttcaattatcaataaagaaacatatttaatttcatgtcttgttccatgtgttatttggttcatgtgatcatttaccgtaatatctattcaattcaatatcacctacttaatcctagataaaatgatcttaatcctgagatggttaggtttgatcttaagagtattatttgtgttctttgaatagagcacacattttagtgattaattagttcactaaaatatcaattataggtggctaagtgttttaaggataaaatatattgaaagagtgtaacggtaattttgtccctatgcaatgtaaatcatcgatagaggatcattgattattgggattataacaatggataattaatagcgtatctatatcatgaaacgtatagagcgttctatgtaactaagagtggaattccaagttctatagtagttcaacaaggaattaataagttagagaatttacttggtaaattctagatctgcttattggaagctcgattatataggcccatggtccacatactagttgagacaaactgcttgtaag

SEQ ID NO: 264587 - DNA, 839 bp, Cannabis indica
gacaaaagtccttaaatttaacaatctcaatagttcgggaggaatttttaactgccaaaactgttcaggggcacgatttagtacatgtcaaagttcggagggaaaaattactaattagcctttattttttaataattttaatgtatatgggttatgacttatcatgctaatatttgacatttaaataattatattctaatttattttatatgacttgtgtattgtaattattactagaaaaaaatataatttttattttactgtgatacttgtagaatttttgttcctgaattattttcttttaaaaaaattccctactttaactttgtaaacttgtaaatttgcttctcctttggttgcatttcattcaattttgtaaacaatttcctaatataagattgatccctgattaatctactataattattctcaaactttaaaaataattgcatattgtttctttcagtttcatttcgttcatttctgtaacaattgcttgaagtaaaattgaaccaaggctagtctactataattcgagagtccaaacaaataataattgcatagacaatattttaatgataaaatctaaaaatattcttaattttagagttaatgtataaatttttaaaactattaaaattgattccaactagcttaagttagttaaataagtcctcatactttaatcatatgtggttggtttgtagtaggaatggcaacgggtagggtatgggtagggtatgcttattccacgaccctactctatgaaaaagttatactcatacttatcatgttactctattatttttgagtaaatattattttgaaccttgtgtttt

SEQ ID NO: 264588 - DNA, 504 bp, Cannabis indica
ttaacgtgacagagtctggcatgcttaagatttaaaagaacacaacaaataaatagaaacattcactttattaacttcaacattcaatttaaatattccttcagtagcatatcctttccccacaaaattctcattttagttaaagtaaataaatcagcccctatagtctgtgtgaatcccgccttgttgaggatatagcctaagaccagattctttctcatctctagagtatgcatgccttctttgagaatcatggttttttaagaggtaaactttaattccacatcaccagtattagcaacaatagtagtataagagtcgcctaacaacacttttttatcctcggttgcaactatgtatgttttgaacatcgcatgatcaaagcagacatggcgagaagtaccagtgtctacccaccacccttctgatccaccaatcaggttgatctctaaaatcatagctttataaggtagctctatagttaggttagcctgcggagcagaa

SEQ ID NO: 264589 - DNA, 655 bp, Cannabis indica
catccaacttttcatgtgagtttcctgaagaaatttcatgaagacaactcagaaggaacacagcagggcgtgagagcaccttgtactgttaggatgcaatttgggaagaaattggcgaaagtccttgatcatcgtatattgggcgctagcaagaaaaaacaaaggagggagtattggttttgcgggaaggcgaaagcgagggagaagcttcgtgggagaaagccgtcaacttgtggcaattcgaagacaagttgaatgcatacctcagaagtgtgtcgacgaggacgtcgacttcttctggtgggggtggtttgtgagacccttactcaggtccgcgcatgcgggcctgggcgttgctcgagcgagctgggcggcgagctgagtgacgtgcgcatatgcgtgggtgcgcacatctgttgagggagcaggtgcaaggcttcggccaaagcctgggaggaataggcgcatcggttagcgaacaactgcttggtggcagatgcaacggttcgacgggacgcattggttcgtacattcgtggtaggagcggatgcgatgcttgggcagggtgcagcctcgctacacgggtgtgtttcttggtgaagcaacatgtccacagcctaagagttgcctaacggttgggggtgtcaagtgtacc

SEQ ID NO: 264590 - DNA, 904 bp, Cannabis indica
aatatggatgatgaacattatttggtagttgatgaagtcgtagaggtacattgttgatgttgggttgtgcaccaagcaaccatggtgtagagccagaacgaacaccccgtaatgaaaatcgtaatacacctagaattagcagtagtcgacaaggaatattagaagaacatgctccccgtaatgcatcgttctctacgttctcatcatttaaagtttataccaagttcaaaactcctatgtggacaaaggaagatataatggaaaatcatgagctgactacttctttacaaagtaaggaatcaggggagatacaacttggcaatttatacaaaaacacaaggaataattgagacaagtagtgactaggtttgcaattaataaccattttgagtggatggtgaagaagtcaggtatcaatgtgttgtacattacatgcagtgatccagattacaaatggagattgaggaggaagaaaaagatgcgtttagacaactttgaggttactgtatttcataacgaacatatatgtaacttggatgctaaacattcagatcaccgccaagcagcaccatgggtggttggcccctttattaaggggaagtacacccaatatgaaactaagtataaggctaaagatatacagagagacgtgtttgccgtctatggtatctagatgagttatgtggaagtgtggaggtgcaaggaaaattcacttacgtatgttaggagtacaatagagttttcttatatgaagttacctggatacctgtacatgctagaatagaagaatccaggtactataactgacctgtatgtagagaatgagcagttcaagtactattttgtctcacttagtggacatgttcactatctgtataggtgcggatcggatatgatcacttgc

SEQ ID NO: 264591 - DNA, 1445 bp, Cannabis indica
gtaaaaaaattatataattttcaaaggattttttgggcccctaggctaggtgggtcctagacacaggtctagcccgcctatgtccagggtcgagcctgatcgaactcattagtattttaatttaatttgtgtgagcaattagattttatgttgttatactttaaatataggatttttttaaggtgggaaattttgaaaatgtcctacttataaagatttattataaaatggttctcactatgtttttgtagatataaaaagagatacatgaccactacaatatggtgtagtgtaggagattattattaatttactctgagtctcacctatttaatgttttataaacccatatttttatgggaaatcaccatctttgtgggcttttaaagaatttatattcattttcacagtaatttttaatcttttctattttgtatttgtgtttctttaattttatgttaactttaattttttattcatttttacatttcttcccccctttcactgttcattgatttctcatctttcttatttcttaactgaaactaaatcaaaattgatcactttggagaaccttcactttatttggaggtaacaatttatatatatgattgaatggagcttttcttatttggatttttcgatataatgtagcttacctaatcagattgagaatttcttttaaaaatttctttcactctcaactctttgcattgatttatttttcttgcaatatttttatttttattctcttttggctttgatgtttgatgtcgcttagaaaagaagtaagactcatacgcggaggactttgattggtcattatagtcatatgggtcaactagatttgagcagaaggatgtagtatagaaaaggttgatgagagatgggttagccttgggtatcagtaggagcgccattaaaggaggagggggtgagttttgaaactgaaagtgtatttgtgtattaaatttaatattactgcatgaataagagattagttataaatatataaatcaaaaaatttctgtttctattatacaataattaaatttttatattcgttttacgttttcttctaaaataatcccaataactcttcacgcagtaaaatcacagtttcatcttcttctcccaaactcaaccagctctgctccgacatcacaacctcgacgagtatgtttgacctatatttcaattcattagttcctaatatggaattgttcgatcataacccatttgaccccgttaacgaaaacccaagaaaagttgtgactggccgactgacagtttcaaggtatgaattttctatacacagttaagaaaaaatttggaaaattcaaagataagtaaagattttatgggatgaattgactttttaggaatgaagctcatatggtcggtaaagatgaagttcaccagattttgatggctggtaaagatgg

SEQ ID NO: 264592 - DNA, 612 bp, Cannabis indica
aaaaacccggagtcataccatcggggcatggagatttgtcagggtgcatttggaaaagagctatccaaacttcatcgtcgatgacaggggcaattaaaacttcattttgacttgttgtaacagtacacgatatattgttgataaccataaaagtgtcaacattagaagaataaaataagctattaaagtaatcaacaattacctcaaacaagccattagaccaattaacccagttgccttgtgagtcttgaagttgggatattgagttgtgcctttttctagccgtagcataagcatgaaagtacttgctattttgatcaccctctcggagccaaagttgcttagatctttgcctccaaaacacttctcttctgatgtaaacctcaaataattttttttttcagcttctctatagtttgcaactgaagtaggatcccttccttatttccattttcggacctcattacggtgctgtcaaattctatctttaaagttaccagtgaaattctgccttgaatctgcaagcagcctgctgcaataaaccactttcttagtgacttgattcgaaggacacaatgtccaaccatcctcgtaatattccgataagtctaa

SEQ ID NO: 264593 - DNA, 557 bp, Cannabis indica
gttatgaaaacccaagcctagagaaaagcaacaagccctgtagaattgacatagcttcaactacgggaggagaaagaaagcccaacgttggagtctcaacggaagtcacacaaatctcctgctggtctcgtaccacggcattgtaccctaggcgacagtgaactccctaaatgctggcatccacgttcagtttaaaacaactcccatcaggtgacacccacgataaaactaccagaaccgagaaaccagtggcccacctcaacactcattgttgaccttgaaaagtggtcaactgttagtggggtcgtattaatctaatgtttcttacgtgttacacaattagaacacaatgatttttatagaggtttggccccttagttagcgggtaatgacctactcccctttcagttgtattaatacttactcagatcactataggtggaatctgatataactctcttaaggttacaatgtataaatcagtaggtaggtctctaatgagggagagataaagccttggaggcgtgtgagagggagagaggtagagagccctttgg

SEQ ID NO: 264594 - DNA, 598 bp, Cannabis indica
aagggtgtttagttagttaaggtagttagtctttctgttaaaaacttaatattgtaacatcatgcttgtataaatacaatgataatcaataatagattgagctttttgcaattctattttctgtgttctctttctccttacttcctttccctacatttactatattaattttatacatttttaggtgtagaacactattaattttataaatatttttaattaatatctagctcttatatatttcctcattagtttgcactcatagatactaattcataatcttaaaataaaattgtggtaatttgatcaatactataaatttgaataaaatttatccaaaaaaaaaaataccgataaaagaaatttcttacaaaaatataaaggacggaagaattgacgtatatagtattataaaaattattagggtaaatggcggttaaaccctcaaaacttttattttgatttcacttaactcccaatacccaaatttgggcggtaaaacccccaatactcgtattctgctagtaatttaacattttcgtccattttaggtgttaagtgccatgttggactagacacagtgtacaagtggcacaat

SEQ ID NO: 264595 - DNA, 1208 bp, Cannabis indica
tttttttaacattgtaattcaaaattaaactctttgcacatatctaaaaaaaaatatcttttcattattattttttttactcaatccactaatccaaacaaatatatttctattattgtttctttttaaacaataaaatagaaaaaaaaatttatgtttcttaaagaatcattattatcattacaaaaaaactacttttagtgacaattttttagtcacaacataaattttttatgactaaatgtgacttttagtcacaacaaaaagttatttgtgactaaaacatagtatatagatttttttttttttgaaaataaaacggtcattagaagaaaaagttagacctcacggtcattacatagaatgttcttaggaatggcagaagtagaaagtagaccaaaccggttgtggtaaatgcccacttagccacattatgggccataaaattacaattcctggaaatattacaattcctggaaatattacaaaacaagcaaccagcaaaagaggacctaactctagtcaaaaataggagtagttttcaatttttcacctaggttccaccctagatatggaattgactactgccttggagtcactctcaacattaataacttaaaaatcatgttccatagcctcctctaaggccaagcaaatagccgccgcctcaccacaaagagcgtcagagtaatccaagtttgttgaggtcacgccaatcacctcacctaggtgatttctagcaacgactgcaatgcacatgtgttctgatcctactttgacatcgcagttcagtatgagccagtcttgtggcggtgggcaccagataggagtttggcttggaggaggagtctggataaaagaagatccataatctgtaaaaaagtgagagacaaaatcaatacattgtttgatattattcattctatgattatgtaccttatcattccgcactctccaaatcgtgtccacaacagtagaagcaaataggaaaacctcatctgagttcacatcatgatgctgaagattccagataaatttaacccaatcccagactctagtccctgtgttagccacaggataaattccccacggggacaagcgccacaggtggtaaacaaagttgcagtgcaagaacaagtactcagtcgattcgccactcatttcacaaattgggcaatgggtgtcctcaataaggaactgtttgttga

SEQ ID NO: 264596 - DNA, 1885 bp, Cannabis indica
ttttaaaataccaaaaaaaaattatatgggaaaaatgaattattgacttctcctttaatttttctttttttgttatgttttagtccaaaactatataatgctcttcactaaattcaaattatgtttcatatgataggttattgttaagtagtcttattattaagtagtcaattttgtggtttggattttgccacatggaatgcttaacacaaaattagtcggctacctataataactacaaccaattatatgataacacaccaaaccattatatcacttaatctaacaccattttatgcctactatgattaattattactatgtataaataaattaacttgtggggaaatatatagtgtttgacaaaaatcacatggccggttttaaattttgaatttttatttatgtgatcaattagagaagtcattattatataatatgaaaaattaagaattttattatataataaaaacacatgcttttatacacaaaatcctcacatacatatgagatatggcatatcttttacctacccataaaaattgtgtaatcttaacatattttttaaaatatgaaagagccagcaacaagggacaaaggggaggcaaaaataaagatcattgaaaaatatttaaatttataaggactaaagtacaaataacaaaaactttacatgtaaaaacatatgtagttcttaaaacttaaaaggggtcacagctcatcacttaaaaagaacataaatcctaattatgagatcttaagaccaaattatatatggtagatatgtatgtatatatatccattgaaactcacatatttatactataaagtctatatattattggtcaattatggaacttctctactactatataccctttaaagtccctcttctttagagcaatgtcattagaaattgccacgtatcaattatacatataaagccaaaagaagaacaatcaacctcaaattgatataacacacacattaagataactattacctaatatttcaaaaaaaataaaaataaaaagacagctctaaagtacaacatagtcaataaggcaatgtcatactattactatacttctcttctattaattctactcaaatgggcaaacttgactttatcacaaagattcccaaaagcccactacgtatatcaatggaacaccatttattaagtatatttaatagatacccttttctccttttttaatatttattatacatatatattatattattgcatgttggtcaaggatagtttggtaaaaacaaccaaaccccaatacacatcattacatgtctttcaatttggtgtactatataagtgtgtgaagctcttcatatagtttaatatatgctcaacaaacaagttaaacaacccttcaaagctctcttaaaactcttttctatttcatacccttttttcttcacttaagtgccaaaaaaaatggagagaattagtactaatattattaataagggccaaaataagatgcatagcttggcaaagctaagagatgttcaatctctaataaagatggttaatattatctcactctctttactcttctcttttttcttttctaaatcatctttcttctcttttcttcactctctcaatttctacctttcaacatttccttaccaacttttcactcataccattgataaaaattgcatctttctactatgcaatggactcttggtttttcttgcaaaatattctggcttgatcaagactttgtctttgtctaataacaataataatcctcaagatcatgatgatcatcaatcttgttattattccaagaataatcataatgtttattctcatcatcatgatgatcaatctcatttgatgtcatcatcatcatca

SEQ ID NO: 264597 - DNA, 781 bp, Cannabis indica
gaggcatttggattgaattgttgattgggtgaaccacaactattgcattttgatttcgatgaccacatcaacctaacatttatgtttatccaactcagcacctcctaaaaaacccattacttcaactattttaggatgaaaccataccataccctgctagttgaaatagcctcgagcaatcatttattgggatcacaagctacacatttgaaaccatacttttgttaagcttcaaaaatagctctatcgacattcgccttgatcttatgaactactggtttgtgccactggtcgcttacattatttgtatcagtggctaataatttaatggccccaaaatttgagattgaacagtcctccaatagtcaagaactatatgagctgatcccattacttctgctgcataacaagattttctgccaaaacaaatcattatgggctttccgaattctccaacttatcatagcagccccaatcacaacatctaactgctttccattaaacaacccaaaaaaccaattgacataatcataaactattacactaagtagtcgaattgaaatgatcaagcaaattcactatcaaataacacatgaaaaatggactcatacacagaattacaaaatgggtacatgaagtcaacatttacttgtttagtctttagtcacaacttagtggtatttggtttattggaatgtattgtaatagtaacaaaaatagaatgtaatggtaatagtaattactattactatgttttggtttattttgtaatcaacattgt

SEQ ID NO: 264598 - DNA, 868 bp, Cannabis indica
cttgtaatgactaacactccatataaacaaggaatgaagtgttttactagtaaaaaaagaatgtctaattttcattcatttgacaaaatttgtttgtagaaaatattgagtttttattactagatgaattcaacttttttttttttatctattagtgatgacaatagtaagtatgaatggaaaaaaaaaataaaaaatttgagacaagtgataaaattttcttgcaagaaaggaggggaaataattctattttaagaaagttaaccgtcaataacggtacgattaggggcgggaatgagaatattcttgtcttttagtttataagatactaccgaaaataacgataaaaaataacggtaagaatgagagcgtcaacaaaaattctcgtctttcaatttgttataagatttatcaaataataacagtaaaactaactgttacttaatttaacactttacatagaaattactaaaaaaagattattaagatcaaattttacaattaaaaaaacatcatactatatgtttaacaaaaaaaaaaaaaatcacactatatgtagaaacaaattattctgtgtataatactgaatgattatgataggtgctatttttcaatttagaaaatattaatttcaaattttataggaataattacattagacaccatttttttataaaatatttatatttttacgttcaaataatgagtttttttacatttttacggtttttaaaaaattaacacgaaaagaacataaaatcaacaagaaacataaaagtaacatcaaaataacatcaaaataacaacaaagaataacgcatttgtaaaattaacccaattttatgcccgaaatcacatgctggaatat

SEQ ID NO: 264599 - DNA, 568 bp, Cannabis indica
aaaaaatagactaaaaaattatcttaatgccaaaacaaataggagtgcattagtatatctcttttaagggatacattataaaatcacactattttgctgagtctattatatcatatttgtaagttatctaaacttacttaaataccaatactattaacaaaaaataatttatctctgcccattgaacatatttccaccataccattttttattttacaaaaaaaaacttataaagagattttttttatttttacatttcaaaactagttttttactttctaaatgtaaattcatatgacaactaccagagcaaccatcatagcaacccaaacctataaaaataataaaaagagttaagaaatagtatatggagtgattccccaaaaataactaaaaggtgaataaaataatattaaataataagagtaaatacaattttagaccatgtattttgcaaaagtctgattggactctctattttgttaaatgtataaaatacgactctgtgttttttaaatagtaaaaataggaccttgagttcaattttcgacaatttttttaatcttaa

SEQ ID NO: 264600 - DNA, 1007 bp, Cannabis indica
tactaaaatttttaaaaaaataatcataaggcaagtgtagtagtaaaattatttaaatcaaatcctatataataaactattaataattaaaattataaaattatttatctaatatttatattttatataaaatttagattctacacaaaattttagcaaatttaatttgtttcattgaaaaatgatttgtaaaactcaaaatatcataaaacaaaatttgcaccagggagtatgcatactccctacgggtgcgcaagggagagatgttcgtgggaaaaggctgctgggccgagctagctcggcgtgaccctcctcagacaagaattgtttgagaaacctcaatcaagaggttgtctgaacctcggtcatgaccgaggttctccttgcatccgcgcgagtagggtgtgtcacgttgtgatattttcattcaaattttaaaaattcataactaaaaaaattaaaatctaaattgagttctgtaaaagcttcaattcattaatcttttcatctacttttcagaaaatatacttccagaacgaaactaaaaatatttttcatcgaaaattcgtaattaacatacatttatcaaataagcacataaaataacatgaacacatccaaataatcacaatcattattttaaatctatattttatgtaagtaaatcattatcatggatctaataccagttgttggtgattattttaacaggatcaagatttactaacaagtatcttatttaaaatcctaaatatgaatcttctaaaaagtagaatttaaacacatataaagttcaagaaaccttaccttgattgcagcagaattatatgcctccttccactcagatctctaacccttgttcctttctgtcgtagagtattatcacgatttgagcccgattctctaccaggtggtggattcttcatagtctttgtaaagaccgcttagttaatttggaaattagcagttaatcatgtttaattataaaaattatttatagatattta

SEQ ID NO: 264601 - DNA, 4510 bp, Cannabis indica
taaaataaaaaatagaaaacaatgccaaacatacgactttctgtttttatttggatccaaagtttttattttattaatattataagttcataactagttaactacttcataaactactttaatattattggactcacaaaaaccgttcacccatggcatatagatcttctagtcctctgaaaacactgcaaagagagtaaagattatatcactggagttgaagaggaaaagcactcccaagtgctttgagctgaataaacgcataaggaggagtcaatgctttgagcggttatcagtacagaagtaaacaaagctcatggtgtcctgcgtttatgacatactaaacaagtagtggaacttgcaacaaatgatgagagataaaactactaatgaatcagatgcatgatattggaataacactatactcaggctacttaaagcattactgtctcatacccttccaacaaaaatttagtcatacttaatcgtgaaattcaactcatagcaagatgatgagaaagatacaaaagtaaaataactgaaagttcattaccagctaaaaaaactgttaacagccaaaaacgttatatgataataataattaaaaaaaaaggatgcaattaagttcctagtcgaccactggcaactccagtttatattttaagtacttggtagagtttatcaattccacaagcttacatgctttctcatccttatcctgcttgaccaatccattaaccacttgtgtaaacatctccttctttaaacgcatttcctgattaattgcctcggagcaaagctcaaaagccatatcgaagtcatctgcctcaaaaaataatggaataagcatctggtaagtcaccaagtctggattacattcactttcctgaagttgaccgtaccattcttttgcttcctccaagttcttaccatcacaaaatcctttaagtagagcattataactaaacacatcaggaataatatgcttacttttcatttcattcattaactgaacggcctcggatactctgccatccagcaccattcctcgcagctttgtattataacttctaacatcaggtacaacattcttgctctccatcattgcccaaattttgtctccctcagaaaactgaccattcctatacaacacattgagaattgtattgaaagtgaccaaatcaggctctttcccaatgttatcaagctcatgaaacatcgaaagagcatcatccaaagaacccatctcgcacaatgctttaatgacaatgttatacgataccaagtctggttctatcgaaacacgagaaggcaactctttaaaaatctcgacaactttgtcgtatttctttgatgcaacaccagcctttaaaagggcattgaaagaactcacagtgcgaggacagttcagctcaggcaattcatcgaacaccttctgtgcgtgatcaaacatgccagattgaccgtacaagctaatgaggcgcattgcgaaaccttggctggagatgttatagtattgtttctggtcttctaggatatcttcgatcatagagaacttcttggcaccggcaagacgggccaccgtgcgcctgtaaatgctttgattgtgtcgaaagcgtgaggacttagaggacttcttgaactcatctaccaatttctggagctgggtttcagtggtggaagcggaagtgttctttaccaatcgtttattgccaagggtttcagtggtgcagaagttggcgctgggttttgaaggaactctcgtaaagatagctcgaacacgacgacacagagaagacatttttatgtgtctttgtttgcagacactcactcgcttacaatacttgtttttctgtgtaaacctttattataacaggcatcaaatgaaggctccccaagcccaacagatcagctaaacctaagcctagtttgggctttttacgccattacagtccctcatgagtgatgagtttgatgacatggtgaagctcatgctcatgtaattatccttttcactttattttagtgaatgcatacttctttcataaaaaggatttattggaacaaatagagagaactttaatattattttaatgtatatttgtagtttataagatattttattgtacgcctaaatgtggtttctataactataaaatatgaagaaaaaaaaaatcttgctatgatgtcaggtctaccaactttaacaaaaataaacaaatgtatgtgaagccagataagtttttatttgttaattttccttctctgttttgtatgtttttttttcagttctaaaacatttctcaaatatccatggatacttacttaaaaaagaaataactataaatatcaattttagaaaatcaatcaaaaacagaatgtagataacttcgagttgaaaagctaggccatttttgccatctgaattggtcaagtgaaaatcagtggtgagtctcatattaagagttcctgtatctctgttgcgtggtgttactctatccaacaacatcaacaatgtggacgaaaaatcctaaagaacttgatagaatggttgtgatttactaacttggtcccaaaatttgataatacactttcttctgtcgccaaaccttcaagttcgacatcaaataaccatatggatcatgacgtgaatcaattctactcgtaatgagtaacaaagttgaatttcaattcatgtacaaatgaaaatgctgaggcaactcacaagctagccaagctaatgcagcagggtaagcaggctgaaatgaagtgtacacctcacaagtacactatttcactgctaaacccacaaaatatgccagaagtagtcttactataaagagagtaatggattctggttactgaagtttcttcacagttttcctgagaagcagaaaacttcaaagcttaaagcttaaaccagtgacacctaaaaaatagttaactttgcgctacttataaatacacaagcagagaagttggttctatgcaaacaagaaatatagtatatcagcaacacaaagtagcatacaattctcataaattattaaggagtgaccaaccaaaattgacaactggagtgtactacttgacttgtctagtgggccagcggtctagtttgaggcaagagctaagaaataatttaaacttccaactaggaaaagacaatcgtctgtctcttcaaaatattcttgtagaacaaaaagacaattagcaagcaaagcaagataataaaagtaaaggcaggcgctacttgtctgaaggaacctctgattctgaaggcaattcaggcaacttcaggcgatagcgacggtaatcgttagtctttccaagctccactagtttctttgcttcctcaatcttggacgccttagccaattcttccaccacccgctgcaataatgccacatctaaaaggaatcgccttttgaaaacttcctcgcaaagctcaaaagcaaactccaaatcgccctgcttcctaaggaagggaatgagtttttcaaaggtagttttatttggcacacactcgcacttcttcatttcattgtaccactgcttagcttcctccaagttctcacttttgacaaaactttcaatcaccagattgaagctaaacacatctggttcaattcccttagccctcatttcaccgatcaagtcaacaacttcttttgttttcttgtccttaaacaatccgagcagcttggcattatagctcctaatgtcaggggagacataattcttctccattagatcccatatcctttcaccatcagcaaatcgaccttttccataaaatgcattcaataatgtattaaacgaaatcacatccggcttcagacccttcgttttcatctcatccagtacagaaacagccgaatccaaagaatccatcccgcaaaacgccttgataacggtgttgtaggataccaaatctggttcaatcgccaacttctcgggcaggtctctaaaaaccccatcaaccttatcgaacttcctggagtttacacaagccgctaaaagagcattaaacgacaacaatgtacgctcgcagttcctctcaggcatttcatcgaacaccttctgggcattgtcgaacatccccgatttcccatagagagaaatgagccggaccgcaaaaccttctttggagatatcgctgtacttcttctggtcttcgaggatctcttcaatccatttgaagcgtttagcagaggcaaggcggcgaaccgtgtcttcataaatcccagatttggttcggaaacggtaagcctcggaggacttcttgaacttctcgacgaggcgtttgaggttacgctccttgtagacgacagtgaagagggagttgttggtggcggcggcgcaactcgcctgggtcgtggttgagaaggcgcgctgaaggagttgagagaacgacattgctcttctatggaactttaggggttttggggtttgggtttggggtttattgatgaaattacgcttcgctcacagtcaaaagtaatttagt

SEQ ID NO: 264602 - DNA, 935 bp, Cannabis indica
cacgtagtaaatttttagtagtctacataagcatacacatgatactttgtaattattttgtattgtatatataaatatattgtaattttttttagtaaatgtagaatacatatgaaaaaacccctagataaaaccaaaaggtgtccaaactcattaggtccttgcttggtccaataaattttccattttggttgaattaaattaagcccaaagagagaaagaaattgatcgggtcaacctgccaataggtagacctgatcaccctccaactcagttatttggcgggcgagtacgggttctttttttgttagttgtgttttcgctaatattagtgaaaactgtaattttgttgctcataatgtgactaagtgagcgtttacctaccagaagttttactgtattttgattttttctattcttgaacaactattttgtaacgacttgagatctaagtgtttttttttttttaacgctttttcataaaataaataaataaataaatgttgagccctacacaagagggtaatgtctattgtcgttgacatggaacgagatagccaatcggagacaaaagaacacgttgtccaggccatgtagaaaaacgacgaccaataaaagtaaaaaagaaatctccatatttaaactgaaactccacgcttattcaggaaagacccagaaatatttaggtgcatcaccatggcttacgttgaacgaggttagcaatatcccctttttctcaatctttcccttgtttaatcatcgatcttcgaattatgtatctcatcattttgaatcacatcaattaatgctattacaaattttggttttagggtttttggtccccgaattaggctaatgatctatttctattgtctcgtaccgtttgatatcacttgggactttttggattttggtttatgtaattcgatctgtat

SEQ ID NO: 264603 - DNA, 887 bp, Cannabis indica
tctaaaaacccttaatcccaataataccctccctatttgaaactctcactactccctctaactctcattctctcgtttctctctctttctctaactccccaaacccacaccaacttgattgccaccaccggacacaacatcgatgaaacccagcgagcccaacaaaaccaccaccttagacgaaaccccaggcccagacccagaccgatatcgtgaaaccccgaacacacatctgaaattgcaaaaaatatatatttttctaaacttttttttttaattttaaatgggtttttaggttttttttttgttgtttatgcttcattgtaaggaaatttgtttgttttaggttcaatttttgtgtttttgtttgaatttcattgatgcatgttcgagttttgagtttttggtcaattattgacatgtcgcgatattgtttgcgacgtatttcgatttcttttcaaaatgttgtggtagttttttctattagcgatgtttcacaacatgttgcgacgtgtttacaagttctttttggtcagatgtgccttttaaaattttagttgtttagtgatagtttcacgatgtgttgtgatatgattagcgacattggatgaaatatcccatgataatattattatacatcattaattgtatcgcaagatatgtcgccaacatgtcgtgaaatatcgttgaacactgggctacgtatctgcaattctaggtttagagatatcaaggtcaagtttacggagcttgaggtgattgatatgattaaggctagccctttcggacacttctgggaagctggagagttgactttctctggcgctttggtccacagcctccttttatggatgatgaaagtcaataatgaaaaggaagatgaggta

SEQ ID NO: 264604 - DNA, 611 bp, Cannabis indica
ccacctcctccaccgcaccgctcgaccgccgcaaccaccgcaccgctgggcaccatgaccaccacgaaaactgaccaaaaaaaaacccacgcggagtttgattcagtccgattcaggcgtgaatggttggggaagacgaagacctgatggttccgatggggctgggctgggtccgatgggggctgggctgggtccgatgggggctgtgctgggtgcgatggtgctgggctgggtccgatggggctgggtccgatgggggggctgtatccgatggggctgggtccgatgcttgtgttgagtcagatttgaatgagggggtaatgtagaaattaagtaaatattgtcctattttaccaatatagggtattttaagtttaaggaaaaaaaaatttccttaatgtaaggataaaaaatcaaatttctcatttagtaatttttttctctttttcagattttatggtttttttctggtgtaattctaatgttgatttgtctgtccccaaccatgaaggagaggtgccgtttgtgtattgctactgtttacagtataaaagtaaatatattgggcctgggcagtataaaagaaaaaaaaatgggcttggacagtaaaa

SEQ ID NO: 264605 - DNA, 829 bp, Cannabis indica
aaaaaaaattataaaaaaatgagcgcaaagatataaatttaattaatttttttttaattaatcgaattgagaagtctttttttcgggaatagaataaggatctccttattttgtcacatatagatagaaaaagatgatgaagagataaatccttaccatttcgaagcttgtcgctgtgacgacttcctaaatctattatatttttccttttgaaattagaattaaaaaaatttaagaagatgatgaaaatatgggtttttgtcatacatggaaagagaagaaaatgaagatagaatcccataccatttcgaagcccttcactacgcctcaactctatatattatcttcttctttaaatttgttttacaaaacacccacttcaaaatatattttactaaaaactcacttgaaactatattccacttcaagcccacttcttattggagacacatggagattggagagtaggggaagaaggaaaggtgtagaaagaagttgaaaaaatgaatagtaataattgttccaaaaaagaatagtaaatacaaaaatacagttatgggctgttatattgtaataattgttccaaaaagaatagtaaataccaaaatacggttatgggctgttatattgttttagtataattaaatgtgaaaaaattggtaaagatgaaataatatttgaaaaattagaaaaaaaaaaaaagaaaataaaaaaatatgaggagagctcatatatgttgccacatcatctgtccaaacaacagcattatataaatatatagatattgatagattgtaaaagtgaatcacttctagaattgttaatcatt

SEQ ID NO: 264606 - DNA, 622 bp, Cannabis indica
cctccgcactagaatacttcccccaacatgagctcctcagagtacatcacaacgtccctccagtcaaccaagtagcccttgcaacactgaccctgaagctaacacatcctttgatagtagctcactcgtcaatcgtccaatgcatactccttttgacaaggactaagtatggtgcacccctccgggtgaggttcgcaaaccgaccgttcccaacgacacctacagaacacgcttccactaaagccaagtccctctgaaaacttcacatgcaaactctatggcgcaccatcctcctgatgacaattgagcaaggcactctcaccgcaggataaaattttgttcgtcccacctggatgaggctcgcaagccaactgcacataatgcagcaccaagtgcactcttgcatagattctcttcgcgaagttctcaacattggccctccagccctaccgcacacccacagcttcatgcaaaaggccccactgacccactgcatacttgctcctttgagctaatttgccctctggctcccgcttgtgtcggctctcaaaactgtgtcacaagtctatctcccaaaatcaaccttggatcttttgatgactcgctaactttcgagaaactt

SEQ ID NO: 264607 - DNA, 813 bp, Cannabis indica
ctcggataagtttcttacttatcttatcgggcaacgatagtgacatatgcagcttgtggataatgagtggtaaggttagaaacggtactattaccgtaatgagtaattactcgttgaaaccgcagttaggtttcttacttatcgtttgctttatcgggcaacaatagtcacatacgcagctcgtggataacgagtggtgaggattggaaacggtcattaccgttatgagtaattattcttgaaaccgtggataggtttcttacttattgtttgctgtatcgggcaacgaagtgacatatgtagctcgtggtgaacgagtggtaagggtactttatgaagtaccatgattgtgagattacgatgttgtggaatgaattaagcatgttattatgcgatgagttgtaatcggatacatctttgttataatgtgaatgaatgaattttatattgcttatgaaattagtctcttttcttgcagagtctctgtgactcacgggatgtaagaatacgtgtttacagggatgtaagattagagttctttacgaggcactgaaaatatgtgactgtgtattgagtgaatatttgattagtttaatgataaagctattgcggcaagatgctatgtatatttttatattgggtaatatacgggttcgtatagtcgttatactacatatgcaggttgaatgataatgaatcacgggtatgtatgttatgttgtgataagaattacttttattttaatttgctttttgattaatcgtctttttctttgctgagtcattgtgactcacgagtgcttcatggtgcagg

SEQ ID NO: 264608 - DNA, 973 bp, Cannabis indica
ttaggtctcaccaagtggatattatagaagagcaccttagagaggaccatcgccaaatcagaaccggtaggtttgaagagcaccttgcaaggattcaccacccaaaatttgagctaaaatagatgagaatcaaccacttgatctttaaaagaaaaatagccaaacccctttctctctctagctttctttctcttctttccctctttttctttcttttcccttggctgctcacgataccactactgcttccctcctttttttttcttttaattgattcaaacaaaatgggtcttaagcccttaaatggtccaagcccacaataaaagggacggacccaacacttccaataatatttgccatctcttctttttctccatgccatagcagctcatttcgagctctccatgcatgatacactaggttggccaagacatacatagttaagttagggaaataatatattgtggttagaagcacggttaatatgtaccaagaatcattcgaaattataccaccatcgatcaacagtactttttattattttttttagttaaaaagttaaaataaaaaaaactatgtttattgttcttgctccaattataaaaatttattttataaaataataaaagagtaataaaattttttaataaaatactattataaatattgacaaaaaaataggaagcttcaagagagcatcttttttctattatagaaagctattttttgtatggacggaactctttttttaagtctaactttttattatagctgaagagcgtgttcagagagcatggttgaaaatactcgtaaaaaatataatgaacgactaaagattgctttagtgagttccattttggtgaacttggtagattgcactcgacaagggtgtgagcaggacaaccatacatattttgcacataggcatgttgttagaagaacctctatttgtctttattccaaaaaaaaaaaa

SEQ ID NO: 264609 - DNA, 934 bp, Cannabis indica
gataattgatctgtagtagacccgtccacatgtactttccaagccggcttgtcttcattgttacttggctgaggtatttgtactggcttggggttgttttctgatacgctttcttccttgcctatgcattttactacaaagtctgctaagtcctggcccttaattgctgttcggggttggaagataatctcgtattggcccaactccactgcccatttgagcaacagtctagaggcatccggtttttgcaatatttggcgtaacggttggtcagtgtatacccgaatagggtgagcttgaaagtagggccttagctttcttgttgctagaatcaggtagtacgtgagtttctctatcaatgggtattggccttcggcctcaatgagtcttttactaatgtaatagaccggatgttgaatgttgttttcctctctgatcagtatggcacttacagcatgctccgtgacagccaagtatatcccaagttcttctccgtccagaggttttgcgagttgcatttttagctcttgaaaatctttttcacattcctccgtccactcaaattgcttatttcctcgcaggatattgaagaacggaacacacttgtctgttaattttgaaacaaatatgctgagtgcggcaatccgaccagtcaaactttgaacttccttggttctttttggggatttcatatccagtagggcttgaatcttctctggattggcttcaattcctcaggcattgacgataaagcctagaaacttactcgagctaactccaaaggagcactttaagggattgagtttcatgttacgcttccagaggactttgaagcattcgtccaggtcatctatgtgccccccagactttctagatttgacgagcatgtcatcaacgtcacttccatgtttcgtccgatctggtctttaaatat

SEQ ID NO: 264610 - DNA, 2188 bp, Cannabis indica
gttcaaatttttctcatggtcatgtaaattatacttatttaagacatcctgacaaattttaagaaattcggaagagtttaacacaccgaaaattgcgttcaagtaaattgtacgtgtgacttattttattttatactcgtagtaaaatagactgacttgaaacatgtgactattgtaaattattccgaatttcttaaaattttatgagatatcttaaatagctataacgtacatgaatatgaaaaaaattagactaaaaaatttttatggatgccgaaacaagtagagggtgcaccaatacatctattttaactcaagtataaaaagtcagtagttagttaacttaagtatatgatttattttatgtatagagtaaacttattttgatcaatagtgataactacaaataagatacgataataatagcgactttgaatgtagtggtcactacaagtgagatacggtgatgacatcagttttgaatgacaacaaatcatatgatgagttttctatagatttatcaattgatttattttactataacgtttaaaaatatctttttgttatttttttagataagaaattgtataaaaaaaattagtagaataattactcatactattaaaaaaaatatcaactttaatatatttttgtaacttaattatcaataaacaaaatataaccgcacgtaaattgctgtttatttcctagttatttactataacttagattgaaataatattgtttcgattctcttagtttagagtttgaaaactattcttaaattacatatttagttaattataaaagcttacaattattttgaatttgtaagtttttattttaattttacattaaagttagatattttcaaatcgtttgtttattttatttgaaatttaaaataaataataataataattaataaaaatctacaatttgatgacacaattaaaatatttacacatgtaattttatttactacacatgtgaagcaataatacatgcaaattgacttatatcatttttcacttttaaataataaaaaatgtgtatatgatttttttattatttatataataattaaaaagacaataaaattatcaaataaaataattattaaaaaaaattaaaacaaactgccatattatatatttaatattagagtgtgcatcaaaattcgaaactcatatactaggaatactatatcaaatgaaaatgctaaaagatactattatagttggtagtatgttcagtattatataattaagtactcagtcttatattaaattttaaaaaaataattaataaaagaatatatcactaaccaatataacaatacttctatatcaatcattattttggattttggaaaaaaaaaaaaaagcaaaaatatatacaaagttggtacatttttcatttattaataaaaaacttttaaagaaacgaaaacgacgtgacattaaataggtgtttggaatcgaaacccacccactatacaactatcaattaattattaggtgggatatttatttatttataaaataattaatgttacgttcataattaattaattaattaatgaataatatataattatatatgatatcattttgaatatgtactgtacatagcatagcacccaccatgaacaacaagaaccacacaaaaaataataaaccctagctacatatataacagatatttatatagaagagaagtgtattcacatgtatttatatatattgggaaatatatagataattaagttagaaaatggtacctttcgagagtataaatcagcaagcatggaaccccacccttcatgactgaagctcatctcaactatagatgaaccaaacagaacgaattgaggtctcactggcccaaccatctctctctctcttcaattctactatttttatgtatgtatatatatatatataaaaagagactgagaaagagctatatatatatatgcgtatagctcttgtgtttagaagctctaccttttgtaccactctatctctcaatgttggaaagttggaacaaccaaggaaaaggaattgaaagctttttataatttaagatgaattttctagtaatttttatatgggttgctttataagttttagttataatataagtttctttttggttgctacgtgtatttttgtaaatttaaaat

SEQ ID NO: 264611 - DNA, 607 bp, Cannabis indica
ggtgctctactgtgcaggaaagggtaagactattgctgatcagccatgagtggaggagctggacgaagaatgtacatgtctgagccacactagaccaagcgggttggggtcaaccagtgatgtattttgttctctgttttgctgcttaggtcggctagagaaaacgaacttgtaataacattttgtaaaatacttctaggatcccgatacttatatcttttatttaataaagtgaaaaagtattacaagttcattttcattctatttgtaattaaagtttaatttctgcgctaattttattagtaatctcgtttagtggattagggtttcataagtatattgggtagcatgcctatttctttagagcgttacagttagccttccaaaagtcataaaaaatcacgagaccggctgtctctaaggcatgcactttctcttccagcctcgtcacctccgctctctgctgttcaacctctgatttgtacttctcgacctcagctgttagctccttctccttagacttcttatcttcttccagccgacggaagacagtccaaagaactcccctttcctcttgaagactattcacttctgctaacaaggtgcc

SEQ ID NO: 264612 - DNA, 671 bp, Cannabis indica
attaagggcagcacaagaagtggaatcagcagaacaaaaaagtatgctatcatctgcaaacaaaagatgagaaatagaaggggcattcctagcaattgcaaggcccctaaggaggcctcgacgctgataattgctaagaatagcagaaagaccctcggaacagagaatgaacaaataaggtgacaagggatccccttgacgtaaacccctagtaggcttgataagctcactaacaacaccattgacagaaaaagaaatagcagcagaagataaacacttaaagataagagaaacaaaattgacagggaagttaagatgaaacataacattccttaaaaaatcccattcaaccctatcgaaagccttagccatatcaagcttaagtgcagaccaaccccttttccctactttcctatgagttatattatggactaactcattagctagaataatattatcataaataatacgaccagacacaaaagcactctgaaaaaggggaaattacactgtcaagaacacgttttaaacgattggccaaaactttttgagataactttataaaaagtagtacacaaactaatgggcctaaaatccttaagcatattagcacgtgccttttttgggattaaaacgattaaggtagagttgatttcagaaaatcaaccccc

SEQ ID NO: 264613 - DNA, 7297 bp, Cannabis indica
atcttgcggatgaataaatacgatctggagaagtccctggatgatctttgtggtgttgctgagtgggatcccattcttgaggagttgacagaaatggtaacaacttttccaattctctcaagattgtccagctgttgttattctattatttttgtatttcattcattactagtttgctgcttctttctgaactcttttttttttacagggcttctgtgacactgaaacgaacagaaaacttcttgtaaagaacaatggaagtatcaagcgggtagtgatggatcttgtcaatggagagggtgcctaagctaaagaaagacctatctaatctagttacctaacagtatataaatatttcatctactatcttagtatatatgtttggaataaatatgacactttgtgccatttatgtttagttttctatgcttgggtttctttctacaagagtatttagattatggacaaaagggtttgtctttgtcagacatttttttatgttaatattttgcttattaaataaaattagtaaataaacattttatatttcttgcactgaatctttaccttttatacatggggtggtccagtactatgcagcatagatgattggtatgatgtgatattcgtttttgtatatttaaaattagacgtgagatttgatattatattgcactaattgtttgatgttacataatttggtattaagcacaaattagcataggggttggttgcaatgaatttgctattaatgacaagcctatgtatgaattttaaaatcacaagttaattttgtggtagaatattctacctatctaatctaacggtaacaaaataattaatctacctttaattaataaagaatcttttaatgtgggtgttctggtgaaataaaaggaagagcttttagcaagaaatcttgtgctttaatttttttttcttttcctcttaacataatttgcaaaaacaaaagtaataacttaccatcaaaatttacagctgtactaaaaagctcaaatggataacacaaaactgtggtaactaattctattctatcatcatcatggtcctttggtcttaccttgagcttaaggctatggagtaaagattaagctttttgttgaagtgtaacacaagtagaagaaaagaaagtagatagctactgtagatagagcctaagagctagttcaggcatctcttattgagtggctttgtccccatgttgacaagatcagttttcatgtgctattgagtagtttatggcttccatactcttttgattactatattcactaaaatctatcatttttctctttcttagtttctctctcctcactttttctctctcaccccagatacttaaattgaacttagacttgatccatcccatgattctgtctgcagatcaagagttaagctctgtgcccactaagattaattaaattagaaaaatcccatcaaccccatttaactgagttctataatgagggaggattactagattttcaacaaggagaaaggtttgagctttaaaagtatattttgatacttttagttggtggcttcgtttttttagtctcatttttctttttttggtttccatttctgggggatcctgctcatttccccataaaaaaagctttcaaggtatctctttgggctttgggctttttgttttggagctttgtgtgtcataaatcaatctttctttcttctctctctctctacctttctcttctctctctctctctgggttaaacatgtgggttttcatgcttttgcctcctcaaacgacatgtaaggcatccacctatgagattttgatctctgggctttattattcttgagatgtggttatgagagcacagcacaccaagacttgactacagagtatgtcttgtgtagtagttcccttttcgtgtcagcttatccatttcctctgttaatgagcgtttcaatgcttcttaccgctcttcttcctctacttctactttggtttttttgacatgtgatttttctttaaagtggaaatgggtattagaattcagtgaaaaaagaaaacaaaaagagtgcagaagaagaagaaaagaaaagaaaatggaatctgggagtaggtttagctcagctgatgagttcagattggattcaaaatggcatattgaccctaaacatctctttgttgggccaaggattggagagggagctcatgctaaagtgtatgagggaaagtaagtaacaaaggttttcagattttgatcctttttcttcttctcttcatttctttgcagatttgaaagtggcaatgccatttctttccatttgcattttcttggatttacaagtccttcctttgcttttctctgatacttaatgttttgaagtacttttctttaattgtacagatttcatatccacagatttttttttattcagtttccatgattggaatccattttttttcccttttcaatgggattagtgggttattgaggttttctttgagcttcactataatttcaatttggtttctgggtgtgttttaaacctgataatctcactcattgagttgttctgatttttgattaacaatcaggtacaaaaaccagactgttgccataaagattgttcataaaggtgaagctccagaagaaatcatcaagagagaaggtcggtttgcaagagaggttgcaatgttgtctagagttcaacataaaaatttagtgaaggtgggatttagtattgtaaaccagaacaaattactcatttatttttattgtttatttatttattatttttttttcgaaaaaaatctaaacagaaaagaggattctcacttattagtgcaattaatggggtattggtgtttgtcaatgtcaaatatttaatacaaaaaccttgtgtgtcaacagttcattggtgcttgtaaggagccagtcatggtgatagttactgagcttttattgggtggcacattacgtaaatacttgttaaacatgcggccaaggtgcttggaaactcgtgttgctgttggctttgcacttgatattgctcgtgcaatggagtgccttcactctcatggaatcatacaccgtgatttgaagcccggtaatctctctttttcagcttcaaatactggtatttttcatacaaactcattttctgcaaagacaaaattagttccgtctttgacatggttaagattttggaccttgtgcttagtatggacatggtctgataatgttgagtaggtacttatgtattggaaggcagcaaaatatcccttaatcatgttcaaattatctcaatcttgatatgccaaatttttgttttggttgcagagaacttactcatgactgccgatcacaaaacagtcaaattggcagattttggtttagctagagaagagacattaaccgagatgatgaccgctgaaacggggacatatcgctggatggcacctgaggtagtaaatttctctataatctacattctgcctatgctatgactatgaggactttattcactgtaaatacttaaatttgttgtttgcttgttgaacagttgtatagtactgttacattaaggcagggagagaagaagcattacaatcacaaagtggatgcctatagttttgcaatcgttttgtgggagctgttacataacaaattgccatttgagggcatgtcgaatcttcaggcggcttatgcagctgcgttcaaagtaatcaaattttattttctaacctaacagcattatcgtgttctttatcataatgccttgctgaaaaagttgtaaattgttactttgacatttcagaatgtgaggcctagtgctgaggatcttccagaggaactggccaccattttaacttcatgctggcaggaggacccgaatgctcggccaaatttcagccaaataatacagatgctgcttaattatctttacaccatctccccaccagaacctgcaattccctctaggattttcgcctctgaaaacacagtcttgccgcctgagtctcctggtacaagctcattgatggcagttcgagatgaaataggggagactcctaaagcaagtatggaagacaagccaaaagggtttttcttttgcttcaaccagtgttactaatccatgaatagttggaagagaggagtatgtagtcccccccttctctggccaataatgcctgaaaggaagattagtaatcataggctatagtcccttcgattactttttgataacatggtcaatgtttaagttgattacttttccatcaaagttcagctatgagataaaatcactgccctctatctttcttgctgctagattcagcctgtaggagcttagctctgattaggtaaattattaacttcgagttacttatagtttacagtaaagtttctttgtcatgtttatctgtaaatgtcaaggtggagaaacaggattcctaggcttatagccagccagctggtcattacttcttcatagttccactatgcttaacatttggttatgtcatataatatatataatttatggtaatcacaagcagaattcaaatccaatcagattaggggcttttaccaaaatgtcaacactaggggagaacagaattttgccttggtccacctatgcaccaaggtgttcttcatggattggtggatagtgacaggagatttggcaggactacaggtgtcagattattgagatataatttgtttccatacaaaccatgtgtgttgaatgggaatcgagagctcctaatcttttgctccttgaaaattgaaaattcttaatatagatacaaaatgtgcaaacatcactggtgagtaccacaagtcttttgtctcaataataattgtagtgtgtgataatgtatggccccttgttgttacatgacaaaatttgattggaataagaaattttccgtactagtgtgggggatgaatagcagtatcatgtactataccgttttgtgcctataatatgaccattaaaatggaatctctaatttgtatgcatgaaaataaaattaattagaaagacaagtaaagcagaagggaatcttgaggaattgaaacagtttcattaatcaaccatgaccttatactgggacttaaacaatgagtgttttctcacaacatgacaaatgaaaataaatgcttgagttttaccaataatcattgcaggaacaggacccttctttgaaatggtggaaacgattgcgatcacgaacaacaatttcccgtttgaataccttcgatataatctttgttgcattgtggcaatcagtgcagactctaagattcttagatattctaattgtagttccgggagctgtttttataaggccataagcgatggcgagtttctcactgtgatgagaaactgatgcttccttgtgatagtcttcctctgcatcaagccttgcatctgctgtgtttggcacatagccagctgatttgatctttctcatcatgtcttcagttgcattgtaaatctccattgagttgggatttcctttgtcttcagcgaaaaactcatacatgactccatccaactcaatcaaactacatccaggagcctttcttataccattctctttcatttgatttctcactgttaaagcatcatcatctcttccaattgatgagtaaagttttgatagaagtatgtaatctccgctatgaggctgatctaatttgatgatgttcttcaatgattcttcgccaatttcgacctttttatgaaccctacatgaagccaatagtgtcctccaaacaacagcatttggttggataggcatgttttgtataaactcataggcctcttcaatcaaaccagctcgcccaaagatgtctaccatgcaaccatagtgttcaattctcggttcaatatcataatcattgctcatgctgaggaaatattttcgaccttcatcaaccagaccagcatgactacaagctgaaagaacaccaatgaaagtcacatcatttggaacaacattgttctgctgcattaatttgaagtattccaaagcttttttcccttgcccgttactagcaagaccttgaataagagctgtccaagaaaagacatttctcatagacattttgttgaacacttcaattgaactttctaccaacccacattttgaatagaaatcgatcagtgcagttccaagtgtaacagtgagcttcattttcttcttctttatataaaaatggacccatttaccagtttctaaagctccaaggacagaacaagaataaagcacactgaccatagttacctcatttggttccacattagccttttgcatttccttaaacagaacaagtgcttcccggcatcgattaacttgagcatagccagaaatcatggcactccaagcaacaacatctcttcgatccatctcgtcgaaaactcttctggcagtatcgatctgaccacattttgcatacatgtcaatcaaagaagtgatcaaagcaaggttgcccttcagcctatttgcttctatatactcactaatccactcacctaactccaaatcagccactctcccacacgcaggcaaaacactaatcatagtaacctcatcaaactcacaacccaactccagcatcttacgaaagagcttgaccacctcatcccaaagttcgttcttcgcgtacccggctaacattgaattccaactcataacatgcctatgagacattttatcaaacactttccgagccacctccaaatcgccagaactagcatacatatgaatcaaagtgttctcaatatatccatcagaaccaagcccagattttacaatccgggcatgaatctgttctccttcactctgtgccccaagcttagagcaagctttcaagacactaggaaaagtaaactcatcaggctgaaccaagctctcacacatctctctgaacaaaaggatggcttcatggttagacttcttgtatatgaagcctctaatcatgacattataagccgccgaatcgggtttgtccaattggcgaaaaacggagagagcatagtccatggcgtccggcaggattatggcggcggactcgagtaggttttcggcgatgagggggctgtggaggaggcgggttttgataaggtgggcgtggacttggttcaaatccttggtagtcttgcatttttggaggattaaggttttgggattctgtgggaactcggaaatggtagttatggccgttggagttttggagggagagaagaaaggatgggttgtcaaagccattttgtctttactttaact

SEQ ID NO: 264614 - DNA, 641 bp, Cannabis indica
tttagcacaaattttagattttctatttgagatggtttaagagcaatgttcacgatcttaaagatatgggaccattttagataaatattcattattgtttttctgcgttgtttaatagtaaagtgtgtacttggaaaatttattaattaaatgtgatgaaactgtttcccatacaatactgataactgtaaaagggtgattactgtaagtgttaataattttaaaagggtgattaattgtaccaaagtgttgtcatcttcttcttcttcttcttttttttttcttctaacatacatttaattagtataactttctgatttgtacatattttagtattagattgctaggctggcatggtaagggcatcataacatgcctcatattgccttaattgccgcgaatatatgaaaaaaagagacaaacacaagttcagttaagtcagttgcctcaacttcccaaatccacctttatttttatttatttattattcttttaaaagcactttaaagcattagttggtccatttattcactcacagaccacatcttggaaataccacaactttcttccttcactatgattcatcccacacaaccacaactacccctcaaactaccctctttcttttaaccattcaccaa

SEQ ID NO: 264615 - DNA, 3652 bp, Cannabis indica
ggtatacgaattcatctttcttcctcttttcgttttacatctatgtatgtatatctgtatttgtgttattgtgaacatcttagctgtttaggtttatgtcttactggttccattacttcagatagggtttacttcataacgtacatacatatgattgtgtgtgtctctgggtttgtcacataactaaattctcactattgtaaaacacttttctttaaatttttctttcgagtgaaattttggagccgctaaattttcataattgaactcaaagtccgagagaaagtatggatttttatcgcccaaacctgcttatgatttatttattggggtagggtggggattttgaaggtgaagccttaaggtggctatgatttctgctccttgtttatcttattttttacctgactcttaagactttggaagatacgtgataaaatagctagacatatattgtagtaaaattgttaatccatggatggaggttatctgtttagctcaagcacacatggaattgaactaaactaagagtttgttggtgtgacggagcaaaggaaggaaggagagaggggtgtgtgggtggattttggggtagggtactgatttggatggaagatattgttggagatttcaatcccaattttaactaatttttaagtgtttgccctcttcaaaaaatttcccatttttgattttccttcctaccaaacaaagagagagattaggggctctttggttgggagaatgatgaatttggaacaagaacaagaatgacatactgtacactttattgagtaagaaaagaattaaggtcctctcacaaggtctgaggtccctcttgtgtacctatatagtaattgctatagtttcatggtccccaaatattatagggttaggcgggggatctagttttttaaaaaaaaaaagtattaaaaaaactaaattatatttaagaatagtttttctttccatttcttcattttattttaggaacagtgattccgctaaaatagtggaccagtcattctattttgaatggcattccaatgctctaaattacatcaccttccttcgatattcttttttcctttgtaatttacgtcaccttcttagctaccttcccctccttaactaaaacacagccttggtctatttatcttttgatgagaacaacagaaattcactgacctttcatgcttttttttttctctgtgcatgtattactgagaatagctctactcatacatttttttttgtctggttgaattaacttataatgacgttatagtcgtttgctaataggtcgcattatcaacactccaacaacactaactttagtatatactgttttcatggatatgcatttcagacattcaggaatcctgtattgaaaactaaaatatttgtagttgggtattttgtcgtgaaatgttacagacttgtttgttagttggtttcatttatttttatgttactttaaaagccactagcttggttgagtagtgagggggttgggtaagtgaaaggtccacggttcgaacctttgatatcttgcataggaggctcttagtctcatttaagcacacctgataattttttttgttgctttgtccttcaattaacacaagttatatgataagagttgtacagctataggccattatccctgctctctatatttgcagttctacatctttcctatggtattatgcatgacacatctgtcactgatttcttgttctgtcaatcaggtcaagcagctgttggctgatgatcctggaaactcggaatatgctgacatggaaagggagctcaatgaggtaattttgtttaggacttttattttttgtatgtgttgttgaatatccagttacaccttccagtcaaataatgggcttctgttgtgtacttgtgttactcgactttatgacgcaatttgagtggttattatgtgatagagctacaggagcatcttctgtagtgtcttatagatcaatgattgtaaagaaaattgtagatattctttttttggttgtctagatcagtgcaattaccgttcttcttctattttcctcctctcttttgaaggcaccaaaatgttgctcatcaagcaacatcagttaagctaatggctaccttgggagtttgttgtcattacagggttgttaaggtgaggatggctttatgttaacttaagttcatgcactccagaaatgagaactctttggagaaaagaatactggatcttaatgtagaattagaacatcatcaagatgcacatcacttctatcttgattcttgtgcaggtttgctgtgtgtcgtgatggccagcctgctctctctctttcacagtcactgattttggatgttcacaatcagattctatgttcgaatcacaacaatgatatgttcttcaaaatgctatactcgtagtagcttgtcctttctttgcattgtttagggatattctttgctttttttactatctgtttttccaaagagatgaagacttttcttataaaaaataaaaaattaagtaaggaaactgccaaatacacttttcatgctttggtattcatatgtttactatattatcattccttcttgaggctagctcaagtagttgggtgggtaagctgagtgatccactgagtccttgtctgtgtaacttataaaaaaaaaaatcatgttttctattccttctgaaatttatgattgcactaaagttctaagatgcaggtaattgccttaacggaggaactgctggaaactgcaaagcaaaatgagaattctgtatccaatattgtgactggggcaagtgttgatacatctcctgattggaatgacaaggtatgacaaataaggtctggttttgcaatattgtagggttaggcggggatcctagcttcaaatataaaaaattaaggcttggttttgtttcctctattgttgtgtcttgtgtgtgagagagagaatgagagagctgtataaaagttcatacatccatataattgaaatttctgtcgattcttgcggcctgtcagaacctttatggtcttcatgtatttgctaaagattcattgaccttttgatgctaaacgtctaaatatttatatagacatgatatttcatggcattgttatccattgatattgtgtatgtaaatgtgtgctgatgtcggagctatctcatatctttggttcttatatcgtgtacttttactgatttcaattgtaggaatcactaagcctttctgaccatcaagagaagtttcctgttggcacaaaggtgcaagctgtttggagtgaagatggcgaatggtatgtgataaaatgttgatattatttatctgtacatgaaccaattcacgtttatattatcacattggttatatttatattctctcctcccccaggacccccacttctctctctctctctctctctctctctctctctcttattagctcttggtcttttagatctctctgtcactagtgtttttattctaagttttgggtattagttgcttattggggctttgttcttctatatatattactgtttgggttgtcttgatcggttagtgattactgtggaaattgctttatgcagatcgttgatttacacttggttgcgtttctgattagatc

SEQ ID NO: 264616 - DNA, 587 bp, Cannabis indica
agcatgaaaaattgaagaaaacgaagaaaattgcacgctgtacggatggtatgctcatataccaccgcgcgcgcaagtggggtgatctgtcgtgattcctcggtgctgggaggctgcaacagccattccgcgcgcgtgggaagggtgatcaccaccctgatttttcccgattttcaaaaattcataactaattcaaataaaattgaaatcgagttctgtaaaaaagtaaattgcttaatattttccaaactatccaataaaaataattcctgacacagaaaatcaattattttttcaagaatttcacaaacatcaaaacaacacaacatgataccatccaaatcacatacaaatcgttttaagtccaaatttcttgcaagcaaatcaattaccatggctttggtgccagttgttggaattaattttaccaggatcttagatctactcacaagtatgttgattaacaacctaaatatgaacttccaaaatgataaaaggaaaaacacatataaagttaagaaacccttacattgattgcagcgaaataatatgtctccttccactcatatctctaacccttgattcct

SEQ ID NO: 264617 - DNA, 790 bp, Cannabis indica
tttgggtacaatacatataaaaagatgtatatttcaattaaatataaaattagaagtaaatttaattaatcgattaataaagtggtatttttaaacttactcctagaaaattgataattttgaaacactgaagaagcccaagatagaggcccaatcatattccttccccactaagacaaccacgccacatggcagcctccgaaatgagcaccaacaagtgccctgactgttgacttcagttgttgactagaatttttattatcagaggccacgaaaccttctaaaacaatatgtgaaaagctaattgtataattaatcatgaaaagtcaaaaatcactactgactcaataattattaagtacgatggataaaaatcttattatattcaatgaatttccggagaaaaaaaaatatcaaagtatatatttattataaatataaagtttttttttgaacaattaatattttattgataaaataagagttaagtacatggaaaaaataagatggaaaactatctatctaaattatagtattaattaatgagagatagaactgagtaatgttaatggatgtgaaagttaaaaaacttaataaatacttgactatgttagagttgacccaattaattaataattaaggtgaccatatatcctcagtcaatgatttgtatagttaagattttatttgttaggtaggataaaacaacaagattccgactacttagtcgattggtaatggccttgtattggatagaactcacgtgcaagtcatgtgatcaaaagcaaag

SEQ ID NO: 264618 - DNA, 2000 bp, Cannabis indica
gaaattcaaaagcccagaaagagtaaccttactctgactattgttatcttcctctttagctttcttcactagggtctttactctgttcactatcttcatctttcttcttctcttttctctgaccagtaagatcaagtgaacaatcaatatcctcaatcacaataatagacttattcgaagtgtcaatcaacagcttcttaagctcagtgttgtccttaacagcagtgagttccaaatcataaacatcataatcaagaaaattagccatagcagagatcatagttgattttccagtcccaggaggaccataaagaagataccctcttttccaagctttcccaattttagcataatactctttccccttcttgaacttaagaaggtcctttataatctcctgcttcttttcgggttccatagccaaagtatcgaaactagccggatgctcaaacaggacatggctccacttggtctgtttcccaccataatacctctcacctgatccattagtgtaaagctttcgttgcctatttttaatggctatggtttttccttcttggaccaaatgactcagataagtagtggtgattagttctctatgtcgtctatggaaagtgagcctgtaatacctcttctcatctgagttaggataccacgaaaaggttgagtttttgggggtgcttttgtaagaagtccaccacagtttcacgccttggaaatcgtcagtgacttcttcattgtcagccaatgtcaaaaccaatgatttggtgtctttgacatcatcagccttgagtcgtttggctcgagcagtagaattggtacttaggtagttttggatggctaagtaaacttcacttcgcttgaaacggtcgccagagtattcattgaaagtaatatggatataagggtacaccaatccaacgattttgtctgtgtattttgttagataacgcctaagatcatatgggaaatattgttgaaacattgcataaccaaacattatgctagcaattactgacccaaattgggtcatcatttcacccatgaacaacattattttgttttgtgttatattatctactcaaaaacatgtagagacttcatataatagatcttatttatagacttgttattacttgatgatcaagatgtacgcaatttcctttaagtttcccaatttaccaaaaggacgccccaccaaaaataaatgtttaatgtgtgcccccttttgtttatataataaattaattaagggcatgaccatgaagatgccctatattaaaatgttgagctcaccatcgttgactatatatctcaatgcgctgataggagcattcctttttttagcagcatccattatttaagaaacaaaaaagatgttacagaaaatatcgatatcaacatcccagatattatcagtaatatttgtttaattcatacgataaatagaagtcttatttagaaaaatccccttttaaggttatcataattctcaactaatgagcctaattattattctcgacctagggttcaggggaatctgaagctgtgatcgtgtgaattttatttggggcttgcattttcatatttctaacaaaagaaccaaagacacttaatatagtaatgggattggcatctttctacttaaaaaacagaataaaaaacaaaaacaaaaacaaaaaacgtaattgttctcacgcttgttgtttagccttcattcatctctgaaaagtgaaacgagtttttgtgtcatgcattatcaccaaacttgattaattgttgaaatgtcacaactacagaccacccttcttacatgttctcttcttgaaaccatcaatttcaaaatcttatctctgtcttttgtcctgtaattggttctgtagatattatacaatctcatattctcatctacataaacaaattattggagaacattgtcccacatggattaaatgtaaaagtattgagccatatatcagaacatgggctactccactcat

SEQ ID NO: 264619 - DNA, 871 bp, Cannabis indica
atttaactgtattgtgttttatgtttttttaggataaagtttgtgaacttagtgttgctgatgatccgaagcttgtgaatgttgctaagaaagtcaagaagaaaccggtttccaaatcgcttggcaagaaatagagcgaggctccttctgttgacagtcctttggttaatttttatttttgtaaagaaatcggtttttcaatttgttattttgcatgtttcaggttttctatttacagttttattttgaatctgttttttttataatacatatatgtttttattttcagtttttagtttttatctttgtggtgggtaaccagtttttgattttttttctttttttttctttgtcgtatttttaatttcgattgtttatattgttttttctctcacaggaatattattttaaaattgatgtgaagaagaggtttgctgggaaacctcaactctacaatccttataatgtcattgatgatatcaatgagaacctgtcagatgatcagaaggagttgtttcgcaagtctccatttgggcattttcttgatgtgagcaactttaactatcagatacagctgattcatctcgttcttttgcagtagattcacaccgaaagagaagatgtcgagctttggttcaaactgggagacaaggatgttcgtttcggaattgaagagttttccttaataaccagtttggattgtactaaatcctatgatgttgatctcttcaaatcaaagaacttgcttacttacaaggagggtattttttgcatgcatgggcttactgagaagcttacggtgaaggaagttgctagtgttttcttcagtggtgcgttgaaagacgacgaagattatgtgaagatagccctt

SEQ ID NO: 264620 - DNA, 848 bp, Cannabis indica
ctcatcatacacatatgggaccacctaagcaatagtagtatattattatcaccccccacatatgtctatatacattttttgtagtaattatcatcaaacatttcttatatcatacttgactttatatacatggcttttgatttaaagaatctttatttttgtatatgcatttttttcatgcaactttttttataggcacaacaaaagataatggttgacttgacaacactaatattatatgtactttttgttcttggaccattttgcttttctacacttcaaaagaacccttctcttattgcagaaaatatcatgaaaatgaatgatatataatttgcactgaatccactaataccaagcttaaattttgacactattcataaattaaataataaaaactaaaaaaataaaaaaaaaaaacaaaaaaaaaactttgtaccaagctagagaatgattgtaacactaattaaacaaattattacatatgtgtatttttaagggatttttacacaagttattctttttggcaataattttaatatatattacttttttataattgttttttgattctatggtttctcttattcttttttaattacaattttctacaatataaaacaatagatctgtatttttatataaagaaatttataattcgaaaatatatttaaatttttgtacacctatatttttagaattttaattaattgtgaaaataactctagctatattaacctcaatcataccacttaaaaaatatctataattaactctacataatataataaattgacaaaatataattatatatgtatatttgtcaacaataactcatcaattatatt

SEQ ID NO: 264621 - DNA, 686 bp, Cannabis indica
tgtatttgtgaaataattcctaatttttatcccacttatttttctagtccatcaatgttggactagaaatcttcccaaattgttttaatgtccaatactttttttgttggacataaaaaaaatgacataaaaagagttatttgtagtactgtaaaatattgaataaacagttaaaattgtattcatagtatgagatatatatatgcaatacaataattgtctaattgttaaaacttagagatacttgtataatgagatttattaagtaataaattttaaattatgaattaagaagaagtctttataacatgatcaaacacagcggattagtgtggaactctctaattgagttggaatattaaatatatttgaagtatattaaaataatcatttctagtggtgaaactacttataacacattattaaaatttaagattaaggagttaattaataaaataatataaatattaaagtattacttataaaaggagaaataagtatcattattaattaaggtgccgtttggtaacacttttttaatcagttttctgtttttaaaagtagaaaagtgaaaatattttgtaaaaacatgttctataaaattgtttttacttttcaatttataattagaaatcaaaattttaaaaacaaaaaaaatacactttcaatattttttaaacagtttt

SEQ ID NO: 264622 - DNA, 959 bp, Cannabis indica
tagtacgttgtatgtaatacaattaggattattataaattgattaatattgagatatagttaatattgttatataatgaaaagattgattggttgagtatcgataatgtaatgatattatgcatgtgatatatgggctcacctgattaggtgatgcgattttcttggcgacgtattgagagtagtacaagcgtcagtgatatatgataagtaccgagcgtaggtacgggctaacctgattaggtgatgcaatttttcctggcgacgtatcgagtgtaggtatgggcatcagtgatatatgatgagtaccaagcataggtacgggctcacctaattaggtgatgtaattttcctggcaacgtatcgagcataggtacgggtgtcagtgatataaaaatgcctggttatggcatagatcgaaaccattgttgggtttcttcctagcgacgtatggggcgtaggtacgggcgtcagtaacatatgataagtatcaagcgtaggtacgggctcatctaattagacaatgtgatatatttgttccaggttgaggcacgggctcacctaattaggtcatgcaattatatgatatatgtgtgcaggtttttggcacgagctcacctgattaggtgatgtagttatgccatatatgagtgcgaggctatggcacgagcttgcctgattaggcaatgcaaatcaggattatcagattaaagcattgactcacctgattaggcaacgtgatgtaatgaagatggttacttgatgaggtaacatatatatataatttatatgattagatgaatatgaattctattattggtataatggttttatattgctaaatatctatatactgatgtttattcgtggtagatgcagcagtgatttgaatttcatcttatgaacaatgcgtgatggtttgattctgattgtgtataaatgacaatattcgaataataa

SEQ ID NO: 264623 - DNA, 3760 bp, Cannabis indica
tttaaagtaatttcgaatttaaggagtatgttgtttgaaaaagtttcaaattttgctttcattttctctggggtcaagctagatccgtagtttggtctgtgatttgttttgtttcttattattgatgtttttgggtctcattttcatggatttgaagggaggttacgttgtacaatgcgccattttcatttgtgttgttcaaattattttattaaatagtcaattcaaaacctgacaagtacagcttttttcaccattttgtctgctggtttttatttttagctctctaatggatgatgattcgttgcgtaactggggttactatgaagcgtcttttaaaggtcatcttggccttcagctcatgtctagcatgtcagaccagcgtgataccaaaccatttctacctgggcgtgatccaactacagttatggttaactccaatggtacctttcataccaatcatcccagggattgtgttgtatctgatgctcctgtcccaatgaactatgggagggatagttgggttaatcatagagacaaatttttgaacatgttgcctccaaataccaactatggtgttcttccggaaacatctggtgctcattcgatgcagatgttgcagccacctgaggctgcaccgagggatgagagggcggtggtaggtagaattgaagagcctgttgttaataaggagagtggcccctcaaagaaaagacagagtgggggtgctcctaaaaccccgaaagtgaagaagccaaggaaaccgaaggagaataacaatgctgctcttgttcgtgttaagcctgcgaagaagagtatggatgttgtcatcaatgggattgatatggacatttctggaatcccaattccagtgtgctcatgcactggaactccacagcaatgttatcgatggggctgcggcggctggcaatctgcttgttgtacaacaaatgtgtctgtttatcctttgccaatgagtaccaaacggcgcggtgctaggatagctggtaggaaaatgagtcaaggtgctttcaagaaggttttggagaaacttgcagctgaaggttataattttgctaacccaattgatttgaggtcttattgggcaaggcatggtaccaacaagtttgtcaccatcaggtagatttactttgttggtatctttagtgagaactcaattgcatctggtatgcttcacctgtatatatatctatggcctcttgcagagatcttatgctcttcttttgtagttgttgaattttcgatgtttactgatgatacttgttgtatttgaattgttcttttgttaaattttccattcggcatatgataaggggctgatttttttggccactaagactttatgctgatgagttgtcttttactggatcgattctggataatatcgattctttttctttttaatttaattcgatcacaattagcaattcaatactttcttgctgttttggaataattttgtcctgcttctagttttccctactgttgtttgaacagcagtctattgttggctacttacttgtaacccaagacaaaagaagtcaaaactgttggctaataactgagctaatcaataattaacatacaatcaatattattgagctgtttatgaagtgattttgttttagcaactaaagtttgtgtcacttggttttctatttatttgaaaatggtttcttcagagtttgtggtgtgaaatctgtgttattttgctgtgtatactaggcttgaccaccattgaaattttacacatggatggataagttaaacatcatcagcacatgtctagtgattgtttgggtgcatttaaagatgtatgtttataatattgtttgggtaaaatttatatatgcaattcctcaagtgcttttgtctgtctcattttggaaatttagctgtcattttactcaagatggtttttcttaattataaagcttttgactggcctttgattttcatttttgtatttgactttatcaccttgttgtaggtttttctataataagagaatttatttacttaaaagttttactctagcctttcccaaggactataaataatatgcttgagcttaggagtaagtttgcaattttgaggaattagattcagatataagactctgagaatcatatggggaaaatttattggtgcagaagggagttgatggtgatactatttatatatacatataggattctattagattgtggtatgtgaactctgttctggtgaatttttgtggtactaaggagttgtttgtggctctaactaggtgttggaatggactaaaacacgagaataagaataaaatggaataaaatttaatgtacatctaaaaagtaaaaatgaaatgaaattttgagtttactgatatagaggaaagtcattctacaaaggaatggaatgaaattttgattattttccattcaattttattaccctgtgcctgaagccctgaactaaacacatcttttattaatcacatgactttgtggttttattgtcccaacttgatgtttctttgttcaataatgtgtttgtttttttcatattctaaatatcttgaacaagagacctcacctctaaaagccaatgtgaaaatgacccaagacatgttatattatgagtggcccctaatgagatctatcttaggcttacttatagtcatttgcattcttgatctcttttcaagcatgtggatgttccaggtttgcttatttgaagtaaaaggttgttgggaaatggactcaattatgtgttgggtattgtatacccaaattaacttttatcaactcggtaataaaattactagttctactcatgggatagaaatttcagcttaaaatcacatgagaaagtttctttacattgagtacgaccgttaaaggcttgaaagtagaatttgagctactctctacaatcacgaaagtgtttttctcttgggctgccatttcaagagcaaaaagacaagttgcaacttcacctctaaggcgattagaaaattggaaccgcttgatagccacctatataagacaacgcttccaaaaggtccgtagccacaactgtgcacataaatttcactatccgaccttcactcatattatgattaattttaatccactctgtaataaaagaacaacaaatgacaagattcgctgaaagttagtgtaagacagatactttgcataacagtagaaaattgtatttaatgtataatattaaataaattattgttacgtaccttacaattgtagaaagtgactcaaaaactacttttgcaattgagaaaagtgactcagaactattgtttatcgttgtaccttcatagtgatgctacatgtacatgtgttacttttattgtgctattagagatgacttcattataccttcctattcctaaaatttagtagcatcatgggtgaagataacactccaatttttgtgactaaagtccataatttgctataaaagaagtcatttattttaagcaatgaatacttagttgatagggataggttcctaatctaacgatttgaaagtcatttttcttcttcagctttgaaagtcatatttttatgagaacatttcaatttcaagtcagttttattttcatatatgatgtttttataaacgaaataaactaaatatggtaaaccacttaattttctcttcttaaaattgcaaaaataatgtggaacactagtcaactttgcaggttttatataaatatatatatttt

SEQ ID NO: 264624 - DNA, 687 bp, Cannabis indica
acgaagtccatagcaatatcttcccattaccactatggtatattcagtggttgtaggaaccatgcaggttgctaatgttcaactttcccttgttgacacgtaaggcactttgcaacatactcagaaatatcattcttcatgcctggccaccagaacatggccttcaggtcttgatacatcttcgttgaccctggatgaattgaataaggattcgtatgagactcatccatgatctctttcttgatgttctcatccatgggcacagaaactcgattcccgaatcttaacattcccgtttcatccactgagaaatcactagccttcccagttgaaaccctagctcgggtttttatcaattctaaatcttgcttttgtgcttcttttattctctctaaaagagtggattgcagagtaatattagccaattgccccacaaccaactaaatcttagctcgagtcacttcactagctaactgttgggagatttgcttcacagtactcaactgactctgatcctttctacttaaggcatcagcaaccacgttggccttaccagggtgataaaggatctcacaatcataatccttcaccaactctagccaacgcctctgtctcatattcaggtctttctgggtaaagaagtatttctgactcttgtgatcagtgtatatctcacatttctcgcca

SEQ ID NO: 264625 - DNA, 3396 bp, Cannabis indica
atatttagaaaaagcaattgctcactgccaaataaaacaataaaaaataatcaattccagaaaattcagtattagattagatccttcatcaaatcccttacagctactgcagttgcagtgattcatttcaattcaataaatttcatttcatttattacgtaatttgtagatactgcattagccaggctaagttatccctcattttttatttgtaaagcaaacaaaatcattgcagtacttcagtcataaaaacagagccacatacaaaagcaaacaaatgtagaaaactttgagtccagcattctccaaaacacgaacgtcctatttgaatacgctatgaatcattgagacgataaggttactcatcatcttcatctgcatttgcaattataaagcaaaaatcaaacagtggattatgaatcagattgtataacaaagtaataataattagcgtaaatattattttagatcatgtgttttgcaattattactgataaaacttatgttttgtcaaatgacaaatcattatattttccaaaatagtgcaaaataatagttcaattttgaatattttgcttttagtataactaaactaaaaccagtcataacacctcccgatcatattatgttttattaaattttattttgacacaaaatgaacttagagactattttgtactattttaaaaaaaaacaaggttcgatttgttatttaacaaaacaaaaagtccaatcaataatttttgcaaaacacagaatcacaaaaatataatcaatatagtcataatggaggtaatgaaatagaatagaatggaaaagaaacaatttttattccattccttagttttgttgcatttaaaatcattggaataccattttgatggaatggtctttccatcattttggtggaatgactattccatcattttggtggaatgactattctattttgaaatggaaggaaagacaattccaatgcaagatttgaaaaaatttaataaattttttcatcatttttttttatgcactataaattttattccattccatttctattccaattcctaattccattcctattcttatattttcattcctcccaagttcctcctaaaatgtaaaccaaaaggaattataaatcggattgtatagcagagtaaagttaataataattgtagatagctctccgtaagtgttaaccagaattagaagcacaaaagaaattttaagatgaagctcctataaagttcttgacacataacttacacccccaacaccaccatttacggaagctaatttatttgtgatgtgaaggaaaaagaacaacgagcaaacagtttaggcaaagaagtttatccatttgagaagtaattaaaaacaaggctccacatatgatcgaaagacagatcattaataaaaaattgcagtaacaagcataaaaatgaaacaattcagctcttttggcagagcttacagtcaaaaagcttaaaaactagattatgaattagttatatgcttcaatatatttttgtaaataaatttcaactagcttttgaacaagcaaaactggcgttgtccaatataaagccataaaggtagcttcttcattcactattctatgaaaaaagtgttgatgctcagaaaagtatgaagacaatagaggaagaaatattttaatatataaaattctatcttatcatcagttttaaatttgcccaattgactccatactattgcaacaattgatgggtgttcagaatatcctaatgacactatcaattatcaataaccaccaaaaatactagacatcataaatctctcaagtacctccaagtccaactccaccagtccccaaatatagaaaaagaagaagagtagattatctcagtaaaaaattgttttgtaatatactaaagagttgcgggaaaaacccactcagatgaagcataactagaagtgcacttaaaacttgcaagagaaagaactgacagctatctgttgagatctcctgaagtacacatttatcaataatctaccaacaaaaaaaaataatggcttctaagagaccaaagcgaatacattgcagtgtcgtatacaaagatacataatttactactatagttcacactaccgctccactattcatagtaaacaaacaaacacacacatacgagcagcatagcattaacaaaatgcagatggggtgtttaaggtcgcgcttttctaaacaactttgtactcaaatgaattataatctattcttaaacccttaaaagaccgtaacttcctcaacacttttaaacattgtaattgcacccttaaagacatttttcgctactagttgacaaagttcgatattgccccatagttactctttgacctaaatataaaagaagataacaaccactgaattacgattcttatgtcatgattttctatacctatgttgacatattcaaactgaaatgtaacaaaaaaaagttatagaagaactggtaataaaactaaaactggataatcaatttcataccaaagtaacggcgttcgttggcgaccttggccttctcgagcatcttgtccaggtctacctggagctgggcgtcccatttcacaagctgatttacaaacacgacaccgattcccatgcccaaaacgtgttcccaaggatctgcatcaaaagaagaaagccctgattaattggatttttttctcaggaaacaaacggaaaagggaaactataaaaagaaaatgggaacaggaaaatcaacacacggcgcatgtaagggagcttgcggagggcattggagtacatctgggtgcccaaacccaaaagggctccgatcgcggtcgtactaagcggcatcctttcgtattctcttctactattttttttttttctttttcaggtactcactctctccgcctccaattataacttcgccccatttaactcccaaaattatttcattaataataaaaagggatatggcaaaagtgcccaaattattgattattagcccttttgactctacatatcccgttaaaatatacatttatttgtactcaaggtcccaaaattatacatgttttaataaatttgccctcaaattttatttttttagataaattagtccctaaactataaagattttgacaagttggtccccaaactttatattctgataaattaatctgcaaacttttatttctttagcaacattaaattcccagatatttacatttttattatttattttacttactttaacttatagttatatgttaagtttaaataattttatttttttaaaattttaactttaaaaaaaataattatattaatattttttatttattataataatattaataagttaatactttaatttattatat

SEQ ID NO: 264626 - DNA, 598 bp, Cannabis indica
taaaaataatgcattatcaccaaattaaaaaatctttttgcttgtagtaagaaatattaggggtatgttattaaaaaaaaaaaaaacatatctttatatattaaaaacggcatttcttgatttaacaattttttgtaacgttctttttaaaaaaataaaaaattataaaggacttaaacggaagcttaactccgttacttatgatataacattaataacaatccaaccagccccatcatttcttcgcttgatcttcccacgagttcccttcttcgtatctttctcagtaacagctcgccgataaccaaaacctcaaccgcacagacgtcgtcgccctctcaggcggccacaccatcggaattgcccactgcggatccttcgacaaccgtctctaaccccaagatctccgaacacctaacatattcgacacagtcagggacttttcaccaccgatctagctcttcaaatttctgctattgaacttcaaatcgaaccaatcggaccaagccgagtttcgaattgtatcaactttgcataatttttaataattttaattttgctaagaaaaattcgatcaggttagtgctaagaaatttga

SEQ ID NO: 264627 - DNA, 681 bp, Cannabis indica
agagttgtaggcgcaacatcttgcttgaagttataactccatacatattggaatttttaactccaatagatatattgtatctctccaatttttcagaaaacaaactctgtggcagaacatgttgtcttggtacatataaatgtaaagcagttagtcgttgcaaactctttatttcaaagactgccatttcttactccaccttcttcattaataatctcatcccatccttcaaattcatgaggaagatagagctcttctatctgtgtcaaatttgaaatgacatttgcctctatcactcttaatttataacattctcgtagatctagcacttgcaaacgcttcaatgctcctatttcttttggcaaccgctcaatggaatgacagtaagacagatcaagagcttttaaattctttaactcaccaatcactgctatatcttccagagaagaatcacgcaaacgtaatgtttggagattttgaagagaagcaaaagacgaaggtaatgatcctatccatgtacgattcatacacaaaactttaagctgccttgtttgttcaaaaaagtcattgggaattgattccaaataagacccactagatagaagaagtaattctagcataggacaatccaatttttgaggaagattatcaaaatcaccatagtcaagaaaagaaattgct

SEQ ID NO: 264628 - DNA, 501 bp, Cannabis indica
aaattaatttttaaaaataaattttaaattaacaaaattattaaaattataagaaaattattaaaatagcttaaattaatacttaaaattaagtaataaataattatatttaataaaaatagtaattggatttttttattgtatgaattattttttcttatagtttattatttattagttttcttttaatgttttttaatcaaaaatattatatttattaaataaagtatttatttaatttttgaattagtttgagtgatctttattatattttctttaattttaatatatttataagttaaaatatatttttattaataatttcaaaattatttgggtagtgaaatactttaatactttgagtatttttgccaatttgttttaggtattttagtggtataattaactagcataatgtatttttaccaccaaaaataaaaattgagtatttaagtgttacattctttaaagtattattgttagaatttaggattgtgtagt

SEQ ID NO: 264629 - DNA, 655 bp, Cannabis indica
ttgaaatcgcacccatttctgccctagaaaaaaacaaaatcatcgcaaatcacgattcctctctcaaatcctaatccaaattacaaacaaaacctatcaaatttagattttctgtaaacagtaagattggaatagaaacctggatgataaagcgccgagatcgtggagatgatcggaggatggagaaggagcgagagaggttggagatcacggaggtcgttcaccggaaaagaacgaagctttatatatatatgtatatgaatatgtatatatagtgtatagttgttagtgttgtaagctatatgactaaattggcgccaacggctatttttggcggtttacttctttgttgacttgtgggaccctttttagtttgtttttttattgttttgaaatttctccattttgtttgttaatttaattttttattttttttttaattaatatagtatattggataaataaaaattagagacgtaaatgtggatttgggttttttaaaatggcacaaatagcacgagttttagagacacaaacataatttggcacaaatatgagtagctaaaaaaaattcttttttacactctcttttatattctctataatataatcacaagtgtcatttttagagattaatttatatgacaattaacaa

SEQ ID NO: 264630 - DNA, 614 bp, Cannabis indica
ttgtatacacttactatgtaaaaaaccttgtttttaaagaatgactaaaacaaatactactaaacatccctttattttatcaagttagaagaagacactcttaattttttttattatattatttttaatactgtctatggtctttatataatgttttatacacatatattctctatctaatatatttatctttattttcagataaccatgtcttggctgcgaaaagcaaattatgaaggttagctttgtttgaaattagcctaaataacatgtgtatatataaatatgtgtatatatcatatgaacatgaaagaagaagatgggagttgtgttcttgtattttcatattttcttttcactctccaatatatattttttgttgtgtttgttttttaataattaataataatcagacaaggatgaggtggaacaagttgttgcagaagaaaatgcagagtttatgagacagattgttggtgaagctacaaatgatcttagggtgagctttcatcactactaataatcaattacaataatatatagagagctttactgtttttctttttctaaatagtgtttgccaaaatagtatttttattattattaatttgtct

SEQ ID NO: 264631 - DNA, 890 bp, Cannabis indica
acatggtcttcggcccacaaaaacaagagattgaagcggcgtcgtttgctgttgtgtaaagagtagtagtagtgttgtgttgacgcaagcgtgaccccgacaaaagaagaaatgagtgtggacagaggtacggagagataggggaggaggaggaggaccggtgtgtaaaaaaagatagtacagacgagctcaacacatggagatgcaagatccgtccaaaccggatcttggtcccaacccgaaacccgagaacaagcccttccgttctcagacaacgactacgatgatcatgatgtcaaatccaactccgcccttcccggctcgtggatcctatcaccggagatcccaatccgaggtccaattccggattcccgacgacttggatctgctttcggatccttttgacggaccttccggtagctttgaggagcttggatccgaggacgatttgttttgtacgtatatggacattgagaagttcggatccaaactcgatgatggaccctccggccacaaaaacgacaatgtaggcggtggtgatggtggaggagatgaagagaagcatgccaggcccaggcaccggcatagcaattcggtggatgggtcttcgtctttggacacgattgaagctaagaaagctatggctcctgataagcttgccgaattatggaccattgatcccaagcgagctaagaggtatgaatgtatgtaattaagatctgaagttatgaactcagttttattttggttagtaataatgtgaatttgagtttgcttttcgagtgctataattatagatttgttaatatgaaagggactttaaattttttattgttaacatcttgtgcatcggtcaaatcatgttagaaagaaaaaaaaaaattgaaaaa

SEQ ID NO: 264632 - DNA, 770 bp, Cannabis indica
taggatgttaatgaaacatacatggtagtaaatctagatcctggtaaaatatttccaacagtggtgacctttgattatcttgtcgagggtttcgaaaagatggctataattattacttttattcctttgaggtgccacgtcatcagaacccttcgagatttgtatagacgtgattattggtaaccgttggattgagagactttaggccttccattgccacgtgtttccatcccaataaatgagggattttagtatttaaactctcagatacgaaattatcctttatcctttagtatttaaactctttgagttttcttcatctgaagaggacttagcgatattcacaaactcacggaaagaggaaatgcacttcaaggttagtgaattaccatttctgtaactattttttttctttgagagtttgtatgcattctggtcttttagggctagaaaatgcataaaatgataggatttgttatctgtcttctgacaaaataccatattttcctgagaaatatgtgcctcaaacttgaataatcatgagtttcaagaagaacacttcgagtattcgcagatttcttgataagtatttcgaatactcacaagtatttggtgagtattttgaatgctcgcaaatttcttcgaatatcctaccataccaatgactaagctttttgtctctctttttgctagaatttactaattcttaggacattttagcttttaggttgtatgtattattgttatgaaaactacctgagttctcaaaa

SEQ ID NO: 264633 - DNA, 1290 bp, Cannabis indica
agtgatagtgagtcaagtatctcaaatactgtcaatgctacttaaagcatttacaaaatattatgaaccaatatataaattatgaagaaacagtatgtaaaatgtatctaaatattatatagaataccttatatttatagttaaaatgttcaatttcaatttgtacttactattgcatgataatacaatatatattttagaatatgtactataattaaaaatattaaatgtcaattacattttttttttctcacgatcaattataaaataaaaattaaaatataagaaaaaaaagctatacacatataattgcacatgtaaactcatctaatatatataaatatataatatatttatttgtagaagtacgtgtctataattatcatcaagatgagacagacagccacgaaaaagatattctaaatatctcattgaagaaagccgcatagaattaatgtgttgtggtgtactaataatatatatttatatagagaaatattgaaatatatttaataatatataatagagataaaaacaaacatatataattgtggttcgaagaaaactcacgactggataatgtttttaagattatttgaggagagtaaggatttagatccgaaaatatttggtagctggtggtgatgacacaatatatatccccacgaatggggcagttatataattataaggttggagggccaaaacccttttgtttatatttatatggctagggaaaaatcatagcccaactaaccaaatccaatagaaaattttataaaagattacaatactgacatgacatgtctttctctaggtgctctccaaatcaattcattatgcgaccctgtttttgttcaaaattacatatacattattatctaattcattattattattattattattagatgccctaatgagtgtctatgctattgggtatacgtaccaaatagtagggtttctatatatatatatgtcacgtaccagctttctataaattgataaaaccacgtgtactatacatacatacgtagtgactaattaattatattacataatggtttttatatagcaaaaaatgccaaacggcttaacattctttttcctttggaataaatactgttcacatagtggccatggcatgaaaaatcactcccgtctttggaagattagttacagtataatatttgcatcatattttaaataatacaaaacgtatttagatataatatatatctattatttagtttaacaatgcaattagtgatggtagttgtgtatagtttc

SEQ ID NO: 264634 - DNA, 545 bp, Cannabis indica
ttgtaaatatgagtcagattttttgatgatatgaaaccggcacaagtataactaggcacaaaaaaatacgggcttaggacaatgctacaaattggcacgacatgtaagcacaaatagactagttcaaaaagtacaaaacatgacaagtctgaaaaagcacaacatgacatataaaaaaactttataatatagtaataataataataataaaataattaatttatcaattataaataaattaaaataataataaaatttaaatataatactgaatattatattaaaacgtgaaaaattaagattatattaattcatttataaggtgtgatataaaaaattgagtatttataagtaaatatttaaattctaatgatgttaataatttgtatgattttttgtaaaatattgttaaaaaattatataaatataactaaaactttgaactatacattcaatttagtaattgtaaaaaaaataaaaaaagtaaaaaataaatttaaagcccgagtatgaaaataggctggccagtttaagaaataacgggc

SEQ ID NO: 264635 - DNA, 821 bp, Cannabis indica
aatcccacccttttttaatgtatgaacattatccttctcaaaggtaacaaggtaatgtttaacattaccattcccttgctaacattaacatattccaaacaccccttagtgtagtgtaatggtattttataatccattaatagcttaaaaattttgggttcgaacttataaccttttttttttctcatcactagctagtcttagtggcttttaaaagaataagtaactcattagtatcttattggtatcattaataactaaaaagtaaaaaatgtatgtggaatacttacaataacaaaaaaaagaaaaaaaaatggaaccgagatttttcagatttaggtataattaaatttgaattaggtatccttaaaaaaatagtttgaatcagttataaaaatgctatgtggcacattatttaattatttttttgagatatttttgtatatattttgaatgtaatgtatattttatttatttaaacttccctttcaaatctttaacaaccagctatcccaaaacaatcgtatggaggaaatcctaaagtgaaaatattgaacaaaaaataacaagaaaaataaaataatatacaaaaatatctcaaaaaaaaactaataaagaaaaattaactaataaattaactaattttttaataaaaaaattttaaactagtttattaactaactagtacaagaaaaccacaccgaaataatcataaaaataacatacaaccaacttacaaatattaaatttttactataatatttagtatttttttttttagtttttattttttagttttttttttttttttagttttttaa

SEQ ID NO: 264636 - DNA, 744 bp, Cannabis indica
attagtggttcttcttcattattttcttcgtattaaagatgaaaaacgaccgatcctgccccaagagacagatgaaccaaaaagcaagttagagacccttcttttcttcaatattaattataacaccacgctagctagctatacacaatacatattaatattattttcttattttacaccatattgttattgggcactaatgacacttaatatatcttctaaatgtatcatcttgtaattaattatcttcttgtaaaactactatggattattttttaataaggtttgcacaatcaattttattcaatagtccatagaatcaaaaaatctaaatttaatttcataaaaaaaatacataaaccttaaaagtttaatcttaaaattctcctaatttattgaacgattttagtcatataagataccaatagaaagtgaattttataatgaataaaacccctaaatttttaagattaaacaacgaaaaatttaacaaaaaataataacaaaattaatatgcaatggtaaaaaaataacatatacatattaattatataaattataggttctaaatcatatacaattagcaatctgataccatatgttaggaaaattaataataaactcaagatcaatttgtatataacatagaacacaataataatatacaataattaggtatacgtacacaattaccacataatttgatagtgcaatactatcaaccaagtctttctctctaaatct

SEQ ID NO: 264637 - DNA, 601 bp, Cannabis indica
ttataattattttttaaaattattattacgtgggccacctgtgatacttaactgtgatttttggacggaggggtacagagcaaaacagaatacgagtttaggtagttttgcctccaaaaaatcaatttttgtggttaagtattaaaaactttaaaattcaagtagtttagccgccaatatcccttttattattaggttgtattggagaatattgtcctacatggattaaatgtaaaagtattgagccatatataagaacatgggctactcaactcatagccaatgtgttttgagatggaaccccatgattctcaacatggtatcagagccatatccctagcgggctttcgatccacacctatccaaatggttagctagccgcacgagatccagatggtgcaaagacacttgagatccgaacaaaaataagcaagcaaatgacagggtatgtgataaggtgattcaagattggtgagcaaaaatacccaccatcttgaggggggatattggagaacattgtctctcatggattaaatgtaaaagtattgagccatatataagaatatgagctaatccactcatagccaattggttttgagat

SEQ ID NO: 264638 - DNA, 3064 bp, Cannabis indica
gtatacattgtgtcaaggttaccaaccatcatccaggaagctcttctacaagagcagtgaaactgtgccatgagagatgaggtcctagctcttgttacaaatggaacatacacacttgttcctttacctgcaagaagacaaccagttgggtgcaattggatttacagagttgaggaaaatcctaatggttcaatcaacaaatataaggcaagattggttgccaaagggtttcatcaacaactaggatttgattttactcagacattcaatcctgttgtgaaatagtgactattagaatggtattgaccttggttttatccaagaattggactgtgagataacttggtgctttcttgaattgggatttgcaaaaagaagtgtacatgacacaacctcttggttttgaaaatccattagcaccttatctagtttgcatactccacaaaagccttgtatggcttgaaataagcccatagtcttagtttgataagttacagtagtgtcttgtatcctttgggtttgtcccatccaaagctaaccattcattattcattcaacattttggctctttcacaactctagaattggtatattttgatgatattatggttataggtagtcatccagagatcattttaggactgatcaaagctctaaataattagttctctctcaaagatctaggaaggatgagttactttcatggcatagaagtgtcatacactaataaaggtatgtttttatctcaatctaagtatgcaaaggacctattgggtcgagctaaaatacaaggggaaaaaaatcatcatccacacctatgactagtggattaaacttgtaagcttatggaagtgatctagttgaaagcattcaattgtagagattcattgttggagctattcaacacctcgccattattagaccaaaaacttcatatagtgtggataaagtatgtcaattcacgcacaattctcttcaggttcactggatagttataaagaggattttgaggtacattagaggcataattgactatggcttacatctaaaatcacctactgatatggaccttgtagccttctatgatgcagattgggctcttgatccagatgacataaggtctacatttggttttgcagtctactttggatccaatttgaccacttggcaaactaagaagcaacatacaatacccggatcaagcactgaagcttgatataaaagtcttgcaatcacagttgctgagatcatctgcctgtattctatgctttcaaaattacaggttcatgtaccaaaagtccctacaatctggtgtgataacttaagcacaatcatgttgacacttaatattgttcttcatgctctctactttcttagggataagattcaacaagacctcattcaagtgaaatatgttcctgctatagactaaatagaagttggtctaaaaaaagctatctcaagttcgaggttctctacctttagacccaaactcacaattaaattcaactctagtctagtcgtaagtttgagggggcatgttagaattagagttagctatattagttggtttctgctagtatgcatgtcaatcagtcggttaggtttgtcattgttagttgtaaactagttgccttgtctctaatattataattccagcttgtgtaaagcattgtatgaatctttccaagcatgtgattgttaattagagaatctttcattcatctttggatctctttgtctctctttaatctctcaatcttctctctgcttatcttttttattttattgctttccaaatacaatatctaagaaatttattattcttattcaccaaaaataaaatagctaaaaccccaagggtaagtgaacaatgtgaactatttatatattaattaaaagattttctattttatttaagttaacaaaattttgaagggttaaattatgtttataatgtttccttatggtattgacgaagaaaagaacattatattgatggttaacaaacaaagttcaacagactctttgtcctttctccaaagttttgccttcatcgctaaggaaatgccaatattttctatcacttaggtcgtgctccgacatgagaatttgtaggcaagtatgttaggggcttatgtttgttgggacaattgtgttttgtggagtttattggtgttcgacaaccatgaattctttggtttgtgtgtcacaaccaaagggaagaccatctcaactactttaagggtccttggcaaaaaattataaatggacttcttttgaaggaaaaaaaaaagcatattatttggtatataatggtaaaaatataaaataaaattaatttttttaaaaaaaatatatgtattagaatttttgttctttcaaaaaacataaaaaaaaattagtaattttgaaagatatttggggcaaagtagtaagccttggcatcaaagattcttttcaaatatgcagagactttcatttatagagcttatgttaaactcttatttgaacttacaataactttgatatttttctaataaaaggcatttacattgtaaaacaaaacttgatttatagattgagttttatcacaagtgagtatctattaatatttttatttttaaagttggtagtaatatggccatttggagcacatcatatatccaaatagctaagtcaggcacattaaactttcaaagaaaccaaataagtgtattttgtgacatgaatcactttggaaacttgggtttaaggaaatataaggcttgtttcgcattggcttcttgtctcaaaactgtgttttaacaaaaaaataagttttgaaaatataagacgcgtctggttaatattttttaaaaactgagtttagattcttaaaaaaaaataaagaaaaagaaaaaaattacttcaacactccacacctcgacatgaactctaacccaacaaagaatcaaatattggaccctgggctcgagcatggactccggacctggaccggaacttagaccaggactcagacccagacccaaaaaaaaagataagagaaaatgatgagaaaaaa

SEQ ID NO: 264639 - DNA, 873 bp, Cannabis indica
ggatttcaaaaggtccaatgaaccttgggctaagctttcctttcttaccaaagcgcttaatgcctttcatcggcgatactcggagaaataccatgtccccgatctgaaaatcaatatcccgtcgctttggatcaacataacgcttctgtctgccttgagccttgagcattcacgctctaattttatcaactgcctcacttgttctctgaacaaactcgggacccaagaactttctttcacccacctcatcccagtgaataggtgatctacattatcttccatataaaagctcataaggggccctcccgattgttgcctggtagctgtttttatacgagaactcgatcaggggaaggtactttacccatgatccttcaaagtcaagcacacatacccgtagcatgtcttctaagatctgaatagttctctcaaattgtccatccgtctgaggatgaaatgctgtgctaaactttaactaagtacccatagctcgatgtagactctcccaaaatctcgatgtaaatttcagatctctatccaaaacaatggacttagggacacaatgaagatgaaaaatttctctaacatataactcaacatactgatcaatggaaaagtttgtctgaacaggtaagaagttcactgactttcaaaacctgtccactatgacccacactgagtcgtactgtcccgtggttctaggtaatcctaccacgaagtccatagcgatgtcttcccatttccactctggaatattcaatggctgcagcaaccctacaggcctctggtgtttagccttcacttgctgacaagtaagacatttggcaacatactcagcgatgttattcttcatgcctagccactagaacatgg

SEQ ID NO: 264640 - DNA, 102 bp, Cannabis indica
agagagagagagggctcaaaatttgactgaaaggcttgaatgcatcatctttcaatttgaggccatcactatctatttataggaatccaagtaggtttaggt

SEQ ID NO: 264641 - DNA, 1461 bp, Cannabis indica
ttttaacgtactgtgcagctcattgctaatcaacgagattaacgaaaaaactgatcaattaaaattcgcttattaattaaaaaccttaagataatatatttataaaattctgagattccgtttacaaaatacatttacaaaagtttaatattcatatacaaaagttttgtcgcctggcgactatacagtaaaagccctaatgtcccaaagatcgtacgctccaggcctaaccgcctcgacatgtacaatcttcatctgtgagtcgagagactcagtaagaaaagcataacataaaacataataatatcccgggttgctcagccttagccttgcccttacctacacatagaaataacactatgagtcgagagactcagtaagaaaagcataacataaaacataataatatcccaggtaataactaggcgcccatacacccgatcataaccctatctccgtgtcccacacaaaactgagtctagaatgttcttacgatagtactatcgaccataatatcagcctatactcggtactctagtcatactctagtagcaccaatttgatatcgtcgatcttgtacttgagccaaaattacatctatcagtatcattacaactctatgtatactgataccgctatcaatgtaatctaacaggctccataaacatgcacgctaaaaatgtaataacatatgcatgacattatactaatcttaccatgattgcgaattcagatgtgctggccaacctgggtggaacaactgttcggcgaattgtaggctcctaaatcacatcgataacaacatggacaagtgacacgctaaatcacaaccggggacttaggttttaaaccaaaactctatctactgtaacttaacatggtaatatcctaaactagcagggaattaaccaaccaaagctctgaaactagcaggaatcgacaacacaaatttttcaggaaacccagcagcaaattcgggtaaccggttttacaggtcctgtaaaaccggttaaccggttttccccagaatacccaaacagaaccataactcaaccaaattaattccaaaccttccaaacctgcatattataccccaatagacatattccaagcaataaaacaactacccaagctcagaatcaaaaatcactattaaagagccaagcttgagttctaaaactcaaagcttgctcaaacaacaaaccagccatcaaaacatgcttaattcaacatatctaaacataaataaacttcagaaaacaatatcaaacactgacagcaaccacagaatcctaaattaataattcatgcaaaactctcaacccaaaataaaaggaaactaaagagaaggttactaaagctattacctgttgggttttatgccctaaataaaactcatctcaatataatcagatttacttattaatatagatcagaaataacatttaatgttgcatggtt

SEQ ID NO: 264642 - DNA, 348 bp, Cannabis indica
taaaataatttccaacatcttcagtgtattgcgaggaaacaaaaaattcgagtggactaaagagtgtgaggaggccttaaaaagcataaagaggcatctgtcaacacctccagtttgtgagcccctcctaagggaataccaggctaagggcttaaaaatggaaaaatacctagagaaggttcggaagaacttggaaaagtttgattatttcaaaatcgagcaaatcctaagagaacaaaactctaatgccaatgccttagcaaaactggcctcgcagaatgaactagatgacttgaacttggtaccggtggaagtgtttgttgggttttgtgttggaaatattttacc

SEQ ID NO: 264643 - DNA, 692 bp, Cannabis indica
taataaaacaacattcttaatatgtgtccatgataaattaaatatgtttagacattcatttttttttttgaacacgactagataacaaaaaaaaaaattaatataacaattatactgtaatatgcaaaataaataggcatcatgaaataatttcagagattgcataatcaactccaagaaaaaaaaaacacttgtaatttataaactaaatttaaaagcatttactcattacaaaacacttcaacaccaactgataaatatacacgtccataaagtactaaatacacaatcatttttaacttagttaaacaacttaataacagtaaaaaaacaactaaaaaataacctcactttaatacacactttaaataggatgacacgttgcattaactcaaaaaaaaaaaaatataaattattttaaaaaaaaaaaacattaaaaggaactacaaaatgcttgtacaccaactcaaaaatatatgtatccataaaaaataaatagaaagttattttttttaaacaactaaataataacaaacaaacaactaaataataacctcaggaaaaacaaacaaactttttcttttgttgaaaaataaaataaacttagaaacaactaaatatcacttgtaattcaacttaaaaatatatgtaccaaaaaaaaaaaataaacatatactcatttaggataattt

SEQ ID NO: 264644 - DNA, 865 bp, Cannabis indica
atattttttttcttgtgacaatatactttggaagtttagatttttaagcaacccaaactgcccaaaaaatcgcataaaactgccccgtaaaaaaccgcccaacccaaacttttattgggcaggtatgggttgtgattttaaaaaaccgccaaataaaaaaaccgccaaaccgcccaaaaatcgcccaacccaacccatgtgcaggcctaatttttattatcgttttattgactccatatcgttcactacaaatgaggtcaacaagtatacattttaaccgaccaagctgattggtccattataaacattagatgatgcacattgtgctttttttgtttgtggcattgtacagtttatttctttcctcttcttaaaaatataatgtacaaaagtaagtgaacaactactactcttttatttttccttatcaaatagccaccactcaactaaatgtcatactataatgtttggcatcaggtcttccacaaatttttgttgatgtagtactttttgaatcaatcaaaaatggtttacagctacactagtaaaagtttttaatttctttttttaatagtaataaaagttattcttttttctttacacaaaaataataacaactaaaccctaaaaacaccctttttataaatatattttcacaataaatacacacatttatttaatttccatgttacattaaataatcagaaagcactgcatgggttctcatgcctgaaatgcataatcccaaagaagaaaaagaaaaacaattgcataaacagaaatcgataaaacttaattattggttagagataggaccacttattgaaacaccatgaagagaattaatgttgcttacattaacgaa

SEQ ID NO: 264645 - DNA, 1292 bp, Cannabis indica
atgtatactccatacatcagatgctggtaaactttgccaatgaccttgaaaggacataacacttatcaaaggtgtaagtataccttatcgctgattatcatgccagtctaaatccaatgaactgacaaatcatgggaattaaactttttgaacatataatcatgaatatattctattgtactgacgacactataattatgaacaaatatatacatatttatatatgttctggactttatagaatttacacattaagcataatcatgaaataaatcatgtgaaccatgcaacataaaatgatatttctgatctttaataattagtaaatctgattatattgaaatgggttttatttagggcacaaaacccaacaaactcccacttgcactaatataaaacaaaaagtgcatttcaattaatctcaacaccttgatatccagatcaagtgtagtttatagtattctctccgtaataggatctgacaacactactacaatttgagctttaagtgacactatttagtgacaggcataaaatgtgcgcgtcactaatgagttagaagtgatttttagtgacatgcagaagtagactctaaatattcagtgttagtcacctgtaatgtgtgtcactaaaaataagaggtgtcactaaaagataaaacctaaaattttctaattttttattaatttaaaaaatattgccatatagtgacgcaccaggcgtgactgaattaatgtgtcccgacacacttgacgcgtcactatatcataatcctaaatttttattttttattttttaaaatacagttttaatatacttttaataaaaaatataataaaataataaaaaaaaaaagaaaagctggccagtttttcattatttattaatcaatgttgaaaaagataataaacaataaagttagtttgcacgtgtccctagaaagaaaccctatttctttattccccttcaatctttacatttagaaaacttttaccaaaaaaatcagccgtttctttttcttctccaagatgatgaaccacctccgagacgacgaagccgccgccattcttggcctcccaaggccaatcaacgacggatgagagactaacaaaatgatcaagaaagagtagaagaggaggacacgtaagctttggagcttgttctcaagtctccgagtgttaagtctatatggtaagatttattggattttcctcaatgggtttttcaagatttgatcctaattgttaattgataatttgatgaggtttcctcatgattgaacagctataatt

SEQ ID NO: 264646 - DNA, 623 bp, Cannabis indica
tttaaaaaaaaaaaaaatgtgtctatcttgtcttatatatttattgctaaatgcaatggagagtaagtcatttagtctttttattattattgaataaattagagtgttgagatggatgtacctttcatttgatttaattatatattgggacgcactctttggttttcagacacgttcctaaaagttgtcacttcctgtttaaagtggaaattttttaaaaggaaaaatattgatccccttattgagacgacaagtgtgctcgtctatgaggtgcacattctagaaagttaaatcacactattgatatttcaaatttcgtctcaaaacaagaaattaatatatacactaaccagggagtaaacacgtaacactcattaaaatttatgggttataattatatttttaattttatttattatatttaaataattattaaaaaaaattatatttaaacaaagatatataatgtggtataagtaggtctaaatgtaagtttatctaattttcttactattatttactaataatcaaaatatagaagaaaaataaaataataattaataaaaatttataaaaaaataaaaacaaaaaaaagtttaatatcatatatatatatatgttca

SEQ ID NO: 264647 - DNA, 546 bp, Cannabis indica
aatatgaaaacattgaaacagagcactgtattttctataaataaaatcttaaaatccgtaaaaatatttaaaattttatacaactatatttttataattttttttgttattttttatattttcaaaataaacccttaaagtttttgggcatatggaattattcaatgtaagaatttgaatttgaattttggtttggtttatacttttttataccatcaaaattaaaaactttgataaataattgtgagttgggcctgccttaattaagttggacttaagtttggtttgtaaagtaaagaatatccattccatctcatctcatatgaaatgaaatgaaaactcactcactcactcatatcaatctcaaaattaatggctataatttgtttctttaaattcaagcttgttgagtttttaattatcatatttattaatgaatgatattttaataaatatattttcttctatgctctagaatttaagaagttattacaaaatacacaatgatttatgctgtagcagagaggagcatgtaggacctgtagc

SEQ ID NO: 264648 - DNA, 916 bp, Cannabis indica
ctagcgtttttagctacaccatctgccaatatattaaagctacgattaatgaaagaaaaacaacaattatgaaacgttttagattggttcatgattaaatagaacactctagccaccctccagtcagggactacatttgctgataaagcattgactgctgtcttcgaatccgacagtatatgaacttctcgccaccctaagtcaactgccctgttaagagtaagaaaaatagctgagagttcagcttccagaattgaaagtgcctgaatcttttgcgagctgacaaaccagcagccagttgaaatgtcgatgctgattgcagcaatgcctgcttccccttgaattcacgagacattagtgagaattatattgcggataccattgcagggctggatgttcaacatagcagggttcacacatgtcccatgcctccccatatctgtccttgctccaccattgcagcaatgcctctcagatgtaaatgaatcttttagctctacaacattcttttcaattttaatcagagcggcagggacattaacagctatattttgaaaacaaaaagcattcctctggtgccagatttcagacatgatgcagccaaaataggtaagcaattccttcctatcaaaaccatcgaaaagatcaattaacatttccagcatactgatcacattatctgctggtatgtcatctagtttcagagccagattactcctaaaccagatagctctggagaagctgcagttccaaaaaagatgaaaagcactttcctcctcaacttcacataagctgcacattttattctgcagaaagtgaagtcaggtttgttagaaaactaataatatacccaagatctatttgtatataacatagaacacaatagtaatatataataattaggtatgtgtacctg

SEQ ID NO: 264649 - DNA, 742 bp, Cannabis indica
ttagtttttagttttagtttatttgttaaacgatctgagattaggtggctgattatttggcttcgtttttctaattctaattatgatcgtgtctccaacgagagagatgtcccgattggactacaggataatattttagctgattttattaaaaaaaaaaaattgccaattaggttttctccctccaaattttgcagaccgttaaaatttctgagattgttggacgcaaagacttctgtccaattcctttcaattttaattagggatgtgcaaaaagtcatccaatccaattacaaccgactgatctaatctcaaccaatctaatagaatcggatatccaatcataattggatcggatcagatgtaaattttaaaaatccaatcaaatcagatcagttgttggatgggacatttgatctaatggataactcaccaaaccaattcaattattatccaatggtcaccaattatatttatatatttttaaaatatatttataattttatatatttaatatatttatttaaaaatatatattaattgatctaatatacatttaacacatgacattaatcaaaaaatcttagatctaaaatattaattcttatttttctaaacactaataaaattattaatccgtattgaataaattttattttttagtggttttattataatatcatgagaattaagttgaactaaactaatatttattatgcatgttggattattaagttttaaa

SEQ ID NO: 264650 - DNA, 1024 bp, Cannabis indica
aaaaatcgacataactttaaaataaaaaaaaaatttaacaaaaactaatgtaaatatatcataatacttgatatgcttctaattttaaaaaaaaaaaaaaaaaaaacttaaaaataattatagatttttttattgttaagacaatataagtaataaatatagtaaaaaagttgtttcttataagttttaaaatgagaatatttacgtaatgataagatttaaggtcatgtagaaatatgataaagtgttgttttgtgttaaatgtagcacaattttttatattataataatgtcaaataggaatgctagtttgttttagttaaaaaagaaaagaatagtcaaagttagcataaaaaggaagtcaaagtactaaaaatgttgactttgttgaattaataagaagaccagcgtggccgcctcacgcgattttaggaggtaacgtcgtcttttcttgctttactagtcagtccctcattccctcttctttatataaataaacccttcaaattctaattcaattcaaagatttctaatcattttagatataaaataaatactcttttcgatcgatcctatccacaatgaattctctcttcagttgtttcgatgttttttgcgctgaagttatgttgggcaagactctcaagatctcctccttcgcttctcctttttctcccgtgaacaataaagcactggatgtcgataataaggtcttcatcggtgaacaagatcgcaagtctttgccggcggccaatgatcagggaaagaagaaggtgatcagatcggccccagaatttgatggattgaactgtttcgagactttcgtctcttattgatgagatatatttattcatttgtacccagccaattttgattctttcacttctttctagctagctaacttgaatcaatatacgattcttttattattttactactatacattctattctttgttgtagaattatacttataaatttagtgacatttatttttatggaaaaaagtattctgttcttaattt

SEQ ID NO: 264651 - DNA, 899 bp, Cannabis indica
ttgtttatatttattattttttgtgttttttttttctatttggttgattaataaaactggtatcaattattttcagtgtatatcatttttgttttgttttcataatctttattattgttgtgtaacgaaactagttccttgatgaagaaaccagtttcttgatgaagaaaccactttcttggtgattattccagtgattttgctggcgacaatgccaattctgacgacttttttaacgccggcaataatttcggcaattttttctacaccggcaactactctggtgacttttacagcatcgacatcaaactccagaatagtcgtcggaattggcattgttaccggtaaaattccggaaaaaatcaccaagaaaccggtttcttcatcaagaaaccagtttcttgaaaccgtttcttggtgatttttccggcgataatgctaattctgacgactttttcggtaacggcagcaattccggcaactttttcggtaccgacaactactccgacgactttttcggtgccgacaacaaactccggtaacttttcttgcacgagtgaaaattccggcgatcacttatttttttaaaaaaaataaatatgaaggaaattttaatattttttatggtaatttaattaagtttttattttttatgaatcttaaattcagtattttttttttttaatgttttatatgggttttttttttttttttaaaaaaaactatacttttagtttgattggttagataatgccatatttagtgatttttactttttatgtcatatttatcataaccttaataattttttttatatttttgaaaataaaggcagttgggaatattggtctttttatgtgaatattcgaagatatatcaagatgtttcagataaagtca

SEQ ID NO: 264652 - DNA, 2424 bp, Cannabis indica
gtttgatttggttatcttgtcattagaaaagcacaaggattgaatgaattttgagcaagttgatacacattagagaatatgagataacaaatgtcgtttaagctctgtataatgaatccttgtaatgattgctatcatgctgtaagtaacctgtaatgattaggagattgaacaacaatagtcctcatcttgctttcttgtatatataaacatttcttgtcactaaactgttaaaaattttgtttgcttgctcttatgtattatcttgaaaaaaggtaacaattttgaatgactgtttaacttgctatgctctgtgttcagaatctgacaattggtttttgcttgctgaacagagttatagtgcagagaagatgctctcaaacccaataccaatgctttgtgccgttacctcttccttaactcgctatgcaccaactctgattcaacccaactcactgaatcacttgagcttccgagttgggtcaaagccgttgttccctcgaaaacttccactgatgaagatgacaatgaagaagatgatgattttgttattccttctctcgctcattgggtcgaatctccaagtcgaaagcttgttgttgaacttgaagcccgtgaacaacttttcaacaacactatcgagtcagatatcgataagttgagcaatgttcttaagaaaaggtacgcttctcctagaaaagtagctcaagaacttgatgggtgtggtgatttaaatttatcaggaagtttcgacttgggtaggaacacaaacaggttataggcattccccagaatcatataatctaatggttgatatcctgggaaaagctgatgagttccagcatatgtgggaattgattgaggtaatgagctctttggatggtcacaagagctcatttgtatgcggaagccatagctgcttttaaaggaatggagagacttggtataagcaaggacgtttcaggtttgaacatacttctagacaaacttgttaaggagaatagtgttgagcatgcccaggaagtttttcttgagtttagggactgtgaagaccacaagtttcaacattttagtacatgggtggtgcaaagttaggaagtttgatactgctaggaaggttatggaggatatggagaaaaatgggtatcaacccaatgcatttacttatacttgtttcgtcgaatcatactgtcgcgaaaaggattttcgaaatgtagatgccattcttgatgaaatgaaggccaaagattgtgccccaactgttgtaacatacactattataatgcatgctttagggaaggcaaaacagataaatgaaattgctattgtgaccattcacaagaagagaaagctctgaaattgcttaagaaaatggacctcaaaacttatgctgccttgttaaagatgtgttgcaagaagaggaggatgaaggtgcttcactttctgctcaaccatatgtttaacaactgattagtgggctttgcaagagtgggagagttgaacatgcttattattctttctttaaggaaatgatttcaaaggatatggttccccaggacagtgtttataataggttgaagaaggaactccaggccaaggaaaaacaagatattgagaagttgtttttgaggttgcttataaggtataatgtgtgaggagatgaaattgtgtattgttgtgttttactataatttattaacattattaggaagtaccaagattttactattatttcatgaggtgattcttggggagttattgctatggaaataggtgaaaaacttgaatctttgaccttgacagagtaaaccacataattattccttttgattgttgattacaatatgtaattacattgaacagaaattaatgaaatgaaatccttaacactctgtctctactaaaaaaactaaagagatatctaacccaaacagctttatttttttagagaataccatccataacaaaacaaataacccttcaaaacaaatgtacttcacttgcaaacttctattaaataaacaagaaaaaggggattctcatttagttatttgtaaaatttaattcaagtaaaaaaaaattgataaaatttagttacaactctaaataactagccaaacaaaattaactttcaatattattaagactagtaatattattaacttacactgttgttaatgatttaattaataaaaaaaccaacatatatacacaacacaaccaccaatgtctctttcactaaaatacataattaatcaatgataattttctacttggtcaaaactgaaatcgaaattgtattattttgtcttttttaattttcaaaatcatacatagaaagaatatttctttatcttattagaaagattttgtgtccttaaaatgataattctaatggactgaaggattttttttttttttttt

SEQ ID NO: 264653 - DNA, 763 bp, Cannabis indica
attacatccagaggttcatggccgaggctacaaagtcaagggccttacagaagagggccgatatatggacataatgggggcatactcttattgagtgacttttcgaaagacatctgaaggatctcaaccaacaacatgaatctcatgacctactaggcgcacaggcagacaccaacaactcttcccaaacctctagttgcaagaacaccagaaacaagcgcaagactaacaattctggatggaacaatggcaaaaaggggaagtttaatacttctcccacgccacaaaagaacaaggaagaaaagtacacctacttcaccctcctgacagagaaaccagaggccatcttcatggccactcagggaacaatcccctaccaaaagccctttcccattaaaagggagataagcaggagggacatgtagaagttttgttggtatcacaacgactttgaccatcacaacaatgactgtcgaaatttgaagagggagattgaatacctcataagttataacaatccccacttgcgtcgttatgtgcagaatgaccaaactcaggcacaaggtgcccagaatggagatccaatgccaccaccaattgtaggacacttaggggtcatcattgccagaccccatattgcaggtgagaccgacagagctatggattgctatgcttggacactccgtcatgagcctaaaagtgacatcctagctattgaagattggggctctaagcaaccaaagcttatagagcccacgatttc

SEQ ID NO: 264654 - DNA, 1441 bp, Cannabis indica
acttggtacactggtcatactccaactgctagtcatactctagccctaccgatgtgatacaatgtcagcctatactcggtacactggtcatactccagttgctagtcatactctagccttaccgatgtgacacagtcggatggtacgaagcaaacatacatatctaatgtaatctaacaggcttcctaacatgcacggtaaacatgtaatacatatgcatactgttatactaatcttacctcgattccgaattcaggtgtgccggtgaaccagtgtggagcgaattgcacggcgatttacaggctcctaaaccataacaatcacaacactgataagtgatacgctaaatcacttcccggggacttaaactagaaactagaagtttccctatcgataaaaagcatggaaataccctaaacaacgtaaaaatgggaagaactagggttcctaatttttccccaactggtagaccggttcagcaaccggaattccggttctgggaattcctgaaacaccatccgaaattccggttgctgaactggaattccggttctgagcaggaaacaaacaaaaattcataactcgctcaattcatccccaaatcacaccaaaacttccagacctgttctaaataccccaataaacatttctaaagcatcaaaataacccagaaatcacagagatgaaaaatgtcatgtgagctccaagctttgagttcaaaactcaaacttggctaaagctcacctacatgcattaaaacctgctttaagctactcaaatatgcataatataatctctgaaaacaacgctaaacaattacaacagctacagccacgaaaatcatcaaattaccttgaaaatcaaagttttgggtttaaaattccacacttagtaaaaatcaacaaacaccaacacaatcttgcatgaatcaacatattaaatcatattctaacttcaggaatcaacaacaaacaaccacagccacaacagcaactaaactccacaaaacatgcatgaaccatttccttaaaaatcaagaaatcaaaagggaagttgataaaaaccttaccttgacttggagattacaaacaatagaagaaaatcacttgaatcacaatgaaaactcccaaccctagcttgccaagagagtttcgaaagagagagggcaagaggaagagaaccttttcttcaaaaataaagcttttgattttttataaaatgggagaaggaaatggttaatctacataatattcagcataaacttaattaaaaaatctgatttaatgaacttaattaaacccatataagacaaaagctctaataggcaaaaagactattttgccccttctatactaaaaatcataaaagggtactaaagggtattttgggaaactctaaaatcccatctattcatgacattcccaatgtctaataaaccgtc

SEQ ID NO: 264655 - DNA, 775 bp, Cannabis indica
ggtttgtgattagtttacagttagttgctataagtccttctagggattataccctagtgataggataatttcagaatgatggaatatatgtacttagtgtaaaccattactagattcatggatgacctaatcgtgatcttaggaaaagctaaaactattaaccaaggtttgcatgtttgatagctattctaagaaaatgactaagtctgaaaataaagtagcaaagtagatgatatattttttttctttgattccaaaagtgttctatcatcttattcgaaataagatggtcccactacctgtgttttcttgacacaactgatgacgacaataccacttatgttcttagatagaaagtcacagtaccttgtcgtagtgggacggtttcaaggagctcaccctgttatgacttcgaagacacttgtgataaaatccattgttcgtttaaacaagtaatggatagcagagtacaccaaattagatatgtagacttgccttagtgctagaaagtctgctgatgagatggtgattactctagaggtagagtagtgattttggagaagtgtaaaaacctatctgaagtctctatatctaccaaagagactgaatgttaaagttgcaggaaagatacttattcagtctatggaaagttctatacaatttttggcattgtaccaacatttattaacttctagtgttacttcttgactaacgcagaagtagttgccaaagagtaaagaatccagtatccctagaggagtagacttatagagag

SEQ ID NO: 264656 - DNA, 510 bp, Cannabis indica
ttaatataatttataatatattaaaataattgtagcatctttttttaaaaactgtaaatttactactttgatgatatttattgataatgcatgcatgtgtgtataaatatatatttagaaataattgatattacatctctactttaatttttttgagttttaaaaaatacatattggtaattaattttttcttttaaaattactctaaatatctttatttattttttcctttaactcattgcatattagttaactcataatgaccgaaatataagacagtaacacaatgtttttcttctatagtagttaactcattatttggtttattttatgttgagggcaaacctagctaatgacaatgatatgacaactacaagtaagatgcggtgatgatatcagttttcaatgtagtggcaactacaagtgagatatagtacaaccttgaatatagtggcaacaacaaatagacacggtgataatgattttgaaatcatataatgagtttttttt

SEQ ID NO: 264657 - DNA, 1395 bp, Cannabis indica
atcatcatttgggagctagctatatattcacatttatatatcacacattttagactgaatctctcaatatattattattattattattagtcaaagctcttaaaagaaacaccacatatatgtacatgattatatatatataaatatatattcctagctatatatagccagaataaattaaagtactgatcatatatgatgatgactatagtgtcccttgaaaatctaagtgggatcaactatatatatatttatataaaaacacccaatacattttgagaaattcatacattttgttaagaaagcatatattataaattaatatatatgaggtttttgatcaagctaaattaattagtccccacaccatgattctatacatactacatgcaaaatttaattagtcatatataattatgaatatttttgttcaaactgatcttataaataaccacaaataaactagagaggcctatatatatatatttgtaataaataaaaatagtactgtagaagaaaattaagacacaaaatatatgtgaagcaaaaacaatttcattcatgggtgatgacccaagatttggaagtgggcctaaggttttctttgtccatatatatatcaatagttaaaattaatggaaggaaaaaagaggatatatatatatatagacatatcagatatgatatgataccatatagatgtcacagcactaattaattaataataatataaagaagaagaagaagatgatgatgatgatgatcgagataagaaatggcactatagttatggatctttgtaagcctatttacactgtactctgtaaattaacactttggtacttattgttctcaacccaaaagaataattaatatagactgtagatgttgaaagtgcccattttatatataatatatattctttttactatagtgctatatatatatatatttatatatataggattcctcttctaacgcccaagttgtcataactatttatttatttttggtagtactgttattataaattatgcatataattaatcacctaaacaaaaaaccactatgcatgagagtttgacattgtgttcaaaatcttttcttttcttttttggggtcaaatttttaatttcattttgtgtgatcttcaaaagttgaaactcaatcactcaattgaggaagctagcaaactcacaacaaaattaagcccatgagaggcaaaccctagattattagaaaaactaagcacgagttaatattctaatttaaaataactagttgggtctaacgtgcttcgcacgtgagcccatagttcaaatattttttcaataaatttgtaatatgttgattttttttaccatctctaatgggagctgtaaaaattgatttata

SEQ ID NO: 264658 - DNA, 1357 bp, Cannabis indica
ttttgggatcccaactattttgaaagtttaaatatattacaagtttattttcattctgtttaatataaaagtttaaattctgcgctatttcgattagtaatcccgattaggggattagagtttcataagtattttgggtagcgtgcctgattatttagggcattacatacatggttagtaggcacaggtgcttgatgactctcccttacggtctttaatcatgcaaattccttttaaatgaagtaaacttgcgatcagtgggccttctcgctgacaaagaatacacttgttattataagattcccaagtatacttcttggcagcaaataattgttccacccaaagaccaggcctgggatcgcttggcccaagcacaataccttcaaagcactgcccctcaagaatccggtgaagaagcatcctgaggtaatcaatgtggttggtcacctactgtacttagggttgagggtaatacattagttaccttccaagactgtcgtcttaatttttatacttggaattccattcttgtggaccgcattgctcataagtttgatagttggtaccctagattccatgtccagatcagctatcacgagtcattttatggtatattcaaaattacaggctgcatggattttagcgaatattatggtccttttaccccttcatctagtgatagctcatcttctagtgattttggtaaatcccttaggtggaaatttatactcctcccctttttaatcgacttttataatgattgtagcacctcgttttgttttgcagacatgtgttatgaagacatcctggatcgttaggggaagaaaagatcatccaactctggagtccccattgctgccgaggtggttcctcccaagaagcaaaggaaaaccaccgctcaaaagaagaagttaccggccgagcctattgatcttgaggtttcggacaacgagatcctagatcaagttcctcctccagttgttcctaacacaaatgcccctcatcctaaggcgaccaccgctaccgcttctctgagttaggccatcaagaccctgtcggtcgcagctggagaagctggctctgagtttgcccaggcatacggggtcttttattggcgcaaagttcaaactctccttcctccagattggggttttctcaatcttaggagtccaaaggagatgctttcaaggaccttggtctatcacttcatggtacgtcgactttgttaatataattatactatctttttatacctcttttaaactcatatatctacaattctccaggcttcctttgcttcttttgcttccaatgaactactctctgagcgacttgagtatttggagggcgagactca

SEQ ID NO: 264659 - DNA, 727 bp, Cannabis indica
ctcaatatgattttgggatctacataaggaaattaagaactgtatttgtatcatattttatatgtatacaatactttggatgagtagtcaaggtctgaagccaaagtaaaacaaaaatacaaggtttatatttaacagtttcatctcagtatgttttactcatgcgccacctttcaatgttaacacttttttcttttctcatggaaaattccaattttatggaagtgagcatcccaactttttcaaatcatactgatctaattaattttttaaattaatcattcttttaattaaattctcaatttttcaaaattaaaacttgctaacaaaaatatatctcccaagatctatatagacatatgtcatatcacctattgaaaattttttacacccccatccattattacttttctaaaataaaaaaaattaattgaaactgtttaattttttttatcgtggataaattaagtactttaaaataattaaatttactttaatttttataatttcaaaatcacatttttccaaattaccttcctttaggtactaactattatattaaaaatttctcatttttttttttggactttattcgatttatttattttttcaaattactgtcatgtttttactttatactttatattaaaaagtttacaattattaaaaaataatattatttatttaatagttaaaaaaacattataatcatttaaaataactagac

SEQ ID NO: 264660 - DNA, 750 bp, Cannabis indica
tttgtgcgattttacttgcactcataaatttttacttgtattgttttgatattttttggcgactgtatgcgattactgtgcgattttgtgcgattttcgatgacagtagctaatatacttttctatgtatatgtaatagatttttggcgatatagtgcgatttttgtgcgatatgtatgcgtatttttttagttttatgcgatttatttgcgatttttgtgcgacatatttgcgatttgacgtgatcttgtgtttttgcagatggttgtgcttcaaatcttgtatcctcggaattgggaggttgattactggaaggacaattgtgagggtgaggtccccacagtggaaatggggttggatgaggtcgaagaaacacaagccggggcgcaagattcgaccgcattcgagacccaagcccaacgggtggcagaatatgtggaaaggtccaaaattattccaccatccccacccaaggaaacagcagacgcctccacatctgccactgtgcccccaacccctgccactgtgcccccaagctctgctccacccaatgactccgactacctcttgttggctaagagattggagaaggtagaagcgcaacaacttgcgattctcactgcccagactgagatgaaggctgacttcaagagaagtcagaaagagatgaagaatcttatcatggatcaaattgcgaccgtgataagtttgttacagaagcagccttcggagccgacacaaccatcaggg

SEQ ID NO: 264661 - DNA, 1004 bp, Cannabis indica
gaggaaccgtgaggacgagccgatgaagattgtacatgtcgagcggttaggcctggagcgtatgatcctcgggacagcagtgcttttgtaattagtcgccaggcgacaagtttttttgtaatagacagtaaacttttgtaaagtattttgtaatcgggatcccgagtattttgtataaaatattatataagtttaattaaaaagcaaaaattttaattaatcacgatttctataaacctcgttgattagcaacgggctacacagtacgtttaaaaattacgtaatacgcctatgctagttatggtgttacatatcgggtctcagaactaccctgccgattgcctcgaccctggttccctcagaacctcttattctgacctgagccactggatgcagtaggtgcctttcttttctgatcagtggccgagccagtacctcccttactaaagcccggtgtaggaaaggtaggagccccgccaacaactagagtctctcgagattctaaggtgcacttcattgcaccctcagctcgcaatgccttatccaccatatcagcataggtggtgttgtcatcggtagtaatcattaggtcgtgtctgatttttgcatttaacccgtctaggtacttctctttcttactgaaatcggttggcacaattcccgaggccaaccttgctaaacgatcaaactgagtcatgtattcagtaacactcatgttctctttctgagtcagctgagtaaattcttttcttttggcacttctgactgcctcgttatattacttggcattaaacaactcctggaatttctcccaggtcattgtagtaacatcatgaattatggacaccatgtcccaccaaaccagagcgtcttcttaaaattggaatgtggcacaagccaccctatcattaccagtgatgcccataaagttcaagatcctggtgatcacagttagccattgctcgactttcatgacatcggaacctcccaggaaaactggaggt

SEQ ID NO: 264662 - DNA, 502 bp, Cannabis indica
aaaaaaggttggattggatcggatgctcacccctattatagacaagggattatgcaaggcttaaacaacacacaggcaatcggtgtccacctttacctgtcgtacatttaaatcttttatccaactaagagctttcttaactccgatagcttccgccagggcgggctccacttgaccatggaagaaaatggtacggccttcaattagtataccgttggcatctcttgcaactaagcccaaaccgtaactatgaccaccctcaaacatagctgtatccacattaatcttgataatgtttgcttctggtaaagtccaatgctcttttccatcacccaatcgaagctcagcatgtgatgcatccatatcggatttttgagtcttcttccattgatcaagataagttttagcaaatacaacaatgttcttagcttttacctccttctcgttccaaacaagattgttccttgcaccctaaattgccttctcgttccaaacaagattg

SEQ ID NO: 264663 - DNA, 584 bp, Cannabis indica
taagtcccgtgccgatataggttatttttgctgggtccgttgggtgtatgggtacttccagcaactcctctaccggcagtgattgttctttcgccggggtcgaggagttgattaattgctataacttatttttgctcctcaaagatgaggaataacactcacgggcccccagctggtcccctcgaatctcccttacctcacccttacaggggaacttaattacttgatggtaggacgacgcgaccgctttcattgcatgaatccacggcctgccgaggatggcgttgtaggccgacgggcaatcgacaattaaaaatttaactaatttgttgactccgttcgcgtagacgggtagttggacgaaacttcgagcaacagcgctttcacccgagaatcctaccagtgtgacctgggtatcctgggcttttaagtcttcgatttccatctctttcagaaccccagcagacagaatgttggcagagctcccagtgtcgacaagcatgcttttcattcgaacatgagcaacgtccagggtgatgacaagagcgtcatcgtgggggtgttctaattcagaggcttcccct

SEQ ID NO: 264664 - DNA, 573 bp, Cannabis indica
gttggggccaacacatgttattcctttatgagaaagttggatgcattaaggaaagtggaagcaagcagctccaagttttttaatttaatttaattattattgtctattttttttggggcatgagttacgagtatgaagctccattttctttaataagttgcaagaatggagctctgttatagctacttatttttgtgggcgtacgctgtacaggaacttacagttgttttgtcatctcttcttcccgtggtttgcatcaacaatgacagcaaagagaattcagattattcagttggactgaaggtgtgtttaccttatgtaaatgcattttttttaatacgttttggttgatagttttgtttcttatatattctttaattatttgagcgtttaattctcttagaatggaagacttttgtattattttttaaaaatagtttgaaatttatgttgtcttatgcattacccggttcttgttaatttcccacattattttatttctggacaaatgaaattttttctccttgaactattgcacttatctagtttttgtttttaacaaattactagtgt

SEQ ID NO: 264665 - DNA, 530 bp, Cannabis indica
ttgagccatttgggttctttggtggaacccgagatttcatcaacttgggttaccttcttcttgaatttcttgtcggcttggggaggacctttgaacatactctcaaaatctacgtccattcctgtagagacaaagataaaagatcgatgaagcaacaatggtaaaaaacaatgaattcagatcagaccatcatttacaaagaatgatgcttactttcagaaattccttgtaagaatcccctgtaacaatcggcagtatctacttgatttggattaatcggatggtcttcagtcttggaatcttttgtttccaatttaaactgaggtttaaagtttttaggaacatatggagaggaaaagcggttgatatattccggtattacaagttttgagggataagttttcgagcctggatgggacatctccataggagaataacaccccaatttctggatgaaattcaccaaaaactaggagtttatggaatacggctagcctgagctatcactttatacttagaacccagtaacg

SEQ ID NO: 264666 - DNA, 1291 bp, Cannabis indica
atacatgcatggtttagtatcttaatgcaacaataattagaagaactcgatcgaagaaaaaattggtgaatttgttgcaagtttgacattctatggtaagtttctttacaaaaatttttatttttagtgttttcatccttatattttccatgataatcttttaatcttatgacaagattttgataattggataaatattatgtttggtgtgattttgtaaaaaaaaaaaaataattgtatatgtgataatttagtgtggtagcaacaataaaagaaaggttattaaaaaaaaaagttattctataaattttgataatgtttggttaaagtttgatactgtgataataataatttcgactatactgacgattacaagtaagatacagtgactgacaataattttgaatgttcagatgactacaagtgagatatggtcataattaacaagactttaaatgtagtggcgtgacgactacaagtcaaatacaatgatgaaagaaaagaactacattaacactattttttttgttgaaacaaatgaactactttaacacatttttaataaaatacatccaagaatagtggttctttcttaaaaatttgtagttttaaggatttactcagggtttgaaattaaatttacataaaaaaatatctaaaatatctatatcaataattattatatatattccaaaattataatttaaatgttaaatgttgtttaatcatatacacaataaattaatctattaaatatatattttaaaatatttgtttattaactaattaattttattagttattcagtttcttatgctaaattaataataagatataattagataatttaatttaaaaaattttataattttaaattattatttttaatacgtcaaaataattattacttttaagttaatttatataaatgatttttttctttttattaaagtatttttattatttaaatctgccgcacgaaaagcggcaaagttatctagtttaataaaaaaaaacaaataatatatatatgtcatatatataactatatacacatgtcactgcatcaattaagatccatatacacacgtgttcgactttgtgaggaggagcaaaacctaaatcatgcactatactatatttatgtatcatgatatggagtcataaataagagaaaagaggcttaccctgtatggccaattgactatgcaatgatacaagaaaaagtctactgttgtatgctgcgaactgtgtatatatgtatatattttttacaaaaacttgcaaaaaa

SEQ ID NO: 264667 - DNA, 1691 bp, Cannabis indica
ctttttagtcaaaacataaaaatgaaatttataattagaatttttacttttatcacaaattttattgtaactaaaagtaagattttttatagtaaacttcccaaatttgttattgccaatatctcataactcagaactatatgtgaatttgaattcactaagctccacttagcatgcaagaattatgatatagtttttattcataataatattttttgaacaaaaatttccaaatcattatagtcttaatttattagatttttaaaagctgcttttcacttctgcaacctcaaaaatacttttgctactaattacaggaagaactttctgataagctgaaagcaaaaagtagaaactcaaccaaacatgatttatatttaaatttgtagcacttaaatataagtaatgaaaatacttaaattgtaaataatgtccttaatgtttatattgatgaattaatatatttttcttcaataataatgattagcagtttataaatcatagtataagtaattgttttataaagaaaatgaaggtggatgttgaaaattgttcaaaatgccaatagaagagaagaaaaagctatggtagaggccttgagaagtagaaggctttggacacttttatttttaatgaagaacaaaagcttaattggtaagatatttctctttaccttaccacatgccttgaggaaccctaacttatttcccaaactccctccttctttgaggtttatttatttattttttttatttaattccttaacaattacatatttgaatattatcattttgcatttttaaacaaaattaatgcttcttctatagttgtacatcaaattttgatgcacaataaatattatattttagctacagtattttcgttgatcattaatgatagattttaatgtacaaattataaggtaaatactattttattggccactctcattctctattgtatcttgtaactatgaggagctttcatgtgattggttcacctcaatctgcattccttcctgtagtgtgttcgaaaaatttcaagaatgaacttgatcttcatagccatttcctattccttaaacacaacatttttgcttatcaagcatttcttgtgtcctcgttcaaggcaccacaggtttgtagcccttgactccctctgaatatcctaaaaacaaacacatcagagccctaggcttcagtttgtcttatttgatacgcacataggttgtgcaaccaaacactctcttagatgttcaaacctaggtggctttcctatccacacctcttgaggtgtcttaaaattgtttggcaaagaaggacatttgtttattagataacatgcatcttaagaacttctccccaaaatggtctttctaaaccaacacccacaagcatgcatatctaattaccctctctaactgtgtcctattcattcagtctgcacctgtggtgtgttcatcattgttttgtgtttgaaaattccctcttttgcacaaaacaccttgaattctcctgagcagtactctaggccattgcctgtcctgagtattttgagcttgttacactacaagaaatgttacttttaccagtacagttcgctactgcgttggtaaaagtaactttgaccagcgcattttgcaaactgcgctggcaaaaaggtcaaagttttaccagcgcacatttgcagtg

SEQ ID NO: 264668 - DNA, 3050 bp, Cannabis indica
aaaagtgttaccaaacacactctaagaaaatgaaaaacattttttaaaataaatagaataattcatttaaaaggcacaaagccaacaaatcaaaacgattaaaataaaatttaaagaattaaagaccaggggaagaatcaggctccaaactttagcagtattcaaagaaaaagtaatacgagcaagcgagtgggctaatccatcaaatgaccacttataatgagaaagatgaccaaacatttctaatatctttaataatagcggcaaattcaatgaaatgtgtttctttactcaatgtagcttggaccaagcgaagacagtcagagaatatcgtcatacttgtataccccagtcaacgacaaagaatcatcccttgcaacaaggctactgcctctgccacatgaggttcgtaggctgccgccaccggcatcgcccctgggtagaaaaccacactggaccgactcatcaccacaactccaagaccaatattctactctttgttattaacaccaacatccacaaataagttgatatcccccaactgtagctcctcggttcaggtagtattagataggtcgatcggcattaaaccatttggcattaccggcctagaagaagaactttgagcatcttgatagagccaaaggaaacttaaagaccattgggtcaccatatcatttgggagtaatttgtggtcatgaataagcgtattcctcctatgccaaatttgccaacaaagaacaacaaattattccatctcatgcggtgaaagaatatccatacaaccaactaatacatcataaaagttggaggccaacttaagagcgtccaaacttttcaacaaccactcttgtctgattcctttgagcaaaggacataaccaaagggcgtgcaaagtagtctcattattttggaaatatatagggaaaacctttgccgtattcaggccatgacgttacaaattcgcataacaaggtaagaaattaagtcttgttttccaaataaatttgtttactttaggcagcactaaaagagaccacatgaacttctaccaccgaggttgacctgaagaagctgacacttgaccccaccctaatctattaacagagctcaagtacccactcttaactgtgtacatacctgtactagtaaaatgccaaataatgtatccttccagttaaacgacaaaacatgaattgataagatagctctggcttcaccttcattaaaaagctctttaaccaaaggaacgttccacagtttagtctcgcgtttcaaatcactaacatattgtacctctgaaccacccctgaaagagtaagtccaacccacatggtctttagcaatccaagtatcttcccgaatctgaaccatatctcccttcccaatcaactagcaaactcttttcatccataagtcacgaccccaaagaatactttttcacaaataagaagcccgcttagtttcaaccaattctaataaaaaactattcgcaaaataaaatccttttataaccttgccggccaaagaatcaaggtagttatataaacaggctgcttgcttagccaataacgattgattaaataaaaatatgtctcgaaagcccattccaccattgccttatgctagcatagcttagaccatgtacacaagtgtaatttgcgcctatctggatctccaccccactataatcaagcataaagtctatgaatttcatccacaatacacgtaggatgactaaacaatcccatagcatatgtcaaaattgcctgaatcacagatttcaagagaatctcacggccacctgacgaaaaagttttgacttccaaccaaacaacttattctaaattcgatcaagaatacatcgatacaatccacatttactcttccctacaaagcaaggtagtcctaaatacttatcatgatagggtactaaaggaacccctaaaacactagtgagagattcacaaacatcccgaggcatacgagaaaagaagaaaatcgttgatttatttaaatttatcaactttcaaaaaattaaaaactttaattcgctcaaagttatcagtttaaactttaaccaactttatttatttttaattataattattattgtttactatttaaataattatattttaaaaaaatatacaatagtaccatgaaaaagagagcatagtatgtaaataattgatttagttgaaactagagaactaagccacactcgattctatttttatatttttttacttatgtaatgatataatttaaaatataatattttaatgtgtgtattataaaagtaaaaattttgaaattaaaaatataatttattatatttaaatatataggaaggtggtgaaattattacattaaatagaattaatgtttttataataaaataaatttctttcagaaattaattctaaatttaataaatggggcatgtaattaaaaattgaatgtcttcttcacaaatatgaatataagataacaagggaccacacaacattttctgctttcgaaaacttaaaataagggaatatgtggtattattccttaaacccccaaccaaaaactcggttagttacttagttagttgttcattaactaactcaattgtcaaatatgatagcaagcttattgggtccattggccgatatataaagaaagaagaatactcatctcatttcataagagaataacaagaagacgcaaccaaagaataagaaaagagacgcaacacaatagagagagaagttacagtgagaaagtgagagagatattataacaccctaatctaaagggatgccacgtatatggttctataaactagtttagtaataatagattaattagttattaaaatccgcaataacataaaaaaactatactaatataaaaccctagtaatgaacaacataacgacactacaaatttgtttcagatattcttgttacaaaaggactctatacagtagtaagtcaaaatatacagtagatacaacccaaaacaattcttagcaactcggccacacagactggaagggt

SEQ ID NO: 264669 - DNA, 8088 bp, Cannabis indica
tatgtaaaactatatgtaatattgacttgtatgaatacataaatatatgatattttagtataaattaaagtttaacatagcattatataaaaatgttatatataatctaatttaatataatacaatacaatataatacgacttaatacaacgtaccaaacgaggccttaatgatttattttgtcctttgtgtaaaacctataacacaaaaacaactctaatattgggtcacaactctaatattcttttttcttctccatttttttcctttctcttatgtctctttctcttttcgtttttaatggttaattttttatgtaattggtttgctggagttatttttataagatcgacccctctatgtgtgaaaagattttagtggttgttcatgggctattgcatgcaatatgaaagcttgaagaagaaatttcaaacattttaacatcaaaatgttaatgaacattattatctgaacaatgtgaaattttttaaggagcactcttctatatcccaagatattgaacaatgaagtttaggttgatacacaatatttccttaataatatggtaaaaattgcttatgtaaagagttttaatgaatgtaacagaattagtgttgaagattcaaaaatttcgatgaacactcatgttttgtgtggaattttggtcacatgtgttgtatttgtcattttttttttggttcatgtcatgaattttgtttggatccctacaatttaaggagatattaacaatagttttttttttttggggatccctctaatatgacaatgtaatgaaaaaaaaattgataaatttaaatgaaatgatttatatctcaacattaaaacattaacaaaatataatatgtccattcattaatttgattgttgatacattgatcaaatatcaccaaaaggcacttatacatcattgaatcattaccaaaatataccttatttgttacctggtgcattattctaagattgtcaaaaagtacctatacaatatttaagcatcaataaaatataagttaagcccttatttatttgttggtacattactttaagatcaccaaaagacacatttacaatatataaaataaaccaagttctctatcaaaaagactaatgttaaaacaaccccattccaaaagacaaacaactatgtttcaaaaaaaatttaactacgagcctgtgaacttgaaccttcccccctctgtctaacctcttcttactcagttatttctctatatgattcctcctcttcaatgtttgcacaattggattcttaatcggtgacttacctcttttactattttaaccatacacacacataatttcaatacaattgtcaaacataatacaaatgaaaatctcaaaaatattatcaaagcatattttactataagccttttagcttctctggtacatgtggcttgtattttgaggttgtgtggatagtttgtttgcattgcatgattgctccctttccactaggtgcaggtggctctttttcatcagcttcccttcaccttttttttttggcctggcaggaaaattatgctcgaggatgtaagatttgattaaggcctttgtttggccacttaccagagctaggcatagggaaaattttcagtagttttttagtgttgcaagttgaagttgtagctcttctggtgtgatgtttgaagacgttatatctttattgtcttttttcggaggcagttttgtcttatgatgttcacttacttcagcagtttataatttgacaaaacatgtcattcggttagatgatgagatatccttatctgaggatgttcttgtgctgtttgtataaatctacattgtaaattcatgaatgattttaattactacgtcaatataaatactacttaattattcatctgctcttttgccatttttaattaagataaatcttacttatgaaaagtgaattgtcacttaaaaatcttaaatttgtgtgtgatttatgtattaggtatgtattatcactcatatcacgataaagtgtcattctataattagttagcgattttttatcatatttattaaagtaaaacaagtagaaccccaactcaatattgagttgcactaataataatattacatatttgatatgaaatagcttactttaaagtataaatgtgaaatattaaaaggatgtatttgtaattttgaaaaagatggaggacgataagtgaaatattgaaagcaagggaaataaaacaattttgggggtcaaaaccaaaccctagaatacacgggaaagaaaaatcgacccgttcttgaatcaaatatccaaaaatatctttctctcgctttagctcatcttcttgattcacgatttgaaggtatctaacctatttaattttctttccaacacttatttttttttctaatcgctattttatttttgaataaattattcaaaattgtttcttttcgataaaaaagtaattttttttttgtttgtattgcaaaaccgggttttggtatatatgtttctttttctgggatctatgcacggtgaattgggaacttgaattcgttaatggtctgtaatataaaacgttttgatacatggtgggcgatctaaaactgtccaaatttgtcggtttggagggtctttttcattagttttataggttttttatttacctatgttttttaggggtttgggggaagggttcaattatatatttctttcattgtctggggttttggggaaattttggagatctatgctgccaattattaggtataagagattgcataccaattttggaattgagtacttattgtgatcctcatttgttattattgtgttggacttggagtttttaatagtaactttagtgggttttgggattagagtatgattaagatgctattgttgagtgttgcatttttttcccctttagttttttagtttttggtctgatcttgttgagctaagcttttttggaatttatggtttgtccaagctttcttcttttctaatatggcttatgcatgaaaatctggaaacagttagcaagcctgacaaaataatggcgggtcagaggaatagttatggaaagcgttctcattctgattattctgataatggaggaaataaaaggagaaatcctggtgaagatagagaacagtttgtcatagattctgaagatactgtttatcgttatttatgccctgttaagaagataggaagcataatagggcgaggtggggagattgtgaagcagctgaggttggacacaaaatcaaagattaggattggagagactgtacctggaagtgaagagcgtgttgtcactgtttatagtaccagtgatgagagtaattcatctgaagacaatggtaataatatttgccctgctcaagatgctctctttagggttcatgaaagggttgttgctgaagaattgcatggtgatgatgacatggaaggtggtcatcaggttacttgtcgtcttcttgtaccgtctgaccagattggttgtgttattgggaagggagggcagatagtacagaacattcgtagtgagactggagctcagattcgtattcttaaggatgaacatcttcctccttgtgccttgaattctgatgagcttatacaggtaaacattatgagttttgtatatttccctcagttcggcatgctattgtgcattctcttgttgataatgcatctgcttgtgatgctctggccatgtttaaacactctatgaaatgaaatatttacttgggagtttggaaatgtagcaagcttacttaattctgtcttccttctttcagctgttgtttatttgtggttacaactcgaaatcattttaacttagcaatctattaatgcttatctatttatttattggttactgtgggtcagatatctggtgattctctagttgtcaagaaagctctctatcgaattgcttctcgcctccatgataacccatccagatcccagcatttacttacatctgccgtgcctaatgtgtatccttctggtggttcactcatgggtccaaatactggtgctccccttgtgggattagctccattgatgggtccctatggaggatacaaaggtgatgctggagactggtcacgttccttgtactcagctccaagggatgaagcatcttcgaaagagttctctatccgcttggtatgtccgactggaaatattggaggtgtgattggaaagggtggcactataattaatcagatcagacaggaatctggagcaggagtcaaagttgatagttccgctactgaaggcgacgattgtttaataacagtttcagcaaaggaggtaaaatgtcatcttagttattcttctaacataaaatcgtatgactaaaattttattaattctgtatcgttgtagttctttgaggattcatactctccaactatagaagcagcagtacgcctgcagcccagatgtagtgagaaggttgagagagattcaggaattgtctcattcacgacccgtctacttgttccaacatcaagaattggctgccttattggtaaagggggagccatcgtaactgaaatgaggagggctactaaagctaatattcgtatattggcaaaggataatcttccaaaaattgcatccgatgaggatgagatggtgcaggtaatactagctttactgaagtctttttggatttgatcattatccagcctttagtgattaacagggtggcatgtgatcactaacaattattgaatcggtgaatttttaatgatcagattgctggtgatcttgacgtagctaaggaagctcttatacatgtaattacccgattgagagctaatctttttgatagagagggtgcagtatctactttccttccagttctaccgtatattcctatgtccgcagatggttcagatggtttaaattatgaaagtagagacagtaaaagacatggacgtggtcattcttattctggtggttatggtggctcaagtgatttggcatcttctgacggctatggaagttatggtggttcccaggtatttttctgaatgccaacagtacatctctagagatgttcaaagtctaacctttacctgcatccttgttttggttgattatcctcttcttgtttcgtactttttgcagaatgcatttaaatatttttcaccatccatatatttgtatatattttgtatatgtcttttgcacaataaattttccttccagtttgtgaatttgtttgttttactttatctgtatgcagatggtggtggtggtggtggtggtagcggtggcggcgcttatggtgcttatgggtcttattcctcaggacgacctggtagttctgggtaagagcttttttagtttttcttggttgatactttatttgttgatcttatatatctctgagttttccttattaagcttatgtgatttactggattttatccaattaatgttgatttttcttccttgcttgaagttgcgttttaaacatttggttaaccattgattctgaaaatagtgattgctatagttttctgttactcaaaattttgtaaggttgagtgaggagcctatttttttttccttctttctaaaatgactttatgtgctattctcattttttcactagaaataagaaaaagaacactcgattctcaatttaccataggaagaagaaaagaacactccattgttagtgcattatcttgcttattaatgttttgagatgcctcgaccctgatttaaccttctgataccaggttatctagccagaaccccgtttctcgacggagaaactatggttactagaatttgttgatggttacctgcaggcaggtagactactgtttcccgtgatcctttttctattctctgttacttttactggcattttcctctgggccagccatagatttgtatgtgacagtttgatatcattcataacctatccaatctccctgtgaatagagttctgatgcacttgttttccctttttgcctttcccatcccaacaaaacagcttgagatatacgaagccccgaagccagcctactgcctcttttgatgaagccttctgcctaaactggaagaccagatgaaccagcgtttgacaatactcatggcccaccttgacgcttctattttaatggaccaaatacacgtgaagattttttttccaccaagaaaattttccttgtccattaaaccaaatttgccaaacttagtatcttgtgtttcctaaatcctaaggcctctcactcctgcttgtttttattttattttttttcgactcaactttccttaagatacaaatccatgttgctcccaacctccagtaggtgttttgaattctaaagtaaatgtttgcagttgcttttcttttttcagctgtgtagtatgaattctttttcatggtatttataacgagttgattgttgatactttaacctcttacgctgctgtagcagaatcgttatatcatctgaattgcaggaatcgatgttttgctcagctttaggcttaaaggtcaataatctaagtatcaaaattttagagtatgaaatactagtgttctatgttttccaatttatcattttttctagtaatatgaagattgcttgttaaatgaggacggtgtggattaagttctgtagaatacccgacaatttggtcgtagttagtactaaaattttcatggacatttaggtgtgaaacttcagatgaagctgcaaaagctaaaggagtaagtttattatgtttactataatggagtaagctacaagtctttgctaacaggtttttcttcaatgcatttttgtatgaatatattagcttttgtttttggatcgttttgtgctgtgaaattgttttcttatgtagggcaattgcatgaagtgatgaagataagaggtgtgaagaagccatatatatatatatgtacttttatatttgtatgtatatttttgtactaggataggggaatactagtcaattaatttatttacagagtcaaactattgacccaaaacgtcaaacggatcatgctgtctcatctagtcaagttattgctctaaaatcatagacctctgtcctcctgtgtctgaaataccttttggcaattacgataaaatttgtcatttcacaaaatgtaatatatcacttattgggccagaaaatattacactaaaataagtaaccattctactcataaaatatggctacttcactttgcgattttgatgcttcttaattgtgattcaatgatgatgaacatgtaggcaatcacttcatttcattgtatgatttggttttgataatattgtattgcttttacaatacaatcaccattgagcgttgccataagagcactcacactagctctttatttcttctaaaatagagaagtattacaaaatttaaagaactgtcttaaaatcatgccacaacacaaatgttctaactttatttttcattttaaagtttctttattatttatgctctatatttataaaatattatttattttttttttttaaatatattttattaattattttgagttttaatattatatatttaaataaataaaaataataaaatattaaaaaagtaaggttttggtaactattttaaaagaagttattgggagtgttttaagattgagcattgttattaggtaccagtagtgcttcgcattttctcgacatgtcgcgttgcgattgattagcgatactctctaagagctattattattaaattatatcggacctgatacttagttaaactaatagagatattgacacatgagagggtactaagcactactggtgccctttaacatttctctttaagattttagtagtgtttagtaccacttaaaaatgaggttttacgatattgcatgaaaattattacattaaagtaaataaaataggctaattatgatttttaccccctgaactttgacatgtactaaattatgccccttaaactattgatattgttggattgaaggacttttgtctaattttattcaattttactatttcaatgattgtttatgt

SEQ ID NO: 264670 - DNA, 587 bp, Cannabis indica
gtttgccaagcctgtaaaacgggctagcaagttttggcaggatccccgaacaagccattttctcaactctcgtccatttcagtgtcgtagttgggtgtttccctatttcctgagttagtgtaatccctagagagtataacagaaactagagttgtgggttcgggtttaccggattagagttttgatcatgtgatttacccggtttcattatgtaattagggcatccatttagcgcaagactttccgttcaggtcggtcagcacccttgaatttggaaagaaagtaagaactgtatataatgtgtgatatgaatatctgaatgtacgtatatgttaagtgtatatgcatgcttatatgttgtgattcatacactgccaacacttgtacggttgtggtacagagtgcattggtaaagtgcatgatgtctgaaagtacatcgtggtgttaacagcacttgtacaggaaggtacaaggtgtctgtggtacaacacttaacaatactcaaggtgtggtccatactctacctacactagtacgagggtatactgagtgcatgtggtacatggtacatggtcgtatcctagtta

SEQ ID NO: 264671 - DNA, 743 bp, Cannabis indica
ctatctattctttcttttattcttttgtttctcttctcttttctacaatgtacaaggaagtctaataaacatccacgagctttattattattattaggattaattgcggcataatcctcaattacttttatttagtagcaattaacttctaaaatccaaattttgacagcaaaacctccaaaaccagcagtctgttagcatttatttagccctttttatctgtttttgacagttaactactaggttggttgtctatgtgtacataagatattgtctacatagacacaatgtacacgtggcacaatattattggcccacatagataaatatttaaaattagaataaaaaaaaaatttttttaaggcacaaaaaaattaaaattttaaaaaaattcaattaaatatttttttttcttgcctttccttttccctctcttcattctctctcgctctcctctctttctctctgtttctttcttcagactacaccaccaccaccacccatcataatctcctaaattttaatcatgcaaataccataccaaatatcatcatcttcttcatcatcaccattataactttcggctacaaagaatgactctcctccaaagcaccctaatccgtacatcctccgacccacattggtattatcggaacccttcgacacatctagcttcgccactcccaagatattattcatcgaatcaccagcgcatgaaaccatcacaatcgcatcgtctttgt

SEQ ID NO: 264672 - DNA, 812 bp, Cannabis indica
aaagacttcgaactttacttttagataattgtgaagggttgagcttctcaaaactagagggttttttgtccaagtttaagtgtctacgagctttgagtgtacctttggtattgccaaagaatctgtgtgaattggaacatttgagatatcttaatctttctggtaattataatttaagagtgcttcctagctctttaataagattacagaatttgcaaactctgaatcttaagaattgtggaaaccttgttagattacctcataacatgaagaaattagtcaacttaaggcatcttatgattaaaggatgtattaatttgagtaagatgccccttgaatttgggtatatgagttccctccagacactagatagatttgttgcatctaagtcatgtggatttgacgaattgaggaaccttgttaacaacttacaacaacgaagcttaacaattgaagaactcgggcataccaactattctgcatcaaaaacaacttcaaagggagttatttgtgaagggaagcataatcttcaattgttaaagttagactgggaatttgtttttgagtataataataagaaggtggaatattatgaatttttccttgagagtttgcagccaccttctagtgtaaaagagttgcaggtgaggcatttcatgggtgtgagatttggaggttgggattcttcattaaataaccttgttaaattggagttaaacatgtgtcacgagtgccaatacctcccaaaattagatcaattacgttttcttgaggaacttgatatttatagggttgaagcagagtacatgtgc

SEQ ID NO: 264673 - DNA, 723 bp, Cannabis indica
atccatgttcatatccattgtttacttcttcagtgttttcccttaccaaataaacccaaatggctatatgagtcttgccaccttcttcatattctaccatcttaaaaactagcctattctaactcatcatgagataaaatttccttgcgacttgaaaagaagtccaacccgcaaagatcaaggcttctaacactttcatcaatttgtcccattcatagaaaagataaccaagagtaactgtggcctttactaccaaaagtacttctatactcctattattccgtcgagagacattaccttccaaaaagtcacctctttctgaagacttactcctcttattcacatgaagaggagagcagaagccatgtttcttgaaattgatgcatcgtagagagatggccgaaccctcttcattactgaaaatctttcagaaggttgtgttgatcatgtcatgccagcaggtttatgttgatactagcttccctaatgattcttggaccataccactcgagcaaagtgatgaagatgctcagagtgctaccgtcattttgtctcaaactatgatggaagaagttacttctatttgaaatgacacaaaatattcacggagaatatatgtgatcttaaaccaggatgatggagaagttaacatgtttttttttcatgcttatggtttaatatatgcacaaaataagttaagtccaaaatatatattcattcaca

SEQ ID NO: 264674 - DNA, 887 bp, Cannabis indica
ggtatgcctgaactttacaacacgaataaaaggaagtggttctggccatagaggaaaggaatctaaaaatgccacggataagggaacccactataaccttcactgaagaagatgatgtcaatgtttgcttcctgcataatgatccattggtcgtggaagtacatatagctaacaaaacagtggcccaggctatgatagataatggagcctcaacaaatatcctattcaaaacaccgtacgagaagatggggctccactcaaagatctaatcccctgtctccagccagtatatggtttctccgaccagagtgttgcacctctagggcaaatttgcctacccctcactattggacaagctccgaagagcataactgtgatgacacaatttctggtactagatgttccattagcctttaacgtcatgttaagccgaccaaccttatatgacttaaaagttgttacatcaattttccattcgtgtatcaagttcccaacaaagaatggagtagggggcctaaaaggaaaccaacaagttgcacgggaatgttacaaccttgccctaactaaggccaaaaaggaagaatcctctagtcaaagttcggacaaggggaaaagcattgccaaatagggaaccgcccaaggtggggacaaagatgtgaatcctcgacttggggagccaaatacaaatgttgggccggttgaagaataagaggagatagaaattgatccaaatgtctcgacgaggaacttaaaattggaaaaggtttgttgcttgaagtaaaatcagctctgatgaaatttttaagagcaaacctagatatttttgcctagtcacatgaggacatggatggtattgatccttccataatttcacatgccctaaacat

SEQ ID NO: 264675 - DNA, 1861 bp, Cannabis indica
tccgtccacacgatctcacgacaacgttcctccatccacaactaaacctcctgtcactgttatcagccatgagacggttcttgatcaaaacatgtcttcttcagctgatcctcgtcaagagtccaacattaggcgcccaccttagaacacatccaatgttccagatctggtttccccattgttgttgtcgacaacactatcattcctcctcaacgatcgattgatcgttccattactaatgacctctcgagtcctttctttcttagtcccggtgatcatcctgggttggttctcgtctccaatgtcctcaacggaacaaactattaatcatggaaacgtggaattacgatggccttgactgccaagaacaagatcacattcatagatggatctttacctcggccttctactggtaatccctctctcaactcttggcttcgttgcaataatatggtcatgtcatggcttgtcaattctttttctactgagattgctcatagtataatgtattttgatattgccactgatacgtggctcgacttggctaagaggttcaatgagggtaatggccctagaattttccaactacagacacaactcactcggttacaacatggtgagcaatctgtatcgatctacttatttcactaagctgaaatccctttgggatgagttgaaagaatttcaactgaatacaacttgcacctctggtgccatgaaaatctttcttgattactacaaccagaacaaagttctttaattcttgactggattgaatgagtcttactcatatgtacgggctcaaatcttgttaaatgaacctatccccaatctttctaagagttttttgccatgatcattcaagaagagcgtcaaaggactcttggatcttcaaaagcatctcccctggcttctaccgttcatccagtatccactaaccttccacgagctaagaagcctcgtccttcatgctctcactgtggaaaacaaggtaatttcgttgacaattgcttttttctccatggttttccaccaggctatgggaataaaaagaaattcgaagccagcaactcactcaaccaccccgtgctaatgctaccattccttttgctgcagccaatttggcaggatcattctcaaaatgtggtgattgggacagctaagagacatagaaaattgcacctgcttcatcaggactcacttccaattgcctcggccagccatttttttttaattctgttcaaaataatgtagatcaatggcacaatcgccttggtcacccatcaatgtacatttcagatttgttcaataaaaagaataacatttcttctattgattcttgtcaattttgtcatatatgtcaccttgcaaaacaaaaaagattactatttatctctaatcataatttttctatgaatatctttgatttagtccatatggatacatggggccctttttatattacaggtgtggaaggctacaaatatttcctgacaattgttgatgacaaatcaagattcacttggatatatatgcttaagcactaatttaatgtacaaactgttatacctattttttacaatatggtttgcacacaattttcaacctctattaaagcaatccgtttggacaatgctaaagagttgaacttacaatctttttttgcctctaaaggcatcacaaattaccactcatgtgttgaacgtccacaacaaaattctgttgtggaacgcaaacatcaacacatattaaatgtggctcgggctctttgtttccagttcaacctacctctggtttactggtcatatttagtccaaacggccacctatctcatcaatagaacaccatccaaattgttcaa

SEQ ID NO: 264676 - DNA, 2249 bp, Cannabis indica
atcatgctcactcttggatgaattttcgaatcccaaatccatttccagatggggtttctttccccgaatctggcctcttgatcagcccagtaagctccttttacagaaaaggtaccaacagtcgaatttttccaaatgagcatatcaccctcattactcttggtgatttgaatcttagcaatttggtctcccacaatagtcccaaagatgaaacgcaaatagccagtgttccaacatttgtttatgcggtacatcaaatcagccacacatttaatactaggtgccttggctctaacactttccatcaattcccgaaattgttcgtatctcaaccaaggtatccaaggttgccaccaaatatcaatatcctcccccgaggtaataatagtgcaagccccttcagcaatagtcttcctggcgttgagaataccccgccaaacaaaactatcactgttcttctctcggatgctccaaaaggactccctaggaaagtatttccctttgaaaatgtggcaccaaggtttgtccattttactcgccaactgccaagcgagtttggagagaagagcaagattaatgtcttcgaaacgacgaaaacccaaaccacctctctgtttcggctggcagagagagttccaagaaatagccgcccaaaaatttttatgatcgggggaaccggtccaccaaaatcttctgacaatggaatcaagctctctacaagaagaagcagggagttgaaaggtggacatggtatacgaaggtaaagcaagagcaatcgcattcacataaaccgatctccccatcttggagagagttttaagtctccagccctccattctatcgtggagcttggtcttgagaaaattaaaatcttttcgtttacttcggccgaacataaaggggttgccaaggtgtttctcttcttcacggatgacccctatattcagattcttctcaatggattctttcaaagaccgggagcaattactagaaaagaggattcccgatttttgtttgctacatttttgaccagaccagtcttcaaacttcttgatacaactgtttagcacctccacttcattaagattagctctagtaaaaataatggtatcatccgcaaacattaaatgggagatctccgggacgtttctagcaactcgaataccatgaaggagacccttgtcttgttccaaggataacatccttgaaaatatctcattgcataaaagaaataggtagggagatagaggatctccttggcggatacctctttcgggccagaattttttgagaggccgaccatttagaaggatggaatacgacacggtggaaacacagcacatggtaatcttgaaaaaatgaggatcgaacccaaaccgaagcatcacctccttaagaaaaccccattcgagacggtcatacgctttgttcatgtccatttttaaggccattaaacccccagttcctcttttcttcttgatcacacttacaatctcttgagtgagaatggatgactccgcaatccaccttcccgggaggaaggccgattggaagggagcaatgatgtgctgaagaacatgcctcaacctctgggccaagattctagctataaccttgtaagtgaaattacacaaagcaatcggccggaatctatcaacagtatcagggttaatgcccttaggaataaggcaaatatgtgtatggttaagtcccggttccaacaccccagtaatgaagaattgttgaatgcaatgaaccacatcttctcccacaatgttccagcattttctaaagaaacaccccgagaggccatccggtcccggggcttttaaaggatgcattgagaaaacagtatcttttatttcctccaattcagggacagcaataagcttcaggttctcgtcacaggatacaacgtacagtaatttttttccttcctaccttcaaaaaagaaagcaatacaacgtaattccaagcagtcaaacgtacgtacgccacctaagttcagattgaaatagatgtataaatatgctttttttttaaaggaggaaattctcattactcataaacacatattctcaccaatttggtgagcaatacaattggtttatcctcaataatatcggtattaattttatgttatgagatatttaatattgttatcgttgactgatcattgaagacaatcaatttttttaataagaaactgacttatatgttcatcccagttaatatttgaaaactaaata

SEQ ID NO: 264677 - DNA, 5167 bp, Cannabis indica
agatgcttaagattgcccacccttagatgctaacttctgatgcaaatattccatctcagctcttcggcattgccccaaaagaaataaaaattacatctacctaagactagaatgttcatccatttttactaatcctaaagaccctttcttggttttctgattctctatactacctcattctctccaacatgtattagcattaggaagacttattggtcccattagtccccaatacttaagtgtcttcacattttaagtcccaaacttttatgttagtatcaaccatacccccaagtcaatgtcttctctattattttgttaagtgagcatatattgctcgtctcaagcaacaaaaaaaaggacttgatcctctgcataagcatagaaaattaaatgttgtagcaacattaagtcccaaaagagtaaaatgacaatttcaaaagaacattaggtagctaaagaagagttctagtataaataattctttcctccagctttctaacatagggggaaaaaatacattatgaaaaaagagaagagaattgcatacaagttctatatttgtacaagtataaagacagaggtcaagactatcaaagaaacaatggaatttgcatgccatatgatatcaaagaaaagttagaggtaatatacaataaaagaaaaaaagggtgaagctgcacacaagttttttttttcctttttgggggtggggtggggaaatcataccacaaaatgaaattcgtattagagagaaatagttctatcattggtcatcgttgtttattttgattcctacaagttcctcgattggttggcggcatatcgggcatttatttgtctgaagtcttaactctttcgcacagtcactgcacatacactagcaaaaaaaagagaacacgtcatatcagtggaacattgattaattaaggaccaagagtacttggagaactagcagaaatcacacaaggcatccaatagaggacaatagagggtaaaaacatgatcagatgacgcaagctcaagcacaggattcaactttattaaaacaatccagtattaaaagattgattgagcataaaaagcttgagactttctgatctctattctcgaaagtaatctacaagctgctacagttgcaaaaccactaatttgtagtaactcttttcaaatttgattattaacattcaatagcttaaaaataatcaaagaggaacttaccatatgtcgacaaggtaagacaaaggtatctttaggttccgtcatgcaaattacacactccttcccatcagtgtccttaaagccttctgccgatgagtttgctattccaaatatatcccgtagctcatagcggattccatcaacccatagtatttgtctaattactttgactttaaggaatctgtatttcttttctcaagcacagcttgagtgatctgcatatttggtgatgcatcttgcaatgtaccattaacatgtccatctgaatgaggtggtgggcgtgtttcagcacatatcacgagaggaaatacgtcttcttttggtgatgcttttgacaggtcatccaactcaaagaagccaaagtctatgccagttccacaaggctggcgaaatttctggccacttcctttttgaaaggagattgtcaaaggcataaatgcatcaggaaattgtggaacaaacttgcagtttgattcctcctttgcaaagtatatgatggtaatgctgcaaatcagaaaacatgaacagataaacagaataatcttttaaggagaaaaatcagttgtactttgagcaaatgttacaaatcacgtcataaatcacacaaggcaacatgatttcaacaaattatccgttggtattgcataagctcatgacttagaactatctcttacaagttatagatgaagggtttagcatgatagcattcttcagtcttaccaaatgctataactgcaatacatggattggattacacggatgtaacaaccagtaggcagcatggacattgaagttcatgcatgtaacaaatgattccatctaagtaagaaccagtacataaagggtccacactggattaaatgaagctttcgtatattacacttacgctgtcatatgtttaaattatattcgtcaaccatgcaaaattgctcgtttcttggtcataagtcatgaccagctaaagctaaatttccattaaacaccgtttccacggggtagaacctccttaggaatctttctagcatggtggcgaactaaactgaaaatttattatataaagagtaggtcgagaaacctctggaacaaacacttaagaccatcatgaaggttcatgacatcagcagcaccaacaaagaaacaagattaatagattatgacaaacctactctctcagccaaggtggaaggaaaaccataagagggaggaaaaaaaaaaacttcccctaattttggctattgttgtcatgccttatgcagcatcccacaatccccattcccaaataaaaccctcaggtaaaatcaaatggatgagctcgatttcctttcacaccaaacatcagtgcattgtaagtcgagagactcatatactgatctaatatgtaaataactccactagttatttccaacccattttaccacaatatgaagggattatttaaaccactaattttctgcatatgtttcgattaatctaatatacttcatctattattagctatttattcttctgtcttctttcttttgctctagaaagtcagaaacactgataagcactaaaactccagcagaaccagagtattcaattaactaggaacaggaacctagtccacatatcccactctatagtgatgcgaatcttcacaaaatacaaagcacacacaacttcaaggattaacacccaacgcagctaaattcctattttgctatagtgagcttacaagtttggagccagttttcctctatgctccttatcaaaaatgattctaggaactacattgtcatacacccaattgtaaatcaaccaaccacttgaaaaccataaacctcaaataacaattatcaacactaaaaatacaaatataatcatactcaattcaaactttgctatagttagcatactagcttggaccattgtttcctctatgctcctaatcaacaatgactttatgaatcaaactacaatttcataaacccaattataaatcaaacaaaacactcaaaacccatcactaccggagcacaaccacacataacaaacactaatcaaccaaggtaaacaaaattcagtcatattttgcttaagtgagcttactagtttggtcattatttcctctatgcctctaatcaacaatgattttaagaatcaaactacatttacataaatcaaacgaacaacctaaaacccatcactggcctgaaccttaacaacacgcaatcaacaatttaaacccttaaagaaaagaaaaatagaaagtgactttgctaaccttccatcgtataaggcatcaaaaacaaaagagagcaagtggtgatcagggttctgctcatcgacctcgacgcgcaacgtgtccttatgaacattcacgtcgttcctgaccttcttagcattctgatgctccacaaagggaggcggcggagcctgaggcgggagcggtagctgacccattggaggacgaatcggggcccaccaattgggctgatttgcgtaataaggctggtaattgtaccgacccatcatcgtattcgggtgattgcactgaccgtaagggccggggaagtagtgggagtgaacaggaggaggtgggttcgggcccgggggtgcgtattgactgttcgggggaccatggtaagaagatgaagtagcagtggcgaagacataattattccccggggccggcggcatcggaggagggggaggaggatgaggctccgttgagtaatatggtggcggtgggggaagcggcggcggcactggaggtgggttttggaagtagttgtttcttcttcggccactccatgaaatacccatctgagaaaaatcgaagattttattgagttaaagccttacaaaagaaaatttggaacaatgaagaagaagaagaaaggtattgagttgaacaggcttcatttgtttgtggctgaagaaaatagaacagaaatcatttgacttttctttgaattgacattgttgtttcttatttattttctttcaaaaatattgacagcgtgtgtaaatagaattaaattaacttccaacgcaacgacatgtcgttttgtaagccaatgttttgtcttgtgtctctttcacttatcttggtcaaataataaataaataataataataataataatggtcaaaatgccctgctaaacttcacatacttttcttatttcttccacggagatcgacttaaaactatattacaaagacattgtgtttgaatggagttttaattaagatgctctttagagaacaaacaaatatggctagacaaacttcaagaaggtttgattagattgatttgatattttatacatgctgtaaaattcaaactaaataaaataattagatatttataattatactagtttttacaactactagtagatttggtttgatctaaatctaataaccatgattcttgtttcaaaaaaaataaataaaaaaataaccatgattctttcacatgcacaccatttcctctataccctacttgcataattaaacttatcctaccaagtagattgtagtgtatatgttagagtccacaatgtacctccttaaaaacgggtttattgatgcacttttagttattttggtatgtagaaaaatttttatgtctaatattttttttatattcgtttacgttataattatttaaaatatcttacaaaattttgagaaatttaaaataatttacaatataaaaagtagtgttcaaataatctattcacacgtataaaataaaatagtcacgcgtataacatattttttgaaccctatttttgacatgttaaattttttcaaattttttaaaattttacaagatatcttaaatagctataaaagatatcttaaatagctgtaacgtatatgcctataagaaaaatttgactaaaaactatttcagatgctaaaataaataagaatgtatcaatacatctat

SEQ ID NO: 264678 - DNA, 952 bp, Cannabis indica
ttcttaaccaatacgtcacgagaataaccatttggtcgtcttaaactaatagattaaagaacacaaataatgcaactgaactagaacctaaccatctcaggattgagatcatttagtctaggatcaactaggtgatattgaattgaatagatattacagtaagtttatcatatctaatccaagtacaatatcagtcccttttgatgcatactctatgcatccaacccaagcttactttaaccaatgccctggaaaggacatagcacttaccaatgtgcaagcaaactacgttgtagattatcatatcagttaaaccctgtgtactgataaatcataagaatacatttaatcacacaatcttaactctccgagccaaaccacttagtgcactgaagagaaagtcttgggtttagttcaccaagtcaaattctcgggttcaaaacccgagatggtctttttggagccttccttccccttaccccgagatgtaggaattattggtttgtaagttggcatcatttcaaatccttctagtctggtgattgggatttgatcaacaatggaaatttgacgagttgttgagaagagcttgaaccttagtctctcggttagttgctttcttcattttctattttattatatgttcttccttatccttcttttgaatttactcttattgtaggcatctttgctttctcacgttgcacaccaaaaggggcttcaaaaaatcaaacagttggaatccaagcttcacaaatccatcaaaaaacgcgaggttattatgaagtagtggactgatgctcaaaaggaggacacttatttgacgaaggatgtcgaggagctgaagaggaaccacaaggctaagcttgaaagtgctcaaaaagaaaccaaggatcatcgcgaagcccaccaaaaaattcaggaagaaatcaatgaagccaataaaaagctt

SEQ ID NO: 264679 - DNA, 638 bp, Cannabis indica
aaagatcctctatagatgatcttcatcgaatagggacaaatttaccgttctacccttcaatgtattatatccttaaatcaattagctatctataaataatattttagtaaaataatataattactcaaatgtaggcctcaatcgtttatctctattaagcaagctcgaaggaaatcatcgttttacttttaaaaacatatagaagctacagattccatatatatgattaacgctcccactcaattgaactaccatgttcccaagatgtaagtatccaccgaaaccattggctagctttcacgaacaacttgaagaacataaataatacaactaagattgaacctaaccatataaggattaagatctatagacctaagatcaaccggtgatattggcttagaaagatataacgttaagtttatgatatcttatcaaacatcaacatcagtccaatcccatgtatactccatacattcgatattggtatactttgccaatgccctggaaggacgtaatagctatccaatgtgtaagtataccgtatcgctgattatcatgtaagtccaaatcaagtgtattgacaaatcatgggacttaaactttttaaaatataatcatgattatattctattgtgttg

SEQ ID NO: 264680 - DNA, 1862 bp, Cannabis indica
tgagcaaccttctgctgctttttcgataagtcagccgcctgggtaggaacgaagtcacttttcctcttttgaggagtcgcaaatgatggcgtcgtagtgccagtcttagacttgcaattgaaaactggagcttgtttcaagaaagtcatgtctgcgagaagaatgacaaataaggacttgaaaggctaagacaatattgtcagcaacatactaaattatattacctaatgttggtctcgaagttttcttggatagacgcttgtctattctttccttttgcttcttagaaggctctttgtacactggttcttgctaaagtttagcgtcctctgggatgagcttgtgctctcacaattttgcagtagtacagaacaaacaccagtcgcaatcttgcacaggaaggtcgcttaagacttcaacgatttctagataaattgggtccaatacaaatcgagctagtctatctgcgaataaggaaaataaaaattagcgtttataaagcaatgaaaataaatactaagtgtagagtacgcgacgtacgaggtcaacgattgaagtcaatcctgacccctagcatcttaaacgcgtagagccattccaatttctaatcccccatattagaaatcgtgccttctaccccatttattttagaatcagcccatttactaaagcaatagaagccattgtcatggccaatgctctttatgtcatagaagaagccaaaatctttgactgttggctctccttatgtgtactccatatacatcgcataaaaccctaggattatgcagtagttgtttggggtaagctggaaaggagagacgtcatagtgagaaagaatgtccttcacgaaaggatggaagggcagtgtcaccccgcatcgaagaataggaattgaaaccaccacgttctatgttgggatgattgcaggattcgtgaagggaagatgaggtcactgtgttggcaaaggcttggaagtagccgtgtgcaccaaattcaaccttgcaaatgttgacagatcagatttcttgactcgcgagactacatccttgcagtagaaaggttcgtttagttgagcgttgtcaacagaatctatctcgataccttcaccttcctcatcgtcctctgtttcatggtctggtaactcaaagtcctcacccatttcttcgacttcgctgtctgaggcatgtcgcgaatagaggagataaccttgggccaacattgtatactcactatcgtgcacttctacagtcattggttctgctaattcttgaaccatcctgtctatctcgtttgcagataacgagccctcgcgagctctgcctacaagagcttcatccttggacatcgaggttgggatgaagctgtcgctcctttccaattcatctgtgaaggccccctatctagagtcatacctctggctatctaacaggtcgctcatctaaaagataaaagatcttttcagtgtggtgcaagtgcaattttaacgagttaagtgccctcacccgcgttataaaaattaaagtagaaaagtttacagatttggccatgcatctctagtaatggctgggggtatctcagtgtcataagggtcatgtcactaacatgaacattaagtcactgagaaacacccaccatttcaagaatctaattagttccaacaatgaattaaatgtgagaaaaatgaaaactaaccgtatgtctcaagaaatggttgggcgtatcacagtatcccaagggggcatgcgacaattgcatgaacattaagttaatgtgacactcccactatttcgagaacccagatagttttcacaataaaaatacatataacctaaaagctaaaaaaggcctaagagttaaaa

SEQ ID NO: 264681 - DNA, 288 bp, Cannabis indica
caactagtatggggaccacggccctatataaccgagcttccaataagcagatctagaatttaccaagtaaataccctaacttatgaattcctccttgcacaaccatagatttggaattgcactctcaattatgtagaacgctctatatgtttcacgacatagatacgctatgaaatttaaccatcgttctaatcctaaaatccaaagatcgtctatagatgatttaaaccgattagacacatatttactgtttcactcctcaatgtattttatccttaaatcacttag

SEQ ID NO: 264682 - DNA, 554 bp, Cannabis indica
tataattaaaataaattacataattaaatattaaaaaactcaaaatctgcccacatacgacgtcggttgcactacgaccacatacggcgtcggttattagctaggaaccgacaccatatatacccctatggcgtcggttcctagttaataaccgacaccataggggtacatatggcgtcggttcctcaaaaccctttagtgtcgccctgatcagcgtcggtagcgaattttacaaaaactgacgctaaaagggcttaaaaacaatctctaaagggggtttttgtagtagtgacatatttacaacctatacaatacttgtgtttaatcaagcttgaaagctacttttaaatttgcaatccatctcctgtcttcttgactaactttcttttgtaaaaaaaaaaaaaaactatagttctattcttgacatctttttttattctttttataggtatatttatattgtaaagtatttagaatttcaaaatattttatttatttttttttggattcaaaacctgtatccattgcataaaattaaagttcaggatacaaat

SEQ ID NO: 264683 - DNA, 487 bp, Cannabis indica
attttccaaccaaacaaaagaattaggcccattagtattccattccattcttttctggcccattaccatcaaccaaacgggcccttatattgctttggagttcaagccagagtattattctgacgaattaagattggaattatgtcaaatcgccgtggcacaattcaactatgtcaagaatccaagaaccaatggtggaggaagcatccttcgagaagacgtcctatagactaagaaaaactagggtcatacagaccatattacaactgcctcagagcgtttattatacaaatcttggtgtttcgggctataaatgtttgaggggaatttaagaaaaaatatatataaattatgatggggatgtttaaattgtaaggggctgtttggaattagttaatgacagcaagaatggtaatgtgaaacattaccttgtttgttttgagggttttaatcttataatgttatttccttagtaatataactaccc

SEQ ID NO: 264684 - DNA, 601 bp, Cannabis indica
tcacacatgctatataaatctctctaatttatagattacacttatttactcacttataacaaaaatataaattttatgctaaaatatattagtaggatcataatcccacttattacctgattaacccataatataaatataaaccctaattatttaccattaggcttatcgggatattacatatgaaaacctagaacttcaatcggattcctcatacgaagaaccactagttcagattttagacaaaaaagataaagtccttcgaaaaaagataatagcttttgtgtaaggtgctcttgagaaacaataaggtgaaagaagccacctaagagttggagtccgatatgagggctcaatatctagagttgttcatgttagattttgaggacaaaatcctttaatagggggataattgtaaagaccgcttaattttaatataagaattaacagataattaggatttaatttagaattagaattttaattattatttataaatttatggtgatatctttgaattctaggagtgttatttatgctatatataaaattttatatttttcatattttatgcccagcaacattagaacgcaacgtttgg

SEQ ID NO: 264685 - DNA, 692 bp, Cannabis indica
agagatatttctctgtttattcagatgcacttaataagcagtaaggaatccaacatccctagatgagtaatgcatgcagagaatgatgttgcataatgttttatgaacacaaaggaagtaatggtggagaaagtagttgcttaccactgacttacagttccagtaatttgggtttagtcaaatatactacgcttgatctggatatcaagacaattgattgattgaaatgcactacttgttttatgttagtgcaagtgggagtttgttgggattttatgccctaaataaaatctatttcaatctaatctgatttgtaatcaataaaagattagaagtcgtttagtttacatgtttatggtttaatgtgtacaaaatctgttaagtccagaacatggaatgtaattgtgattatatgcttcaaaagacaatgtccctgattcattagtgcacttgatttacactgatgtgataatcagcgataaagtatactaacaccttggataagtgttatattctttccagaacattggaaaattatgctagttttggatgtatggagtatacattggactgatattgatcttggtaaagatattataatcttaccgttgtatctttctaagtcaatatcattggttgatcttagatcaaaagatcttaatcctgacatgcttaggttcgatctcaagagt

SEQ ID NO: 264686 - DNA, 966 bp, Cannabis indica
agcataccaaggcagagaagaaacatgcatcaattgttcatcaggaaaagtttcggtgataggggtaggctctttactagtttcaataactagcctagataagtgatcagcaacaacattttcagacccctttttatcacgaatttctagatcaaactcttgtaaaagaagtatccaacggattaaacgtgattttgcatctttctttgacaaaagatatcttaaagcagcatgatcagaataaacaattattttagatcctaacagataagacctaaacttttctaaggcaaagactacagcaagcaattctttctcagttgtggaataatttaattgagcatcatttagagttttgctagagtaggaaataacatgtggtattttatcaattctttgccctaagacagctcctatagcataatcagaagcatcacacattatttcaaaaggaaggttccaatcaggaggttgaataatgggtgcagtagttagcatagttttcaatttctcaaaagcaatatgacaatcatgatcaaaaacaaatgcattatcttttccaagtaaatggcacagaggccgtgaaattttgctaaagtcttttatgaatctccggtagaaaccggcgtgacctaagaatgatctaatttctttcacagttttaggtggtggaagttttgaaataagatcaactttagctttgtcaacttctattccctcagatgaaatcacatgtcctaagacaattccacgttttaccataaaatgacatttttcccaatttagcactaaattcttttctttacaacgaatcaagacaagagacaggtggtgtaaacattcatcaaaagaagatccataaatagaaaaatcatccataaagatttccaaaaaatgttcaaccatatcagaaaaaattgcaatcatacacctttgaaacgtcgcaggtgcattgcataagccaaa

SEQ ID NO: 264687 - DNA, 513 bp, Cannabis indica
ggattcttcacagtcttacacactgtaattgagtacttgacttgctatgggtgggcatatactctttcactatagggctcgaaaatatgaagaagaagaggaggagattcgaattctattgaaggaggttctcaagttttctagttgtctaacaaagaatgaaaactaggtatactaaggttggatgagagtgagagccatctcattccttatataggatttttcctagggtaagatttaaattatatggaattcaaaaatataaaaattagctaaaattctccttaagtggccgaccctaaggtgggccctactaaattagaatttcattattttatgtaacaacttatcatttctttcacaaatgccatattttctaattttaatcctttaaatgtcaaaaatatttatttaataaataaaaataaataacaaataaaattttcatttaacttatttattaattagacttaacaaagtctcccaattgacaaataaaccctaaaacctctt

SEQ ID NO: 264688 - DNA, 592 bp, Cannabis indica
aatcttggtactttataaagtacccttaccactcgttaaccacgagctgcttatgtcactatcgttgcccgatacaacaaacgataagtaagaaacctattcgcggtttcaggagtaattactcataacggttatgatcgtttcttttactggatcataatcgagtcacaacgataataatcgtttcataacatttccctcgatcataatcgagtcacaacaataataatcgtttcctattatttccctcgatcataatcgagtcacaacgatgataattgtttcctattatttccctcgatcataatcgagtcacaacaaatacataacgggatcttgatcataatcaagactgtaacaatcataacgttaaccatatacggtgtttaatacttttcttatctcagtccagaagtttagcgtacatcccgtctaactggaatcaacgcttgacaatcccgggtcctatgtcacgacaacaactcttgataaatactttaatcaaaatctccaacaccccataacatgccatactacacataaataacctaaaatagatactggatacaaccccgagccaaaaccaaatcct

SEQ ID NO: 264689 - DNA, 1269 bp, Cannabis indica
aacaaacttgtggctaattgtccaaataatcctaacttctaactaatgttatcattttgtttgttacttgtaataaaatttcacagaatgattaatttataatattgttaatagtttaggcattattttttatgggttaaaaaagttcagaaagtacaataatacaataaatagttcagtaaatatactaattaaaagggtcaaaagaataagaaacgtacacaactaaaattgaatcaatatacattatccataaaaatatataatactataaaacgacaccgtaccagcctccatttctgcatgcaaataaatttttgagaaatgggtctttagtactttatagtagtacacttataatctcatgttacaaggaaatttctagctaccttacatatacatattaattacatcatatttattccataaaaagaccaatcaaacaaatagtttgatttccaattttgccaagaaaagtttaagagaaaaaaagggccaaaataaaattaaaaggcataatttggaagaaagctagcttaatcattaaatgttattatttagtactcatcatgagctggttattattagtcatgaaagatgatctcttaacaaatctccctttcattctaggtctcttctcggcattgagtttccgaacctcgtaccttatttttttcgtcgaacaaccttgttcgtcttttctctctgtatctcgaaaccctagcttctcttcctcctccgacttcattattacttcttcttcctcctcctctaatcattaaatttccactattgttatgaccagtattcgctcgccacatatcctaaaattttatgacatcacacaaccaaaaataatattaagtttcaatcttaaataaatatgattaattaaaattatcgattcgaaagtgtgtttgaaatttattgtgtaaacactatcttttgtcaaatacaataataaaaattcatatctaattactatcttatatccaaacatactttataatattattaaaccttaaacaagacctaacttccaaacacacttttaatgaacacataaaataatgtctaaattaaattaattattttttccaactaatttttaaaaacacacaaacattatttaattgttttaagagttgatataagggattaataagattttttttttagaaactttagaaataacattaaaaattcaggaaaccactctagtctcacccggaaaaaaaaccataaacttagacgactttaagatattat

SEQ ID NO: 264690 - DNA, 899 bp, Cannabis indica
taaatataaaattagagttaaatttaattaaatgattaataaaaaagacatttttcaacttacccttagaattatggttatttttcaatattaattcagctaacgtaatgttattctgctaaaattttcatctaccacccatttaaaatttaattaataggttgcataataaattatggtttctattttcaatacaattaatactttaaatgatttttgtgagggcatgacagccacttatttttatatcgttcaacaattttataatggtggttcattattgtattttgtctatatataaataaataatttattgtataattaattcaaaatcaaagtcatcttattaattattgtacaatgtaattgtaattattattattttgcccgtcaatatatattatttgttataaattaccatgatttgattggaatatttttttctaattcttcaaattacgttataaagaaaacacatatatggatatcttatttatttaattaaaaattgaaataattaataaattttaataaaaagaagtatcacatgtttattctcatatataatttttcttgatttaactaaacgataatataggtataggaaaactaataatattgtaattttatatataagagggatatatataagagtattcaaatagtatatatattgtctgtattgtaattatagaagaggacaccaaataaattttgttgttttgtggtttgtgatagtaactaatatatataagttataataatagctatatatataggtcgaccagcagaccagttttggaacaacatttttgtaagcatatcttttccttatacaaacaattcgaaatgaatttatattgacaactgtttgaaaagacgtacgtatatatatatat

SEQ ID NO: 264691 - DNA, 5624 bp, Cannabis indica
tgctctagttgggccggtgaaaaacactgggctttaacaggcccaaacgacaagagaggaacttaacgaagaattaccaaattgccactgcagtcggagttcaggcaacatttgctttgcgatcagaaacaatctccaattcaattcagccatgaaaatttcagactctttgacttgaaattcagtatctttctcaaccaaaaactcgagcttaagctcttcttcctcagttatggcttccaagtcaacatcaacgtctctgtcatcttcattgtctttctacacgagctttcttgtactgaccttgctcgtcttcgtatccgaatcgaagcctaaacctttcaagagagatcagggacactcccagtggcaccatagcgcctttcatgacgttcgagacagcgtccgatccgatgttcgtcgcatgttgcattctcgagctgaggtattaattttcttttcgattttgaatgaatccgtttagttgccgagaatctatgcgggagaattcccaaaatgttcgaatttttaagttactaagttgaagttttacgaattgaatcgatacagtttgagaaattttaatttgtgttcattacgactgttctatgttagagttttggtgattgaattggaatgtctatgtaggttcctttccaggttcctcttgaagttaatgtagtgctagtaggtttcaatggagatggaggttacagatacgctttagattcacataaattggaagagtttttaagggttagcttcccatcacacagaccctcttgttttgaaaccggagagcctcttgatattgagcaccatatcgtcttcaatgcattccctgtaagcttgtttgatcctggttgtatttttttgtttcgcggtttcagattatatcagttgcttattgaatagaatatatgtatatgtatgcctgtgtgatctttccttcttaactagttcatgacaactgttgtttttgaatatttcatttttatggttaaaattccaggctgggcagctagagttgctagctcttgagaaggcattgaaagatagcatggtttcagcaggaacagcaagagaggtgactttcatgtagttgtttcaaacttcattatatttcttcagtattttgcaccttgagctttattgctataagtaattttctgaatatatgcgatgattaggccggtttcggaaaggaggttcctttgtttgaggtggaggcaacaatggtagagccagtatttcagagtttatattcttacacattcgatgtggatgatgaggcctcctcaacagaagagatggataaacctatgccttatgcaatttttattgtcagttttgataaggtatggtatccagtatttattttcatacagttctcttttttgctcccgtctctaacaaacttttcctcctagtcctacctaggttgttgtataaaaagagtatctttgctgacttttcttactctttgttctcttctttggctgttatgcttcttcaggtgaggatggatcctaggaacaacactgattttgacagcttaatgggtggaacaattccccagctaaatgaggaagaaatgaaaggacaagagggaggctacatgtatcgttaccgatataatggaggtggagcaactcaactatggctaggctctggcaggtatactttatggatgtataactgaagcatgcttaaaaattcaaatctgttggataaagtcttgtgatcatagtttatgagaaatgctcaagagtattttagggtataacaacatagaaatctctgtttcactctttcgggatctgttagacctaacttggttcccacgttgtttagattcgttgtgatcgacctctcagcaggcccttgcacatatggaaagattgaaactgaagagggtagtgtcagtcctaggacactgcctcgtttacagaatgtgatggttccactgggtttgactttgcctttgctttctgatcatgttacgcatgatatcttcattggcgagcttgcctctttgatatccaccacagtggagcatgttattgccccagatgttaggtatgacgcctattttcctccactaagtcatatttccccttaaatatttccctttgtgtaacttacagttaagactgttgtaagtcaggccaaagtttgatgtcaagcatgcctttatggaaactcatctgatagattctgaacatgcttgattttctgaaactcaggtatgaaactgttgatcttgcgacaagattacttgtaccgatcattgtcctacaaaatcataatagatacaatataatggataaaggccacaactacagtataaatatagaagagattgaggcagaggtcagttgtttttcttgacataaagctaaatttttatgctttgcccatttatcaagcaggtaatactatatagatgagcaaaaattttcatcacttttaatctcttgtattcagttgaagaagatggttcatgattcacaacaagttgtacttattgggggttcccatgcattacatcgccatgagaagctggctattgctgtttcaaaagctatgagaggccattccctccaagaaactaagaacgatggtcgtttccatgtccataccaaaacctatttggatggtgctcttcttaaagaggtgggcattcttttggagctctattttttaacttattaattaactaattttttaaaagttcgttgggtaattggtgtgaatatgttattgtttgtaattcaattctgttcattacggaaatatttcatcatctctattatactaagttattactacccaacatcatgatatcaattagcttttatacgattgaaattgtgatgattcttagaaattggccattgtttattttatgtattctcaattttttattcctaaaaaatgtgaactataggaaatggaacgctctgctgatgttcttgctgcgggtttgctagaggtgtcggacccaaccctttcaaatgaatactttcttcgtcaggtcagcttttagctctaatcctactgtcattacatcagtacacctccctatagaatgtttagaagaaaacaataattttttcttcttctttcccttatgcgtaactctacaaatttattgatcctattcaataagcctatgtgaattccccaacctgactttactgcctattatgtacttctctccagaattggatggatgatgttgatggcatcagtgactccatactgaagcataagcctctttgggctacatatgattcgaagcgtggaaagaagaaaacaaaatcagtcaagaaagagggaggattatatcgaacttatggaaccagagtaattcctgtgtgagcattttaccttatcctcttgcagttgcagaatatgatattaaaaaaaattgtttgcttatattgtagtacgtcattgaactttggttgtattgtaaagtgttttgtttgcttgcatcaggtctcaacgagtagaataatataaaaatgtattctatgttttgtcgcatgatatgaagtgaatcacgattcttgaagactaagagagttatttacaaaatgtgatgaaatagtgtttcattagaaagtctaaattgattaaagtatgtttttatgtctttgtgcagattcgtgctgtcattggctgacgtggatgctcatcttatgatggaagatgaaagttttgtttggactagtaaggatgttgtcattgtacttgagcatcaaaatgaaaaaatacctttaaggtgagaggactgcttgcttacattcttaagcatccagtgtcaagcctttttgattggcaaagccttgtgagattggtgttactcgcatcattagttatttttgctaagacacatccatttagcccattttcttgttcagagttctatccagtgtgccgctttgtaggatgtgttgcagaatctgtgatgtcacagttttcaatcctctttactatgctattcgtttgtcttttttgacagctatgtttcagaaacacagaggcggtatgccaatccatcacaggcgcaacgccatatattggcaggattagcatccactttgggtggtttaagtgcgccatatgagaaggcttctcatgtacatgaaagaccagttgttaattggctctgggcaactggttgccatccatttggaccattctctaatacatctcaaatcagtaaaatgcttcaagatgttgcattggtaaggccaatctctcaatgagaaaactttgcagaactgtcaactcaaattgataatttgctggtcgcaaaattactactagtatttgtttcatcatggtaattaacattgattctattttgatttgtagagaaacacaatatatgcacaagtggattctgcattacgcaaaatccgtgagacatcagaggtgataatttgcctttcaacaaattgctacttttgtgttccatcttctgacattaatgctgttgtaggctgtgcaaaatttcgctgcagagcgtctgaaaaccccacttggggagccagtgaaaggaaagaagaacaaaacgactactgaactctggctggagaagttctacaaaaagacaactcacttgcccgagccttttccccatgaattagttgatcggttagaaaaatacctagatgtaagttattcccaaccgtctgtagtaatgcatttgcctattcttatcgatactcttaaattgcacatcatacatcttttttcatggtttaataacagaatcttgaggagcagctagtagacttatcatcattgttgtatgatcatcgcttacaagaggcacgagcaaacagttcagaaattttccagagtaccttatttacacagcagtaagtactcttaacattctagtttcttggcattttagaaaacaaatttgtattgatgattgtaattctgtaatgtggcaacaggtatgtagatcatgtactggcgaacgagagagaaaacatgaaatgttgcgagatagagtacaaatacccagtgcagtcttctcaagcttatatatatggaggcattcttatcgcaggatttgtggtatattttgttgtcattttcttttcgtctcctgtgcgctgaccttaacaaaatactgaatctgatatcacccacgttggaggtgctagataggattgcctctttttagtctcgagtcttaggttgaaatgtgcaacacaatttttttttatacaacatgctctcaactcattgagaggggcaggagagagaaagagcaacattgttgacatatttagattctataaattgagttttcttttcttttgttttggccaatattgtaattcagaaactttaccgtattgtgtaaaaatagatacatttttaatttcaggagaaacatgaccgtttttgtataaatatacatttattatcaaactgataagctcaaaggtcccttattatttatctttgaagtttataaaactcgaaataccaaataaactgtgatgttgaggtgggtctcaattccatgtcagttgcaactgttgctaggagtgatcgatctgaaattatttgggtagcgaccgagaaattgt

SEQ ID NO: 264692 - DNA, 514 bp, Cannabis indica
ggtagtggggagcccacttcaatctaaatcgacgaaaaatagagtaacaaaactgcccagtcaaccctcactcaactcagccgcatccttcaccaacgcaacccaacactaacccgtgcaccatcaaaacactcacattcaacccaactaaagacacatacacccaaaagcgcacaacagaaatccaacctcagcacctataaccaccatctccgaagcacatccagcccactctccaagctcaaacgaagccagctgactacattcatcactccacacttcctggtttgtcaaaattgagcttttgatttttaattttgtatttggacaatttcttggctgtcgtatatagtgtttatgtgtggatgttgcgatttggataatactgatattttggaaattgttgggagggtactgaatgattggagtaatgttgggaaatttttggatgtgattttttgtgtgttcaaaagggtgtcgtgataaataaatgctgattgttggtgtggttttt

SEQ ID NO: 264693 - DNA, 832 bp, Cannabis indica
aatattccaaggataataataatgtgaattcatcatgatagtatattatgcatatgatcatgtgcttgtattcttctaattatttccaaatttcgttttattaatataaatattatgaggaataatatatctattataattacacttcaaatatttatttatcatttctttctttaggatcagcttcattctccaattgccactcttgaatctcatgttgtagctagaggccatgactcttgcctagggcttgatcttatgcaagagaattgggtacattttagtttgtgtcaaaagaacgctaaaaaaaatctcacggtgtcacccaaaaaagttgtgattaataaaaaaaatattattaaagttacggtaaatagtaacataactacctaaaattttaagtttaagcgataaaaacttaatatttatttttagcggtaaaagtactaaatatttataaatttataattttcctccagttttgtcagtgcagattttgtattttaaatttattaaaaaaatatttagaagtaactgatactatatatatttttgtttagatctaatgatttagagtttgggccttatacgtaccttgtttaagacaataatagaatctctactgacgaaattaaagaaaaaatattttgagaaggagggtaatatcggtttttataagtgaaaattccatatatatatatatatcaaaataaatgtatatataaatataggacatgcgtgactgatcctgtaatttttttttaaaaaaaaaacgtaggtgagggaaatataatattttttatgcctagcttaatagtcatttttctttaag

SEQ ID NO: 264694 - DNA, 734 bp, Cannabis indica
tatgctatagaaacaacgaatgatactcttaacgttgttccttctaattatgttcccaagacaccactagaacgttgaaacggtaaacaacctagtttatgatatttcaaaatctataggggtcccactcatgtccttaggaagaaagatttgaaatttgagtctcgcatagagagttacatgtataagaatttttcttccataacttattttttatgttaatttgtaatttttatatgtttaattagatatattaacttgttaatacttggactaattataaaatatttgtgtaataatagaattattcagaataaatacatttaactatattgttatttttttaattgtatgacattaatttaaataatatttaatttaaattaattaatatttaattaaaataaattaaattagtgaaattataaactgaaaaaataaactgatttttataccctatggtgtttatacttacatatagtttcgtttattttaccctatgccttcggttattgtataataaccgacaacatacggacactatgacgttggttcactactacaaaagacacttttggtgtcagtttgagtttcgtttaatttacaaaattgacactaaagagtaccctcaatatgaggtgtctgtttaaagcccaatagtgtcaattagtagtctgacactaaagacaaaaatcgaggaaaaaaaaaacttaaaaagaaaaaatttaaaaagt

SEQ ID NO: 264695 - DNA, 1884 bp, Cannabis indica
aaattatttagaatctttcaaaaatttacaggaataatattgtaatcataacaaataccactatgaaaaaaaaaatgtttcgatatgtaattttaaacgttgggattgattaaaaaattataataagagattataattaacactctaataataatataaatgctttttaaaatttatgactaaataaattaaaaaaaaaaaaaaaaacaaaaaaaaaaactaccaatttttttaaaaaaaataataaagttacaaaaaacaaaatattaagatgcttgtggctaaatagaattggctaaaagaagaatagattgatttaggattgagaaatggaacaattgaattcaaatcccaaaacaaaacaaaacaaaatagaaaaaagagtgagttttgatgtttttgggagttggcttttcaagtggggtccacttgagatagaaagttctttgattccatttgatccaaatagataatcaattatggcccttgaaatgtccatgtcatccatgcgtgtactgcacgcgaacattttgtactatgaaataggcgcgtgggtatacattcctttaagcacggtcgacagtgggtgtgaatagaatattgtagggtatctacgttggccacgtggtttgatgacgtagccaatttgcttgttttgggtttcatcacatcaagtctaaactatattcccctccatttttttatcttataaaattaagaaaaaaagattaatttgcggtaaaattcatcaactatcaatttacttgtaaaaaattatccaactttatattttagtgagaaaactcttcaaagtactgtttcgtttacatttttaaggtttcatctgtccagctttgttaagtcctaattttttgtacgtggcaatgataggtcactaaaaagttatcctacgtggccatattttataaaataaaaattaaaataaaaaatttaagagtaatttgcgaaaaaaccccaacaactatcaatttacttgcaaaaaaccacccaaccttaaaagtttttgcatggttttttgcaagtaaattaatagttggggggttttgttacaaattactcttaaagtttttattttattttgtaaaatatggccacatagtttagtgacctgtcattgccacgtgggcaaaattaagacttaacgaggctggacagacgacaacttaaaaatgtaaaggaaacagtacttttgagggttttcccactaaaatatgaggttggatggttttttgcaagtaaattaatagttagggggttttgccgcaaattactcagaaaaaattataaaattggctaaaaaattttaaaataaatatacaatgtagtataggaaaattttatttttgaatttttttatttataaaaatatatcttcaataaaaatgataaaatattttttagttatttatagttgttataaaattatttttttaattatttcatagtttatttatagttattttataaatataatgagattgatttttaattattttttaattatttttttactttttgatgaataaagtatatttttattaattttaaaactttaaaagtatatttttataaataaaaaacataataaagaattttttaaaaaaattaccaaaattcaaatttacttaaaaacataagtttaatgcaatttttttttttttttgaaatatgaatgcaaattattcttaatttttagcattaaaataaataacttataaattaagatggctggctccatctttagtcaacttcatactcaataatttatttgatttgtcttaattagttctcatctctatattttttttaaaaaaaataattttattaaggaatagctttagccattacaatgttctcatctct

SEQ ID NO: 264696 - DNA, 1160 bp, Cannabis indica
  modified_base (1153)..(1153): a, c, t, g, unknown or other
tatataatagaacaaaatacaagagtaaaggaaggaagcaaaatagaaaataaagagctaaaattagaatgaatggatggatgtaatatgtggtgattattatcaataatacttactagtcgatttactattagataaaaaaaagaagtgagcaatcgtaaaaaatggaggtaaattggcgggagaagggacacgtcatgtcatgtcatgtgaagaaagaaaaagtaaataggtaataaaagatggttgctactataatggagagggttgaatggacggttgagaattgagatgaacgatgagatctatgagcacggggaggccaggccactctgtctcagacttttgactttaaacgttcaaagcactctccatatttctctcttctctatttaataattcccatctcttgccaaagaaaggcagcattattagtgattacattactggtaccaataagtaataacctctttttttttctttaagagaaaaaccacaacactttcaaaagaaaaaataacagccaaagaaaatgtcgtggcaaacttatgtggatgagcatctgatgtgcgacatcgatgggcaagggcagcatctgaccgccgctgccatcatcggccacgacggcagcatttgggcccagagctcttccttccctcaggtcttcatattgtttacattacaatatttcttctcctataataaacattggtattggttatattgatcatgttgtttgtcttttcagttaaaggctcaggagattactgatatcactaaggattttgaggaaccaggccatcttgctcctacaggcttacacctttctggcaccaagtacatggtcattcagggagagcctggagctgtcatccgtggaaaaaaggtaataacaattaatggttgattggctctgtctgtttagatggttgactgtgggaaattatgaattttgattggcaggggtctgggggtgtgaccataaagaaaactggtcaagcactaatttttgggatttatgaagaaccagtaactccaggcagtgcaacatggtgttgagaggttggtgattaccttgttgatcagggcctctaagctataatgaaatctctattatcatcatcatcatcatcatcattattcaagttatctnttttttc

SEQ ID NO: 264697 - DNA, 560 bp, Cannabis indica
atcacatcaatgtaatgtaaatcaagtgcactaatgaatcatgggatattattttttgaagcaaataatcacagttaccttcgatagtgttgacatcactgtaattgtgaataactatatgttttggatttaacaaaaattgtatattaaactataaacatgaaaactacatgcaaacataaatgatttctaatcttctattgataacaaataagattgtatttaaatgggttttatttaggccataaaatctcaaaatttttgtatgtttaacaaatgttgtttttaaattacacaggttaaaccaaccactaaatatttatttgaggtaaccaaaatgaaagaatcatggacactagacctcaaagaaggaacatgcacgtgcaacaggttactaaacaagcttcgttcaattactacaccaagaaaaattgactagcaacataacaaattcagtaaatgtggagagctaggacaaaacaagaaaacatgcaggagaagacatcaaaaatgaaaagaagtaggacaactaaaaaataacagtggaacaacagaggaaa

SEQ ID NO: 264698 - DNA, 2251 bp, Cannabis indica
aatttgattatttttttttattgattttgacaaataaaataaaaatatataaggaaaaaaataatacattattagttcttaaacaaataaattttgggaaaaaaatataaatttagatataaaatatatttttttattttaaaaaaaaagttagggtcggatcagatccgattcgtataaggcgagtcggatcagatctgatccgagtatcttatccagcggggcggggcgggacgagatccgtatatgatctggatcaggtcggatcagatccgacccgccccattgacattgttaatttttaagtgacatgtaaacgatttgaatcggtttgggtaactgacgtaataaccgtaaacacaaataatcttatttttggcttcactttttaatcgatgctattttttttatttcatttaattaataactgacgcaaactaaaaaaaaaaaggaaaatctaatcgaagatggtttcagatctgagatggtttgatgcactaccccgaactcatcatcccagaaatcagtcgtgggccaccaccccaaacctaaaaaaaataccagatctagttgtgacaaagagagagagaaagagagagatcaaaaacaccttatgtgtgccacggctctgccatggtctggtgtgtgctgcaacaacgacaccaccaccccaaacctaaaaagaaaaaaagaaatcaaacaaatattttcgaaataaatgaggaatgagagagagagagagagagaaagagacccctcatttttctcatggagatgaaaatggtggcagggtgaggaccgagagaagagggtcgaagagcgggtggttcaaaaccattgagagaatgaggaggggcggtgttaatggaggtttttgatttttaaagggagagagaagagtggaggaggggtggcgttaatggaggtttttgaagagagcgagagagagattctctcttggtttcggaatggtgaaaaatgagagatgaatgtaataaataggatttgttaaatttaaaggatatagcttcagttattattagacactaacattgttagcatcagtcatgaaccgacactaacaatgtaagcgtataataataaccgacacataatataaaattttttaaaaaataattttttggcgtcagttttcaaattcacttcgaaatagccaagcaaaatattactcttctacgtcagttgataacattagcaaaagttccacctttattttttgcatcaatcattgttgttgacccgtagcattgaccgacgcaaaaactattttttgtagtagtgcatgggcacctaaggtgtaacccagcgctcacgttgacattcttatattaggtttcagattttgggaccgtcttagtgcaaagtggttaaaatttacatcgagacatcaactagacatatcacaaacatgtttgaggcatcaaaatcagattcacagcaaattgatttttgagaactcagcgccccgagcacccagtgcccaggttgacaatttatcaatttgggccccttccaagtgtccgatcaaagatctaacttttgcattgaatccgtcttcatcaaaagtggagaaatatgtctttttgaaagaaaaaacaacaaattcttggcacagataatagggcccagcacccaagttgacacttgtggttggtcttacaccgaggctgacacctggggctggccctgcacccaagttaacaatttgccaacttggggcacaaaaagtggagttttttaggaattatttcgagcatcatctatgtcttcataaaatattgagattcaactattttcagggaccaaacaaaatttttgaaggggcaaaactggcacccagccctcaggttgacacctagagttgggcccaccgcccaggtacacattctgtcaaccttggttgtttctaatctagttctattaaaaagtgtttcaaacattttcaccgtcatcaaaaataatgaagaatcaagtaaactcgaggagaaaaacacaaactcgagtccctagaaatagggcccagcgcccaggttgagaatcaacatgggatgctaccttcaattgctcaaatgttaaatctgatgcagcaattgaattgggcatgctcagaaatagggtaggagaccccgttctcaagttcataagccttagatatcagaattagaatcctgaaagctcggcataaagggcctagcgcccaagtcagcatatggcctggtttgttggttct

SEQ ID NO: 264699 - DNA, 2151 bp, Cannabis indica
tcatctccattttttccggcgacggctttgacaggctctcctacctctgtatgactctccagcaggtattcaacatttttaccttctccgatctcgtaccaacaaatttgttcttttaatttttttgtgttcattattgctatttcttgacagaaaatgtatgagtattaatgatttataaattttctgctcattattgtaattttaggatcagattcgttgtttttgaccctattttttcatttcttaatttttttagtgaaagaagatactagaactagctagcttactatctagacgacgatgaggaagtggactattccttcggttcttcttctcctctgccttctctgtcttctaccagatcaaggtaatcttatgtctttccatttggatctttgtactttttccgccattttcaaatttgaatagatcttggacacatttgatactgtttatctttcaaatgctgtaattcatcttagatcgtatatagttatgctcatttcattcgtgagaatcagctgttttttcttcttcgtagaattaactttgaatggatcttgtacacatctttcaaatgctgtatttcttcctcatttttttgatgaaattcatctgagattatatatagttaagctcattgaacttattcttgggaatcagctgttttttcttcttggaattaactttgaatggatcttgtacacatccgatactgttcatctttcaattgctgtatttcttcttcattttttgatgaaattcatcttaagatcgtctatagttaagctcattcgtgagaatcagatgtttttttagaattaacttgcttaatgtgaatgttttggggatctgtggcggttcaggtcgtaaaatacacgtaaatgcggaggacaactccgatgagcttgtagatccaccgaagatcgaagacaaaatcggtgccgttccaaatggtttatctaccgactccgatgtcgttaagaggtttgtacaaacctcatttcttcgtctcgtttacgttattagctcactttactgtatttttggtttattttttgaatttatttaagtgataaattaaaaaagttgcacttctttttagggaggcggagtcaatttcaaggagatctcttcgcaacactgcggagaagtttgagttccaggcagaggtgtctagactcatggatatcattatcaactccctttatagtaacaaagacattttcttgagggaattgatctccaatgcctctgatgtaagtttgtttagttgttataattctgatcaccttaaataattgctgcccagattggagttgagtttaatgttaaaactttgataacttttgttaggcattggacaagattagattcctttccctcacagacaaggaaattttgggcgaaggtgataatgctaagcttgatatccaggttagtgttatattataagacataaaaattaatgtgtttggacatagttttgtgctttgtataacgctcttaactaaacaactgaaaataaaacaaaacattattacagattaaattagacaaagagaagaaaatcctttcaattcgtgacagaggtataggcatgacaaaggaggatttgattaagaacttgggtactatagcaaaatccgggacatcaggtatgtataaattaaaacattgacaattattgtgtaatttttaactattagaaggattatattgatttggaaaatgtccttatctgcagcattcgttgagaagatgcagaccagtggagatctcaatctcattggtcaatttggagtggggttctactctgtgtatcttgttgcggactatgttgaagtcattagtaagaacaatgatgacaaacagtaagtatcatgcattgagacaaggtttcaaaatcattacaaacacacgcatatattgagtaatctgacaatgataaaaaaaacttgtctatataggtacgtttgggagtcaaaggctgatggtgcgtttgctatttctgaagatacatggaatgaaccgctaggacgtggaactgagatcagattgcaccttagagatgaagctggggagtacttggaagagagcaagctaaaggtgagtgtagtcagtttttattttttaaaataattagtt

SEQ ID NO: 264700 - DNA, 583 bp, Cannabis indica
aggtcggggagctagtagacacggacggtgatgtcctggttgaaggagtagactacgtcactaaggagcttactgctgcagttcctcaaaggaggcaaagttccttgggtgctaggtgggtgagtcctccgtccaaggtcactgaggcacgcctaagggatctggaccagttcggctatttgggcgagctggaatgttacgttccctcctccaacaatcgagccagaaacgcgaagaaggagatgtgtgactggtcggatgctcattccaaacaaggggaattactgcctttgcacccgtacttgatgaaggtggcatacttcttccgtctctgtccgacccaattcactcccaagggcatcaagtatttgtccgccctgttcgttctctacgccacccagaagtggggcatgccatccccgcacgaggttagctggtttttcaacttgaagtccactcccaagcagggcaggccgggatacttctatttttcccagcaagactttaagtggttgacgggcatcggggacaaggccatgagaaaaatcaagaattttgttaacgagtattacatggtggaagg

SEQ ID NO: 264701 - DNA, 1225 bp, Cannabis indica
aattgacttcgaacactaaattttaaatttttacatacacttttatggatgatttttagagatgcacctggctatataccattaaaacaaaaattcgaatgcattgaatgcttttatagattttaaagcctttagttgaaaaccagtttgatactaaaatcaaaagcataagtatgattggggtagagagtatcaagtgtttgagcaattagtcagagcaaatggaattcactttcagcactcaagtcctcacacctctgcccaaaatgggagagatgaaaggaagcataggcatatagttgagatggggttaacactccttgcttaagcaagtatgccactcaagtattgggttgatggttttcaaaattctgtgtatctaattaatcgacttccaacaccagtttcacacaacaaaacacctttcgaaactctgttctatagaaaaccagactacaagcaacttgaaactttttgagctgcttgctatccctgcataagaccttaccagaacaataagtttcaattccattcacttaggtgtgttaatctgagatataatgaatcatatagaggctataaatgcttgagtacaactggaagagtatatatctctcgaaatgttgtattcaatgagagcatgtttccttttcaatctggtttcttgaacactcaagctccagagaagaaacttgtcatacacaatgagtcttggtcacaacttcctaacattcatttcagacatttcagctctaatcctcaaaatacaaatgctcctgtaccatctcaagcctccacagattccactcctacaccagcatcttcaccaaatcaggtaaatccctcaaactcaccactttcaagttttgactcacttgatcatggatctatgtcacctgatggtatctctgtaggcatcagcagagataattttcacacacagcaggaacaccacagtgaagaattaagaaattaagatcaagaaactctgaatcctgttgttgaagcttcaacacatgagaatcaaaatcttattgcagtccccacacatcatatgattaccaggtccaaagctggtatttttaaacccaaaacttacctcagtcaagctaagtgggtgtaacgaccgccttagtcaattggattagaaaaggcaatttgcactaatttctagtattttattattatttatgaatttaattattttggaccccaatatttagaa

SEQ ID NO: 264702 - DNA, 618 bp, Cannabis indica
atatgatgattttttttttctcacttagatttgtctcaattttttttttcttaaaatttttaatttcttggatgaggtattgttctaatttttaattctttttttttgttttgtttttttttttttttttattcttctatttaggttttggttttggcttactcttttattaccttatattttttttgataatagtctttttctttcttttttaggtcacaaattatacgatgaggcaagtaaggaatttataacaaaatcatttacttatgtataaaaaaagttagaagttaattaactcaagtatatgatttattttatgtatagaacaaacttattttgatcaatagtgataactacaaataagatacgataatgatagcgactttgaatgcagtgacaactacaagtgagatacggtgatgacatcggctttgaatgacaacagttttaaaatcatatgatgaattttctatagatttatcaattggtttttttagatctctattttgtgtgagaattttccaaactctattaattttattttattataacttttgaaaatatctttttgttgctttctttttaagataaaaaattgtatgatgaattttttta

SEQ ID NO: 264703 - DNA, 2017 bp, Cannabis indica
caatgtaactaaaattcatcaaagtaaaagttatgcattgaaggtgctaaacgatagcataaataccttttagttgtattttaaaggattagaatctcattctatttcaaagttttctttgagaattcttgtggtttgattgggaagaagaaaacatagagaatgtaaatagacatggaattaacattatgaaattttttcttatattataccagtctttctttccacttcaaaatgagtcattccaccaaaataatgaaaaatgcaatccattgaaatgacattccaacacttaaaaatgcgaacaaacaaataaacagaataaaaaatgtttcctttccatttcattgcctccaaccaaacgccacctaaagtagtctctaagtagctcagcaatgtctttatgtatatgttcaagaattttgatatctatgtcaattgttaaatacttcataaagcaagaaatggccagaaaacgaactactataacaataattattattaagaataaagaaaaataagtttagtatatctcagtgtgttacattcaagagtttttcaagcaattcaacatggcttgaagttgataataatactgtatcaatataaccaagagaactgacataattatagtcacaaacgaagtgaagaaaaactgcaaggacaaagcactccataaattagagctacccataatccatatactcaataacaaaaccaacaaaataagcaaccactaaagcccctaacaaaattgaaactttatgagaatcatatcaagaaagctctaacctctcttagcttccttccccaatttcagttccttttccctgcattattctctctaatcaaatcaaattgtaatcgattcaccgacgccttccgtacaacacaaagagcacagcagcaccaacaacaatggctgctccagcagaccctgcaacaacaggccattgcaaattcaaacccttctcttctttcccattaaacatatcatccacagcaccattaacaaccttcacagtcctgtcatttacttccctaacaaccgtttcggccttctccacctccttctgcaagtaatgaaccttagactccattgccttagctttctcctctgattctttaagggcagcctcaacagtcactctctccttcacacacttctcagcttcagccccagttttagaaacctgagattccaactcctcaattactttattcaattgaactttttgcctctccaattcctcaatttgttccctcatatcctcctcagctctaactctcttgctcttttcctcaatctccttcatctccaaaaccccaattttcctctccaattcccttaccctcttttcgctctcggctttggtcgtcttcaagctctccaactcactctcaatgctcccaatcttcgcttctttctcacttaaaacccccttaagctcagaaacctctttcgccgcagcctcgccttcggacatggtggagatcagatcgtgttggagcctcgaaacttcagtctccaactccgccgctctccctgcgatcgctcccaacgccttcttatcctcttcgaaactctcgatctccttctccatctctctaagcttctctttcagctctgcctcatcggttttccccttctcgatctcaatcgtcaatttcttaatcttctctttcgcttcttcattctctgcagccaatttccgcttctcttgttccaaagtctcaaccttttgggtcagctccgccgtctgatcggaatcgtagaaattctccgtcgcttgatcatcgattccattcatcgccgtctcttccgccattgctcaaagcccttatcctacaaaaaggaacagaaaagaatcaagcaaagagtgcagatgataccgaagaagaggacaaaagaagttgaacccacctttttttgttgggtttaaagattaatttcacagttttgagtctgaacgaggctagggtttctaaattttgatactgttggacttcagatatg

SEQ ID NO: 264704 - DNA, 590 bp, Cannabis indica
ccccagtatcgcggacaattttctgtcttcgatcgcccgtgcaaccttagttgcttccgtcatgaatctactgatgtaggctcggagaggttctcctggtctttgcttcacttcgatcaggtcttctaagtgcagtggaagttggcgagaagaggataattgtgcatggaattctgatgagaaagccttccatgagttgaaccttccgggcgccaacttgaaataccattgttgggcggcttctgagagagtggaaggaaaaactctgcaacatacatctcctcgtgctccttgcaggtccatttgcatttcaaaatacttgagatgggataaggtatcttccttcctagtatacatcttccaggttggcatcttgaacttgtgaggcaattataagacattaatctctagggagaagggggatccacgtgctcggtccaactcaaggtcattttttttctgaccggccaggtcgtggaacatactttttagctcatctaactgtgcctgcacggctggattaacatgttcagcctcttggccgactagagttacgtcaacatctcattgagcgagattttgagcacaag

SEQ ID NO: 264705 - DNA, 987 bp, Cannabis indica
agttatttgttcctcaacaactgaggggtctttatgagggtagctgctgatatgagtcaaagtctctgaaggtgataggttcacacccgtaagattaaggctttggaggacgttctggaacttcgaagacttcgactctcagttcattttagagcaatcttaaatacctttctaaggccttccttgaatttccaactaggtgagggcctccaatcatgaactctagcctgcctgcaatcggtgcaggctagagaggtgcattgccccaactagagcgtcaggtcatacataccgctgaagagaaaaatgtttttcattaatgagaaattgtattttgtctcgcaactgattacactcattagtgtcatgatcgtaattgttgtggtagcgatagaatttattcatgtccctcttccctaactctttgaagggaagaggtttggatacgacactattgcttgtgtggctgtatagatctcctctcttagggccaagaggatggagtaagtggtgaagcaaggctcataccctcgtaagggcctacccccagtcttgggcttctttccactgggggagtttctttgctttccaccgttgttagatctcttccctctatttgattctattttctttccgttgccctgcaccttagtagtaggggtttgggagtttggtgacttctgcttgccaccctttgagccattggcttaggtgcagcttcttctagtttgataaagtcatctgctctataaagaaagtcattcatgatgtataccgccttgagcaaaggtcagaccacagaggactcgtgtccttgagttcacctataattgtcattacccttgcatctttgctatgacttttggtcttagcgattgcctataagaatcattgaatgtagtccttaaagggctcatattctaatgcttgaaatccaccaaattaatggatttgatcttgcattgttaggagtggagaaaaattgtt

SEQ ID NO: 264706 - DNA, 892 bp, Cannabis indica
agtggcgtgtaggagagagaggctagggttttaaatgtttgaactcaagagcttaggaatgagaactaagccctttaggtttagcctagtgctcttatatatgagagagcttaaagaagatctaagccaaagtaggttaatatcccaaaaaatgaggagatatcacctattgtctagctgcttcaacacacgagcacaaatccttccaaggggcctaacagttagctccttttgcatgtattttaccccaaccattagtggaatttttgcaaaaacactaggcaggtcatgagcatgtccatacatgccctttagcctataaatatctttctatttccatacgaagggggaggacaaccaagatagttgaaactctactaaaatagctctaagctttcctcttcctcaagagaaacaaaaagtacagagttagggtttcttgcattaatactgtaaaaacatcaaacaccccctttgagactaatagacggacttgtggactaagactcattaacgcctaaaccacataaaaaatcttcatcttctttgctactgttctttactatttcttaagctctcattatattagtttttaaaaatctcagtaaacaataatgcatatcaatctcttaatatcaccattttaattttaatattatattatttaactgataaataatataacaatcacgtcctttaatttaattttttacgtcacatacattaaagctcctataacagtcatattgggtgttattgtttttttttttacacaaggcatggttgttatttgtttgaacttcaaattgtgattacaaatgaacatttataatattttgtgatcacaatttttcacatttatctttcccttttttcctaatcttttcctttc

SEQ ID NO: 264707 - DNA, 649 bp, Cannabis indica
tgggcttattcaatgaataacaattatttaaataagggaaatttacacttgtttcatactgcagtatactgtgttaagttttcactggtgttctactggtatttttttagttgttctactgttgttttgagttgttctgctttgtgttttactggtgttttataaaaatacagtatttttgaaaacttttccgtgtagcagttaacccaaattctagtatttttgtaaatttcccttaaataatggttaaatttctctcctttgggccttgtgtgagagttagggggtcatactagtgggtacgacatattgaacccattcctccctcacacaagccaccccaattgtgaaggtccatttgccttatttaaataattgtattatgttaattatattagtttaacctaattaaaatttaattagcaacataattagttttaaaatatatgaaatttattttcattggattattttaaaattaattttatagaaacacttagtttaatgagatatattctagtaactaatttatattaactaatatttaattaattagaaaaatatatttaagttgaaaattaattttatttaattttagatcaatttaattagaatatttttcttaggtattaaattagaatcaataatt

SEQ ID NO: 264708 - DNA, 771 bp, Cannabis indica
attatattagtttattgaaatattatttataggtagctaagtgttttaaggataaaatacattgaaggctgtaacggtaaatttatccctactcaatgtacatcatctatagaggatcattgattattaggattataacaatagataattcatagtgtatctatatcgtggaacatatagagcgctctatataattaagagtgcaattcttaatctatagtggcacaagaaggaattaacaagttagataatgtacttggtaaattctagagctacttattagaagcttgattatataggtccatggtcccctcactagttgagacaatactgcttgtaagactcagttatttgattttaattaattaattataattctaaaattagactatgtcttatttataaattttcactaagcaatggtttaattgtgaagaaaagaggttttaggatttatttgttaattaagagactttgtggagtctaattaataaataatataaatgataattttatttaataattatttgtgattattaaataaatagttttggcatttatatgactaaaattggaaaatataacatttgtgaaataaaggataaatggttgcaaaattggtaaaattataactagtggggcccatctatatggccgaccacttaaggcttatttttgctattattttattattttttattccatattattaaaatcctaaccttaggtgaaatagtatacaaggaaaaggatggtctcattatccaataa

SEQ ID NO: 264709 - DNA, 2805 bp, Cannabis indica
aggtggtggtgacttaaaatgtctgttataccctataacacttactggggcagccaagacttggttcaaaaagttgaagaggcactccattacctcatgtgatcaactctcacgcgactctaagaaggaattccgtgccaccaaagccaaaaagttagaattttcctccctcaccaatgtgaagcaacaaccaggtgaaagcttaaaagcttatatcaaccgttttaatgccgatgcttccaaggctagagacgttgatgataatggaagacttatggcactaggggcaggaattactaatgggtcccacttttgggatagtttgtaaggaagggaagcttgcactatagatgagttcatgaaaagaactcaaaagtacatcaatagggaggaggcaaggttagccaataaccttcttctttcatctggaacaatagaagctactcccacttcaataaataataactcctccaatgcgaacacttccaacaagagaaaaaatgaccatggtggggaccacaacaatactaagaaagggagaactaaccaacctcttcacaccatcttcatagagttaactgaaatgccaaaaactattttcctcaccaatgagcaaactgtgaattttagagttctagagccgatgaaaggaatcgggaaaaattgagatacctcaaagtattgtcgataccacaaagacattggccacacaaccaacgaggtaaagccttgaaaatagaaattgaagatctcatccgagtcagaccacttgctcgttatgcgtgcaacaagtagggggagaactcccaagcacaagggcagacccaaaacaatgcccaatccacgacaaacaatgagcaagccccgccacaaggccaaaatgtagatatggcaccaccattagaaagagatgatgtcttagtaattgctggaggtccacactttgttggaacaagtagtgggggccaaaaccgctacattaatgaactgaaaagtaataacaatgcacaagtgcgaccacctcaacgtcccacaaaacaaccccgtacagagggacccattacttttaatgaggaagataaggaccatgtacaaatgccacataatgatcctttggtgataaccactcaaattgccaacaagagattgaggagaatacttgttgacaatggaactggggtcaaattattatacaagtccacccttgacaagatgggactcgagactcgtgatttgaaaccatgccccacatatctatatgaatttacttgcgagggtatagcaagtaatgaaaagataactcttcccctcataatgggagaggccccgcaaactgtgacaaaaatgacaaaatctgtcgtcgtggacattccatcagtatacaatgtgataataggaagaccaacacttatttatcacactagggcagcaacatcagtgagatatttggctgtgaagtttctaacaagtcatggaaatgacatagtacgtggggatcagttggcggtaagagaatgcaatagcgttgtgatgaaaggacaaccccaacttgggactcaacttttccaagccacaacctttgaacacgcttgccaaagtggctaggagaagccatgtggagccgactctttctagcttttatttattttctcaagattgaacaattttatggttttttaagttcttaagtgccttttaaaaagcacgacatttaaatttcctttttagacaattggttgtttattttttaataaatgtttgcaccttcttacaaaaatgtttcttttataatgttacgtcctcacccaaataagttacaaaagtaacctaatacttttataacttgggcggcatataggttatagaccattactatattccaccactccacaaaataaatctcaaagtcatttcccatatgtcactttacaagcatgagattttaaaaattttcgccatgaatattttttcaaaatttcacctcggacaaggggcaaagtcggtgtgaaattttaaatgtggattagcaaaccctaactagttaaatgtgtgtttattatggaattatattattatataatttattgtatatgaattactttgataaatgacatgttaagaccccgttggtgagccaggggcattttcataattttaatctgagaagggtaaaattgtaaatttaatataattgcgtgcttatggactatattactatatagtatacttgttttgtcctattttaggtattttctgacaagtcggcgcggtatagtcacaactgggttcgggattaaaatacatttttaggattttaaaatggcatattattgttattagtataatctgaaattatttatttatgtatgatatgtgaaatgatatttatgctttgtattgagttttttttatattaaggccctagggcaatttggtcattttgaccatttgacttgtttttgcaccaaaatgatatttgattaaggaaaatgcattattttgatattttcccaaccctaagaaccgaccatatgcttcatcttagtgatctctcaattttggtaaattgactttggaagctagcttggattgttggaggttttgagtgcttgggtttggaaaagattttaggtagtttctcttaggggtgggcatcatccaatccaatccaattgaaccgaaccgatccaatccaatccaattacaaaaagttggatatccaattacaattggattggattggatgttaaaagttggattctaattggattggatcggttattggatgtcaatctcaaaatccaa

SEQ ID NO: 264710 - DNA, 1128 bp, Cannabis indica
ctagttctggccctcggacagctatctcggggatgatgcagccagtattaagattcggaactttgctagggccgaattagagagtcagggtaggactagcttgattgcttttttaagtgtttagtgctttcacagatattctaaacactccctcttttctcttgttgcagcaactaaactctcatggaggcaatcttggccacccttgccggagctcacagtcctgatacttctcttcctaccaacttcttcccatatggtcacccccacgaaggcttcttccagtgcccctccaaacactattgacttcgtggatgaggaggaggtacttcctggggaggctaaagaaggtcaagaagagcaatgggctcttcctggggaagttgaagaaagtgaagaagagcaagaggttgctctgatccgcaagcgcaaaggcaagatggtggctgaggaaacacctaaacggccgcggagattggacactccagccccgagccgtgatttcgtgggactccctcccgacgcagaggaattgacagtgcctcccaacatagtgctgactctggttctcggagatgaggcgagacaggagctttggatagccaaacacaactacgctatggatgagtactcccgggggcatggaggccttgaggaggattttgcgaactgagatgcaacattctcttaacgatcagaattaccagatcccgtgggatctaagcctggaccccctgatggactggttcaatcgtttcctcgggcctacctttgctccttttgccgcggagatgaccggtgagttcgtctcccagctaacccagtgcgcgcctaagcggttcgctgcttgtgcatgcttgaactccgtctttcaagttcaggatctcagccactctttgaccgtggtaagtattccgtggtttaccttttttttcattattttccttaaggccttttctcactcttgtctccttttccagcttgctgcagaggctggccgcctttccaagaacctagtcaatcacgactttgtcttgtccgaatttggggacatagacgaagtcgtgaagaccctgctgaaaggcgggcgttccaagaggaggtcgcgcggcgggaggcccttgctaa

SEQ ID NO: 264711 - DNA, 394 bp, Cannabis indica
ctctctctccctatctttggccgaacccactttctctttcttcttccttcaatttcgaaaaggagtttcagcatcaaacattcagagaaagagatccaagttaagatcttgataatactctacgacagaaaggacgttacaaaatggtatcagagccttgacccagtcggaagtgtggtcgacgaggacgtcggaccccgtaaggggggtgattgtgacagtcagtagtcccgtgatccgtaaggggaaataccaggtaagctgtgcaatcccacatcgcttgggaaatgttaagtgtgaattctgagactgtgtaggtatgggactgcatagttgaagatgacttaaatggattgattggtactacctatatcaacaaggtgcatcttgtttt

SEQ ID NO: 264712 - DNA, 2538 bp, Cannabis indica
ctaactcttagctatctctttttaattcatctaaactttttattatgaactgattatttttaagtatttatgcggaatcgtgctataatgtgaagcaattacttgattggtaaagcaaagtttcagagcatatcttggtaatttttcgtaagaaagaaacattcatgagcatattattatcagctcagcctatccttaacaaaattctttcattacataatcgatcataaagtattatatatggctaattaattgagtactggttgtaatttaatagagttaaagatctcaaaatgaatctcctaaaactaagacaaaacaaggtcgagagagagagagagagagattgtacgtgtaataacctgacattttcatagtacaatagcattgatttcttacaatttacgccaccaacggctacattaattctaccttttacgctcaatctgcaggtaccaaaagcattcaatattccacctacactttgcaaatttctataagccacctcatgaaattaaacacagttaaataatccaaagaaaagagacacccacttaacagtttcagtctttcagctcctttgttgtctcatgcacttaataaaaacagaaatactaaaaggcacggtaatacttggtaaatattattattgatatttactctatataatgtaataattttaaaaattatccttagccaatcacaaacaaaatatagaagatactaataccattatacccaataagaaaatgtaatatgcaacgaaattgcttaaaaaaataattaaaaaagtcaaaaaactgcttaaccattcatatcttgccacgtcaaaatagatcctctgacgtggcacagccttggtgtttagtactttacaatataatccgataagaaattgccagaataaatattatccggcgactgatatataatatatcaacaaacaaacacactcaaactccaatcatatctaagctacaatggaaggtaccagcctcttcttccactcggccaatattttcatttgagtagaactgttttaactcctcacgacttggagaaggagaaggagtaaagtacaaaggcgaagcacaaggagtcgaaaatggcgtcgcttcatccaccttcatactcatcaccgaatcaccatcgtcggtcaacgttgaccttacaaaaccctggtcgtcgtcatcatcatcgcgatcagctgaagtagtaatactaatactactctgttctttgctctcctgatctgttttcccagcttcgaaatcttcctcctttatagtgaaaagcaacctcgtctgtctgtaaagctcttgaagcctcaacaattcgtccacctcaagcgccgtctgagtagttgtgttattgttcgggtcgggtcgattgttggtaatattgggctcgatccgagcccggttgttgttccagcagaagaagtaaagaagttctttagaggaaagagcgtaggttgagtcatcaccggtggtggcaactgattctccgggtgagaaggtccgtcgttgaaaacggcgccgtcgccagatgacgtaaacgaggtctgcgatgagaactagaaaacagagtatgaaaactacaataagcgtagctccgagcttgctaaggccgctcatggttgacttgggttggagaaatggaagtattattataaaagaacaagacttgggctttgttttttctttattattaattttctcgaagggaaactgggcaaccggttggttaccggaaagggtatggaaagtaagcagtactgagtgtgatgggtgtcgcgggtcacgtgagttgccggtggatgaaatgtatagaaggagaaaagttaggagttgttttaaaagggaggaggaaagacaataagacttttttttgttgaaaggttattgtggtccatttgaaaaatataaatttattaaataaaaattcaaatacttttttttttttttgagaacaaattcaaatacctttcagaaaaaagaaacttcaaatatagttttcaaaataaaaataatagtgacaaggttattgattaaaacttaaaatttaaaataaataaagaaatttctcaaataaataaatacataaataaatttgaatttaattaggcggacatgtgtagatcttatctagttataatggttactttggcctttcctatcatcttggtaggtacaagatggttatacgttaaaaatgacattttacagttcgaagattgtttctattaaataaaaagcgaatagtagtacgtattttatgtactttcacattgatatttcaaaactctattatggcttatccaaatattagaattttattacaggatgtggattaatagtgttgatcgaggttttcggcaaacaataaaataataataaattaaagaacggtaagaaattaggagaaagatttttacgtggttggggcgttaatgaaccttagtccacgagtctgtatatttatgagtgtatttaatacagagaatgttcttggtgagtatttactcttcttgcactt

SEQ ID NO: 264713 - DNA, 2919 bp, Cannabis indica
ttgtgtttaactaataacctagatctatgcaaaccaatttaaaagagaaacacgtctctttttgttggttggtgtgttctttaagaagattcatgcaaattaatttttgtgttacttttgttttaaacatttatcactgcaagcaatttttgtgtactaaattgatatgtgtttgataaataaagaacaggagaaccagaaatcttccttcaaaaccgagaaaacccagataataaattatctctatcgattagcctttttcgaacttaaggatgttggatataacaaacttctaattgttttttttttttttgcagtatgcacggcagaaattgcttgaatttatgtttaggcatggtcaatttaatgatgcctgcatgttgtttttccccccaaatgctgtccctcttcctcctcaaccatcaacggtgggggttgcaacatcttcttcatcccctcaaagacaagataatttggcgactgattatgggactattgatgagctgtgtgatcagtgtgttagttatggcgcaatgcctgttttagaggaagtgatatcagcaagaatggcagctacagagccacaagacgaagcagtgagccagtatacagctgcagcgcttgcccgaatttggctatactgtgaaacgcataagcatttcaattttctgtaaccccaaacctcttacacacaaaacacaccctactctttgagctagaccctagtattttcaggtagtttttgacttgcaggttttagatcaaatttggcttttcttacctttcatgttaattagcaatccttatgttttccttctccacacacacccttcccttaccaaaaaaaaaaaaaaaataggttcaggtggattttttttaattgtcacagatgctgtgaataaagtaaacttttccctcgttgttgttgttgttgctttttttaaaccactatttatcttaccggtacttgagtcttcatgtcagtgcaattattttttttttaattttttaatgtgtgactacttagaagttgtttaattgttcaggttatcaagaaagaccatgttgctgctggactttgttgcattcagttgttcataaattctgcttttctagaggaggctattaaacatttggaacatgctaaggtataacctgttgttacttttggatatgttttttcttacatagttacaagatgacctttgtttggtaaggtaaaatggtgtaaatattccaggtttagttagtgtttttgtaaggtgggtaagggaatggaatgctgttcattaggttgggaaaactgatatgcggactgatgaaatttagaatctggattagaattatgaggttgccttgatggttcttggtgtagatcattgctaaatcatcatgcttattgcaatcttatgaataatgtttgtcaagggatatggatttctagaggtaattttatccacttcaagtttttcttttactgttatgtccgttttttaagtattttgggttttgtgagtttagctgttactgctttgacttagttggtttctcttattcctttattttatagaataataacatcgtcattgcttattagaaaaaaaaattctcgtgaagaacacgacacttgaaaaaaaagtttcataagcaacaaataatattatatattcatatgcgtaaaataattttttggttgtagatgcattttgatgaagggttgtcggctcgatataaaggtgattctactaagcttgtcacaaagggtgtcaggggaaaaagtgcatctgagaagcttactgaagaagggcttgtgaagttttctgctcgggtttcaattcaggtaaatggcacgaatcaaattttctaactgttcatcatgtaccttgctcattttctcatacatgctttcataagttgggtgtattttatacttggccctgatctatctttatgatgagatcaaaatgtccaagcttcacgcatattcaatcggcttcctttttcttcacgaattataacatctttatttattcattggttttatacactgttcatgcaaatgcccctgtaggttgaagtggtgaagtcctacaatgatgctgatggaccgcaatggctatactcactctttggtaacccaaatgatccggagacattcaggtgtgccattcttatttaataaaccatttcatcattacttgggagtatgtgagccgattatattcaattgagttttagaaatatattctcagagcttatatttacatatcaaaatttttattttatataaaccatataagaatttcataaatattattcttgtaacaagcttatataagataattgcaaagattttgggtaatagattgagacaagtgtttgatgacacaatgttgtttagtcaatgagtattttgtggaggaaaacaaattaaaagaaactgtatcttctatggaatagagttggatgtgctacttgttgggagaaataaacgattttctgttttattattttaaataaaacaattcttgtattaatgagaaaataaaacaaggctactgtggattcggaagcagcacaaggctgctaaagtagattctgttaaaaaaaaaaactcttggctggaaaactcttcagtttcattttgtttcttctttttgctttagtttgtatatttgctttttcttgaggatagtcagataacttattgctccttgagattttttcttctataaaataataatattgatagaagtttgtttcttatataatagtaggaaattctaaagtgcacccccaaaaaggggtacaacggtgcatccccatccccatccccattgtgtttttagaatgtgaattgttgtaattccaatatttctgtaagacggtacacatcctagttatttaggacattatata

SEQ ID NO: 264714 - DNA, 772 bp, Cannabis indica
aattgcactaccatgttcctaagttgtaagtattgggccgattcaattggccatctttaccgaacaactcaaagaacataaataatacatttaagccagaacctaaccatttcagtattaaaatctattgacctaagatcggctaagtgatattgactaagaaagatataacaataagtttatgatatcttatctaattgtcaatatcggtccagtttgatgtatactacatgcatccgttcctagcatactttgccaataccttggaaaggacataacacttatccaaggtgtaagtaaactttatcgttggttatcatgtcagtgtaaatccaatatactaacaaattatgagacttaactttaaaaaatataatcatgattatattctactgtgttgacaacactataatcatgaataactatatgttctgaataactactgtgttgacaaattatggtcttttattaattaatagatctaattatattgaaatgaattttatttagggcataaaatcccaacataagcatgtttggtacaacaatcagttggaaagcaaactttcaaaaggtggtggtcttgtcgacaactaaagctgagtatatggccttgatggaagcgatgaatgaggcactttggttgactaggttgatggaagagttaaaactcaacgagaaggttattattatacattgtgataatcaaagtgcaatttaattaaccatgaattatgtgtatcatgaacacaataaacacatagatataaag

SEQ ID NO: 264715 - DNA, 502 bp, Cannabis indica
aaaggcagaggtgtgagcttatttgagggtaaaagccatcgaatttgagtgaaaacacgagttaattgagtgatttttttttggagtgaaacacgtgaggaagtgtggtgaggtctctctttatctgttctaacttatttttgcagaattcaatcatgtcaaaagctccagaagaaaatgctggtaatgacactacaccacctacggttccaaatttataacttcaagctttgataggggagatgaggaggatgatgcgagaggagtgtgaacaaatacatgcaaggttaaatagagtagaagagggaacccaacgcaggcaactgaggaataggattcaccaaagggatgataatgaagtagatggggaagagataatttctgatgaagagtttgatgggataccagcaggtaaccataggaggtatggtcgggatagagaagctaggaaccatgtagataattatttaggaaatataaagatgaaaattccctcttttca

SEQ ID NO: 264716 - DNA, 602 bp, Cannabis indica
gagaaaaatgagggtaaattgaatctgtattttgtaaaagttattaattgaactttctaatttgttaaatgataattcaaaatctatattttttaaaataatacaaaataatactttgaactcaatttttgtctgattaatacgcaatagtagtctaacgtagaggtattataactaaacagttaatttttttttttgcatctatttttgccataaactatcttaaaaaatgataaaaattgagctaagatattattttatacaattttaaaaaatataaaatttaatttgtcatttaataaaataaaaaatctaatcggtaacttttataaaacataaggttaaaaataatatattttcaaaaagtaaaatatatctaataaattatttaccaaaataaaaaaacaatcactaaattcataaaatcaaatctaaaataatatttatccatatatattaattaggaaacttaactagttagaccaaactctacctatatgtaacttcaatgtgatgtgatctccttgacacataagaaagaaaccttttcttttgtctttcatttgaagagataaaacacaattcattaaggttcttcttat

SEQ ID NO: 264717 - DNA, 591 bp, Cannabis indica
tttcatttttactcttacaaaataaactacatttaattaactccataaaataacacacattaaagatattaactaaattatactaattttaagaattagtatattcgtcccataggtgctcaattaatgcatttcgaagttcaatgtgagcttctttatctttaatttttctatgtcgagcgagaaattcttggaatcgaacattgtcatcacccaccatctcaacttctggactaggcacttcaactcgttcttcaatagttgcattaacatcacgttcatcctctactatcatattatgcatgataatacacgaagtcattatgtcatgtaatatttttttattccataagcgtgctggtcctgccacaattgcaaatcttgattgcaatactccaaaagcacgttcgacatcttttctacatccttcttgtttcattgcaaataattttttttggaccccgtggctcatgaatactttgaaccagagtagaccattttggatatataccatcagctagcaatacccgctccgcgaacacccttaaattattttttttagtcacacttaaaaaatataaaaatacaaac

SEQ ID NO: 264718 - DNA, 1929 bp, Cannabis indica
gttcatgttattagtttctttgtgttgggaaacatggggttccatctcaaaaccaattggcaatgagtggagtagtccatgttcttatatatggctcaatactttcacatttaatccatgtgggacaatattctccaatactttgatacccttgttaaaatttctgagagaagatgattgttacaacttttattttgggaactaataatatggatggctgggaatatgatctacaattgtggagtcctgacttttctaacggatcgaatgttggttcccttttaatttttaattctggaatttgaaagttatgcacaaatttagattggatctaaattatacattcactagtgaattaactgtaaaggataaaaaagtatttaaaataataaaatgataatttgaccaaaactaattacgaaccgacgcaaggagggataataactggaattgattatatcaatacactacaataaaactcaataaatataattctataagtactaagacttcaatttcatatttatagtggagtaatcatataattaataaaaaagattatttggttgatgatattcaataaataatctaatttattggaacttaaaattataaatctatggtcgctgtatcaccattttgaaacactgtcaagggtatcgataaaagttatatattgatattcaaaaaaattattttgatttttcaaactagtaattatttattttgtaataaataatttattttctaatttactaattaaataaattggaaaaaagacaaaagttgtctgtataaaaaacagtatgattaggatattctctcaagtggttgaaagattccctcaatcggttataagaaataagtatctataacagattcgattataaatatttattcaagtattcaaataattaaatattgttaatttattattttgaattaaatatttattttaagtaaaacctttatttggttttattttgtataccttaaaaaacttaaaaagactatagatgtataagtttttttaggaaaacctaaaaagagggttaattagattgaatattttttcatcatcatcttagagttctttctcatgcatgagaaaaaaaaaacacaagaactcaatatataatttatcctattgacctacactaattcttgtgtgtggtggaaggttcaaaaaatgacgatctgagttcttaatcaacatcccgaggatataacttacaaaaagaaacaaaaatatcccaatttgcttcgagagataaattaatgtttctgtctattttatttcatatttaatatatatacacatgtggtgaggatatcattttttgttacgtacctaatttaatatcataaaattaacaaattggtatcagagtagagcaattttgttatgtatatatatatggattatttcttaatgggtattacacatgaatggttactaaacaaatttaattatcaatattaattttaaaaatattaaatcatcaaattttgatctaaaataaaaagagaaatttgaatttttatgcttagtttaactacttaattaaaaaaaaatattaaaaaatatctctgtttatactatatcaaaaatatcctattttttttttttttgttctaaaaaaaaccttaaaaaattttttttacttaaccgaatggaacaatctcagcccactatgatgtaaaagtagagagatttttcttaattagtatagaaaaattaaagcataaaaactacaatttttagtcaattttaccttattctatgggaagtaccacttaagagtgcacccactatatatataaataatatatatatatattaaattacttaataatttgtcactaattatatttgtaaagatgaatttatttttttaaaaaatttaacctataatagtgtaatgtggt

SEQ ID NO: 264719 - DNA, 526 bp, Cannabis indica
atgaaaaaattaatgaaaattattaaaaagtctgataaaaatattaaatttacttaaaaaaaacctaaatcattactaataaatattttcaaattttattttacttataattatcttaaaaaatcaaaccaaaactatttaaaatttaatacacaatttaaacaaactaagaattttttgaaaaaaaaaaaaaatcaagcttatttatatttataaactcatatcttgaaaaataacaaaaataattaaaaatttagtaaaaatataaaattactttgaaaaaaatagaaattaaactaaatttatatttttggagaaaaaaatatacttaaacttgttcccataaaatttagtttttacaaacattgaattttaatattttttttatttctaaatagattttttaataaaaaataaacaattttttaaatcgcttaattagttttaaaaatttaatcaaggcaaaggattggaagaaggttgatattgaaactgatagtcttacagtggtgcaagcattacgtag

SEQ ID NO: 264720 - DNA, 517 bp, Cannabis indica
ggcggctttggggcctggagccagacgcatttgatgggcggggccatgcttcctctccaagactattttgttaattttttagtttttgtcggccttgcgccataccaacttattccccaagcataccgcctgctttcaggcttatttattttttactccgcccagggatggggctctcccagcccggcggagatattgtatttttacgaacttgtttctgtccccaagaagggggacaaacttaaagaggatttttacaggttccgggcccaccctgccaatgatggggtggtcccgtttaataggcaaactcatgttaaggagtatcgccatcgttttttcttctcttccgggttccgggcagtggaccatccggagctccttactgagtgggtcaggattcctccttaggaacggaccgcacctactcagtgttgggttttatgccctaaataaaactcatttcaatataatcaaatttacttattaatatagatcagaaataacatttaatgtt

SEQ ID NO: 264721 - DNA, 591 bp, Cannabis indica
tttttagtctatgctcataaaattaaacaccaataataatgtataatgtgttccaaattattaaatttgacacatgctaaaagttgtgtcaaatttgacacaatatagcatgtatcaaattttacaacacaataaatatatattttttttatttactcatttgtaactaataagtttttgtacttttatttatatatttaatatttttttattcactttcaataaaaatttaatatttttattgattttttttacaattttttattaaaataagagtaaattgtgttttgtaaaaattattgattagaccttctattttgttaataacaaattagatcttgtatttttcaaaatagtactaaatagtattatgaactgattttttgtcaaagtaaaaactaataataggcggatctagagatgttattacaaaattgatttcgttttttgtatctgctcatgttaggaataatcttcaagttgattatattaaaaaaattatttaaaattgagcttaaggtcctatttgtacctttttaaaaaatacaatgtctaaattatcatttaacaaaaagatgatccaatcaataa

SEQ ID NO: 264722 - DNA, 886 bp, Cannabis indica
tttttataattcaacggaaacttttgtagcaaagaatttttctgagaacaaaatactaaaaaaaggtaatttgagctgaaaaattcctaattattcagttaataatgaaaaagagatagaattaagagatcatatacaaatataagcaaaatgagtcaaattaagtagaaagaaaaaaaaggttattgtattggcatatagatcaaaatttcataatacatagttatatgtagtttcaatatattttcagtatattcctagctactacatatcatgagtgaatggcttccatttccccaaactataatccactatatgctcaaatccttatcactctttggaaacttattaacaattcaatcacttgtacacacaaattcatcaaattaacagtcttagcattccacccacattgtttgagtattggtccagtttgtttaggcaagaaaggatcgattcgaacccaaatcaatgagaaaattgaagctagaagaattgaccaaaggacaacaatggttggagtcctgttttgtcttcccattaaacctttaaggaaagggtagagatggagaatgacccaaaaggcgaaaaacaacttaccgaaaagaggaccccatgaaccatagccattgttaatggcatcagaaactccagctacaactcccaccatgtttattattataagagtggttggtgggatgagtagtgtagtccatttgaagaggtagagttctccaaactctgcgtcgtcggctgcttttgatgtcactgtaaaattagtgtcaactcctgccaagactttgagaaggccttggaagacggcgaaaagatgtgctgagacaccaccaatgacccaaaattgctcattacgccaccaatcctcgat

SEQ ID NO: 264723 - DNA, 1196 bp, Cannabis indica
agaaacctattaaataacaaaacaagtaaaagaaaaattgtatcaggccatctccaatgggacactaaaacaccaaatatagtatagtttcacactatatttacttcaatgggacactaaacctatccttataaatgacattgtctacagtgtcccaccaaatttagtgggacactttagaccacactattttttttaaaaaaaagtttttaataattaaataatactttaaagaagaaaaaataaataattatatatatttagtattaaaatactcttattatattaataaaataataaaataataaagaatataaaatttagtgtaatttttagtgttagtggttggaattaaaaaaaaatagtgttaaaatagtaattttttggtactgatttaactctaaatttgggtttccattagagatgccctcagaaccacccttttgaatagtgtaaatttgtacgttttctaactagtttttatgtggtgattttatatataattataaatcaacttgaaatgacttgttacagctttttcacaaatcactgcaagtatattgatttaatttgattagaagagcatctaataattattttcctttcttgagtatataggtaacatttatagtccttatatctcttcacacatatcaaaaaagagagagagagaacagtatcgactcattaagtataataatctacactaaaccaaatcaataaagtcgtaaatcattaagatattaatcactaaatagtaaatacttgtataatactacaaaaataagtatattctccctaatattttctttccataaatctctctcctcactttgtaagtgtgtccaataaatatatgtatactctttccctcaatgatttctcttaatttcataaatctcattgtgtgttgtgttcaaatatctcgaactagtattattattcaaacatataagcaatatccccatttaataaattcaaattataaaacattttttttggtaaacaaattataaaatattattaaaataattaagtgctaactaatatagggagcatacttgtagcaagaataataaaaatgacactctattttaactttttaactattttagctaaaatttagataaaaaaaatagagaccatcattggagatgctgtgaaatttttattaagtaccattagtcatttgatat

SEQ ID NO: 264724 - DNA, 6451 bp, Cannabis indica
ctgaccatggcttgggttttgtgtaacctgtgtatgaccttggttttgagggacctgtgtaagacttccaggccctgatattgaggtgataactgattgaccagttggcaatatgttctgagcaggtgtagaagatgtcattccacttgagatcatgttttgacatatgcattttggataggagttttgacccataggtaaggctgaagaatgcatagcttgacgtgcttgtgacagattatttaggatgttcacatttgcaggagcaggaccaacaggacgcatgggttgtggcacactactcactattgaaggttttaaatctggcccagtgtcagtatttgaaagcatgtcctgagaagcagaagatggtgaagaagtctgcaacgggactccttgggaagcagcacgggcaacagatggaaggtgcgaatgtgtgtaggtaggcccagaaatcatggaacttactgtacttggctcctgaagatacatttataatgtcatggctatttacacaccaattaaatataaagaacacaaacttcatcctttggaaaaataacaaaataaaaaaaaagaagtgcatgaatcatacaacttttacggtagcaggaggcatgtttgcagcagaaataggccggctcataacagatccgttcactatgttcaagaaaaataatgtaagtcttccaccaattaaaaaaaaaagaaaatctaattaccttactacttatgatctttagttcattgacttggtaaacatccggtccatttcacttatcatacatagcaactcaattaacactatagaagccttcaataaaaaaaaattctcggaggtgaatgaaaaaagaaaattaaaagaaaaatagagggccacatacttaaaactacattgaaattttttaaagcctttaagtaaacaaaaaaacttgttattatttaatatcgggttaattgtggcataagtatccaaaattttgaatttgtaagcaacataaactcaatgagtttttttagcggcataagtacacaatcttagtaaaactgtaattttcttctagtttcgtcaatacaaactctgttttgaatttcttaaaagaatatttggaagtaattgatactacatgttttcatccagacctaatgatttagaatgtgggtcttatatgtgttctgtttaagacactaatggagtctgtactgacaaaactagacaatactaatattgggtacttatgccactaaaaaataattagtaaattaatgccgcttacaaactcaaaacttttggatacttatgcctctatttaccttttaatatatctgagaggaatgaaaagcttctaagtaaaaatgctgaatatattcaatgatgcaaactgaaatatctgataataggaaaaggataaccaaattgactggaataaacaacctgatggcatagatgtcggaggtgtcactataacagaagtaacaggagccgtgtccatttttacaggactttgattagaaggcaaacttggaactccagcccgacttaaagcagcacgggcctccaaaaaattctctgaaagtagaacaagaaaatgaggatgcttcgcggtattatctacaggtggatcgtttgctcggggattgcgctttccctgcattggagtagtgtaacagtcaataccatcattgaagcacataatttgaagtactgaagagttccgaaaatggagtcttttaaaaatttatcaacaataagtcagagaaaagtataagaaattcaattgacatcattactgcattgtatattgctcgaagtttaggaagctgctttggagaaatgacagatagagatatcatgcactgcagaggaaaaagaaaaaagaaaaaaccattacggtgatatgcaaccctcttgaagtaaaaacactagcataaaagaaaaaaattacacacctacctgagaaaatgatttagctatggtctcggcatcggatagacggctttctgtttgggcatcaatattttcagtctgctccaagctttgaattggtggtctaaagactggagtggacaggggatgagggttgcttgcggtaataagaatgcaatgcctctgacaatccacgttttgttgattctgatttccattttgagcaccaggaaacatctagaatattcattaaggaaaatatataagcacaaaatcatgcataacaactcaaataagaattaggcaaggttatactaacaaataggctaatgcataaactaaattgttttcagtttagttgttggagatcaaattttacaagtaaagcactcttcctattcaatacatattgtacagacagaaaaaacattaaggaaaggctgaacagcatatgttaaattttccatacattttaaccatttaatgcaaacaatgaaaggctgaaaaagaagaaaaaaaaacgtattatttactttccctattttttccccaaggaatccaagaaaaataaataaatacaattaagaagaataatgcgcagcctggcagaattacacaagagtacaataaaacaaaaagaatatgaaacacgtaaaattatgtctaacagattcaacacaccattaaagcttcagaaagcccttccgcaattgcagcatcattgaaaccaccaccagaaaaatgtatggcagaaagccattgtaagaaattatcaatatccttagtccagccacttcgctggactaggcaacctgcaaaaaggggaaaatatggtaagactatcactacaagttaatttttaaaaattagcagcagcagttatgggcaaaatacaagaatgattgtgacagataggcttaccacaataagatccatgagtgttgaatatgaccagtgcaagctcaaaactagaattagatgtcttctgtgttttaagaaaatcaaatgaataagaaacacaaaaaagagaagttctgcaaatatgaaaaatggtctgtttttcaaaaatttcaaccataatttgcaagtacaacagcaaaaaaaaaatgtgggggtccacataagaatacttgattggtttggtgttttcaaaaactaaatctgaatatgattttgagttttaagcttaaaaataaaaacaataattttatgttttttatgttttcaaatcattgaatctaaaaactcttcaaatacactcgtacttttttattttgagattcccaaccaatcacaaatttaactttttaaaactcaaaaacacaaaattacaatacaaccaatcacatttttaaaaccaatttttcacatacaaaattcaaatttttgtttccaaaacactcttttagaaaacgcaatttttatatctcaaaccaatcaagctcttaatgattaaattaacacatgcatttatttttaaatccttaagacgtacataagaaacatttgttttggctttccttttgaaccatgtacttttgttgcacacaactgttgaaaatgaaacaaggttttaaagcttgacattaatcaaaatacttggtaaaagctttttgttttcctaaccttctctctcagcctaatttcttatgcatgcatgcacgcagagctatacacattttatataaatatatacacatacacatatatatatatatctaatactttgaaaaggaataaaaatgtgaaccatatcaaggttagcacacataaatgagaaattcccacatgttcagcagaaaagaagattgtcggcacacacaaaaaaagacagaagtgaaatatgactttcagaatgtggaagttaaagtttaaatctcatagaagtttctgcatcaaagctcaagtctctgccaggattcttgggtgaatacatcagcgaaataaggaaataagggaaacaaaaatacaagtacaggtgtgctacattctaagtgatcatacataaaccagcaatcttgtcatatggctttccttaagtggctagcatagaaatacaatttcaaaatgaagaaaaatttcagacaacgtagaattgcagtatcattacggcgggaaaagggaaaaaagaaaaagaaaatatcagacctgcccaatcaattcacttccacagaagtacctgcaaggataccaaaacaaatcaatatccgttcaacttcacctcagtttaaaacgaagtaaaaaaatgatttgtcaaactaaataataaattgtttccacaacaaatgaagagctttcaagcaggtggcttgttcaataccctgtagtccatgcagtatttattttaagagggaaatacaagtaaataaagctgcaagtgtataaaagttacttgaaaaataaagaagtgtgaaaagaagattattgacaaaggaagaattgtgtcaaagatactgtaccagattaattagaatgggcatttaaaattagaaacaaaacctacaacagattcgtgataatttaaaaagcagtatcattttattttcaaaaaataacaatttaagcagacccttggccctgcaacactgtaacttgtagtctgtaaggatactatcacttaggaaactacaaaaccgaatgcctatttctatagtatttcaaagttccttaccaatagtaacttacatatcttgcagctatacaagcacaaaagagcattccttatttcttgtcagacaaaaataacatacataaattaacaacaaggaagataggaaaaataaaagaaaaaaaaaagtagaaacttatgtctcatttccattaactcgttatgctataaaccatcaaagatacagcctggttacgaaccagaagttttgagtcttttgacacctcattgcacaccataataatcatgttataaaactaaaaacaatgaaacaatctgtaaatctaccaaaacaaactctcatatgtttcagttgaagacctttagtttgatttcaagatttgaaatagtgaaaacttcatgaatcttttcaaaaatgttagtgacctaaaacaaattagatgactgcagatacatttgaaatcatcccaattcagaaaaaaagagaagtatagaaagaccaatgtgttagctctcctagttttaattcttcacattgaaccactattagagatgggctaacttaaataatgtcacgatagcagtgttgatggtcagatttcttcccaatgaaagaaatttcaataaagcaatgcctttaaaatgaagaactcgtctcatagagtggacatcgaactatctattattctatttaaatttggtgcttgtatagcattaaacatttctttttcatttaaaccaaagataatcatgttaattgttcatctgtacaacttctaatttaaattaggaaaatgaagtgactctaaaatttcgcgttcaccaatgtatcaaggatttaattttgctaaaggccatgtcgatcattgcacatagctcagaactaagtttatggaaacaatttaaacgctttactgttcaataccaggactaactatagtctggtactacgcaaagttttgccattctaccaagaattagaaaagcaattacaatccttagctcgaaacgtagaatatacatccatacagctacaggaatcgaaaatattacgtaatacacaattataagcctagctaaaccaaataaggaccaacatttcatgatcccaaaacaaatttcagaaacaataattttttaacccagcattcgaatagccggaataataagattttatagcacgaaacacgtctaaaagcaagcgaaacataaaacctaaatcagacagaccgtttctctctcacatggaaattatgttgaccagttgtcaaaacttctaagcaacaaacaaaccaaaacacgaaactatcacaattcaacacataaaatgaataagaatagaaagcgggagaggtttagcatgaattataaaagaaaatatggataaaaagaagaggaattgaagaagaagaagaagaaacgataacctgatgatcttctcaaggtaatcagagacaatagagtgccagtaagggcccatggctgcagtgccttcgactacgacgatcagttgcttatccgccattactagttacaggtccggcgaaggagtcagcttagtttgggagaggagggccctctttctcagttttactagtttgggttttctcaattttcttctggaaactgggacttttccttggctttttctcggggaaaatatagtttcattaatattgtataggagacttatattttaacccacccacccaaaggccaaaatgataacttgaaactaatattttaaaaaaaaaaatcaaaataatttataaaaattacttttaatatttattttcctctacttttttacaactttaaatattgtttaaaaaaataaaaagtaacttcttttaatttataaaattttaaaatacacataacaaaaataaaaatta

SEQ ID NO: 264725 - DNA, 703 bp, Cannabis indica
gcatctaaggttgatggtctggtacgagatttctggtggggctcggaaaaggggaaccatggtttgtacctaaaagcctgggataaactttgccttcctaagtcgttaggaggcttaggattccgcaaatccaaagaaatgaatcaggctttccttgctaaatggggatggaacctcctttcaggtaaccaatctttatgctgtcgtatcctcgaagccaaatacctgaagggtaagtccttcctagagtgtgaaccgaagccttctgattcgtagttttggaaaaatgtgactaagtccagatctattattcgaaaaggtgcttgtaagcgtgtggctaatggtcaggagacgaacatctggtctgatccttggatcgctcacctaaaaggttttactcccacgccggctgggccggttctgaatagggagtcaaaggttgttgagttatttcagcctaatggcggatggagcatccaaaagcttaatagtttcttcgatcgtaatactgtctctgccatcctcaaaggaggaaatcctaccggcacgggcaaagacagctagctctggaccttggaaaataatggtcgtttctcctgtaaatcagcctatcgagccctggctgaggatagagtgaatccaagtgaggtggccccttccatgtggaacaaactgtggaattgtaaaatccctgagaggctca

SEQ ID NO: 264726 - DNA, 1416 bp, Cannabis indica
cttaacatctcatctcgtataactttcaacttgtacaaaaacaaagctacaaaattcttcaaagagtactttgaccaaatgggaaaaatatgtcccatcaaatattttatacaaaaatttcaaatgctaaaattttgtcaccttgtaaaatattagttatttattttatgttaactataagatattatgccagctaatattgttccatttttttcatcgatatatattttattttttatttgaatgattattatacaaaattattcttcaatgacaatttattttttaaagtatttatatatcattaaaaattgagattattttacaaatacacaaaaataacaataaaaaattataaaataaagttgtatggaattttaaatatttttacattttttatgatttatttacagaaaataaaattttttgacatatttttatattgtatatttgttaatttgttgttgatttttttattgttgttttgatgttattttcttttacttttatgtaattattttattgtttttgtgttattttttcaaaaaaccgtaaaaatatatatacaaaaatctttaaagttaaaaatgtaagttttttacaacaaattatactttatgtaattattccttaaaattattatatgtcaaaattctaatttgaaaactaatttttcaacatttttcttaaaaaaaagaaaaaattacctatcaaaagttcttatgaaaaaaatatgaaaaccacttctcctaaaattattttttgaaattattttattattttatagatttaataaaatcaaagtagcatttatccaacggttaaaatttaggtaatgtgagacaaaaataaacatacaatttttttttttttgataaatttaattaaaacaaggtagcatttatataattactaaaaccctattgtggagttaacttgtatgccaaaaacacacatatatcacttacacataaataatatagaacaaaacacacataattttattttctaataaatttaattatactaaaataatatttatccaattattaactaataataataataaattagggtaccaattgttttaatgtgtatcaaatttgagtgtatattattatgagaaatttttaaaaattcttttttttttctatgttttatttataattttacaacttaaatttttatttacaaaatagccttctaaattataaattataaaatatattttgtttagcaaaaagtcaaaaaataataacaaattaatctcactacaactataaataaacaatctcataccaactataataaactataaaataatacacaaaaataattattattaataactgaagaactaattttgtaaataaaaaataaaaaaaaaaagtaaaaaataaaaatttaactatttta

SEQ ID NO: 264727 - DNA, 818 bp, Cannabis indica
tgttaagcgatcagctaatatggtagctcataactgtgcaaaagcttctatattatatcctggttgtactttcgatatggagtctgttccattcgagttgctaccctctttggtagcagattttgatggttaataaagttgcattttaccattcaaaaaaaattgtatttttcatgtatgaaaatatatgaattacattaattaaccaataaattaacattaatctttatttttcttttttacagaaaaattaattctttatcaaacaaaaatttaaaatttctaataggcaattaaaaaaaacaattttgttctaacttattatcattaaatcaacaatttctatttatttcaatatatatgtaactctattttttttttattttattacatgaataatttgagcattaaaatgatttacaaaatttaatataattaaacaacaataaacatttgaattaatttgtatttttcatgtataaaaacatttaaattatatttattaaccaataaatcaacaataatctttatttattttttaaaggaaatattatttctttatggaattaagaaaattaatttattccaacttattaacaataaatcaacaatttttattttattttcaaggtatatgtaactcaattttttattttttattttatacttgaacaaattgatcattcaaatgatttacagaaattaaacaattaaacaacaataatatttactgttatatatttttttaatttttttgaaattcaaatatctcaatcattaacatgcaattatcaaaagtaatccaataccttgttaat

SEQ ID NO: 264728 - DNA, 765 bp, Cannabis indica
tgttcacaagtattttcatgaggttcttgaagaaatgatgcattttgcaaaagagatgatagtacccacagttgattttgattccaatattccaactactcaaaaaaatagtagaaaaattttcaaggtattgtatttttaaatcatgattgtataagtaaaatatgtgtcctaaatatttgaacttataaatttattgcagggagcaatttgtgcacttgatggaacactagtgcatgctataatcccacttggcaaacaaattgcttatagaggaagaggaaagagtaactgctaccaaaatattctagcaatatgtgacttcaacatagtctttacttatgtttatgcaggatgggaaggagtagcacatgattcacgagttctaaaagagatagtagccaatccaaataatggttttcaatttcctcctccaagtaagtgattaaggaaatttattttattcctacgataaccgaattctatatttcaactaattcaacatttgtatgcgtatacatttcaggtaagtattacctatgcgatgcagcatatccatgctctcgggaatttttatctccatatcgcagtgtttgatattggttaggagattatcatcgtaggcgtgctgtaacgaaagaggaaaagtttaatcatgctcacgctcaactaagaaatgttattgaacgttcatttggagttttgaaagcaagatttccaatactagataagatggctccatatgagtttcatgtccaaagagat

SEQ ID NO: 264729 - DNA, 555 bp, Cannabis indica
tattaggtatcagtagtacttagtattttctcaacatgtcgcgttgcgattaggtagtgatactctttaaaaattattatattgaattatatgggactcgatagatacttagttagactaatagcgatattaacacataaaaaagtaatagactttgctccttttgcatttctcaaaaaataacttagaactttcatcaaacacctagtaatctctagcagcagccattaaccaacacaaaagcactcaagggtattttcgtaatttcacgtttaatttgtcctccccctcctggcttgcttgcttgcttttctgttaagagggtcacgtgcctgacacgctagctaactcaaaaaacagaacacgctccactgacacgtggcggtaattttaaaacggtgtgacctgttacagtcggtaatcaccacgcgacacaccaaaatttccagtttccgaactcatatataataacttggcctttccaatttcgcgcattaattaaaaaatcgtgcgatatattatttcccgttagattcacaagcgaacccaaccaga

SEQ ID NO: 264730 - DNA, 693 bp, Cannabis indica
ttaatcacataatcttgattactttccattgtgctgacgacacaataaacaagaacataaatgtgataagggttcagatgaatttataaatcaaataaacatatgaatgatagcatgaaccaaatgacacacaaagtgatgaaaaatacttctgtttctttatttatatttaaatgatagagattacattgaaatggagttttaattagggcataaaacccaacaagatgaacctaactagaggtctgggatgctcatcaaggttccacgtcaattgaacttcaactcctttgcctcgtagcaccattgaaagttgacaataacattaacaaaacaattagtaatactaaataactaaagactatttaaccctttaaacttatctgtgaaagaagtgatgaaaacatcgagacctgttcatagcaattacagtaccaataggagccactcactccatgtagcagcaacatttacgaagaaagtaatcaccccaattgttgaaattcaaagcataacatagagctcgattcttacctgtataccagaatgcatagtagcaatagctacacccgcggcatccttaatagtaggaaaattacacatggcaacctgcaatacattgagattaaaatcagatgcatcttatatgagacagtataaatataaatacatagcaagaactaacgaaaagaa

SEQ ID NO: 264731 - DNA, 749 bp, Cannabis indica
ttccaaaacagtttgagtctcatgttataaacacgataagctctactgtttaaggaatatccaataaacacaccaacatcacttttagcatcaaatttaccaatatgctcacgatctctatagacataacacacacatccaaaaacatgaaaatgacttacattggggcgcttacctttccagatttcataagatgtttttgaggtacctggacgaataaacactctgtttattatgtagcaagctgtgttaatagcttcagcccataagcgctttgtcaacttcttgctatttaacatcactcttgccatttcctgcaatgttcgattcttcctctcaacaactccattttgttgaggagttttgggagctgaaaattcatgagttatacctgtagacttgcaaaaatcatcatacacagaattttcaaactccttaccatgatcacttcgaattcgaacaattttcccaatattacaacctttctcaactcttaatctcagacaaagagttttaaaggcatcaaaagtgtcagatttttctcttaagaaatctacccaagtaaaacgagagaaatcatcaacacacacaaagatatatcgtttaccattcaaactttcaacttggattggacccataagatccatgtgaagcaattccaatacctttgaggtattgatatcagacacaggcttgtgagtgatttttaattgcttcccaagttgacacggttcacacttaccttcact

SEQ ID NO: 264732 - DNA, 798 bp, Cannabis indica
ttctttcaaagggagaaaaagacaatttttcttgattacttaacttaaagtaaactagtttataaatttatatattttgcgagtttaaagaaattctaaatcttaatccttggacacatcattttgctttaggatatatcataagcttcacatctttcttttggctgatagtcattcttattgtgcaaatttaacttttctaatcaatttaatggattaatagcgtgatgaaagagaacaatactcattgacaagaatcccttaaacttatatacaaagctgtatgcttgcatcttgatttactattagtattctaaatgatgaaaccaactgatcagttttcactacagatttccagcttgaattgttgtgaattacctcaacttgaacttaatcaatgggcacttcaacctccatttttaggccagtactgccaagaacctgcatcagggattagagtgtgataattttgagacttgaaagtagtaaaaagaacaagctgcttccaagagctataatagtcaattgaaaactatgtcatcttttgcttgatgttagaataagattatacaaaagtaccttaataaaatcatccaacatcagataagattccctggtgtaaccacactcttgcaaaacttgggtcaacaccctctgcaagtttgaacaaacataattttataagtgaaccaaacattgtcctcatatgtttcctagcattatatatatctatatatacctctctttgctcatctgacatgaaagaaccagacaaatcttttaatacttctaagatgt

SEQ ID NO: 264733 - DNA, 1101 bp, Cannabis indica
ctaaaatagataataaatatttactcattaataaaaaaatatttaatttgtttatttttataaaattgtttactatgtatttaactaattttacgaaattgtttattttgagttttaataaacatatttataatatcaaaaaaaaaatattttagtattaataatttttaaaacattgatatagtaaacataagatattataaacattaattatattaatttatttatagtaattagtttaattattaatatttatattatttaataattaaaatgtatagttttatgtaatatgtttttaaaatgtaagttttgaaaatagttttttttcttttttgcatatatttttataattacattatttttgttctccatttaccaaaaaagcccttaataatattagcatggattgctgtcagcttaggtgctttgggaagtaatatggcactcacatcatccgatcttcaataaccaataaaacgctttaggttttggttagaagaaaacattagatgaaaccatgatgttttctctctgattttgacactctaactatttttagtaatagtagtgcaatagttcattaacaataatagtgagttgaaaaataataatactataattaagatttaagagcataccatagtatttatttgccattcctatatatacaaccatctctcataaatagatgacgataatggtggtgcacatgtgaattatatatacatggataaattatcactcctgttgttttattgtaattaaaatgaaaatcctcttgaatttaaggagtgaaaataaaatttcaaactttcagtaccatttgaaaatatattttagtatcctatttttgttactctatgttgtttaaaattttctttcaaacgcacaaagatttattatgactcaataagcatgtaaataagttattagaattataatttctccagaacatatcttacaatatatattcactaccatagtcatgccaactcaatcatgcacactatattctaaagaatgaaaagataaattttgtccaaaaaaaaaaaaaaaacgaaaaaagaaaaaacgtaacttacgttggtacggtttacg

SEQ ID NO: 264734 - DNA, 466 bp, Cannabis indica
tctctaattcatgtatttttttttcttattttttgaagaaatcccattttatttgttttgttttctaaatttaaataaatacaccactatactaatatcacattattttatgaattaacggttaaaattaaaaattgtattgtgtttttttttaggtcaagagtgatgttttctaatttttgcaccaattgacttttatgcatatttacttataattaacattttcaggctgtgcaattgctcaatcatccaagctaacatactatagtttggtaatttaatggcacgaagcaaaagatcaagtattatagatccaaaacaaccaatccaacgacagttgattttgaacgaaccaactcctcccgcatgcacaacaacaactcaatcaaataatgatgtaaatgggtagaactccacccaactatgtttgtagatttttaaagttactatttgtatatattatata

SEQ ID NO: 264735 - DNA, 2482 bp, Cannabis indica
caccctttttgttttctctctttgacttttacaggtacattacgcaattcaataaatcatctcaatgccatctgaaccaacaacaacaaggacttacaagcaggccattgatctttccagtgggcagtggctagtactcatcataccatggatattggtaacttgttactctgattaagtaactgtttcaacaaaaatgataagggaaaattgtatgtatgtgtgaagctgagtattctgagatcttctaaagaagatgcaaaaccatgtgatatatatttcaggtgcttatgtctcattcattataacttcacttttctcaacctcatagagctttttctagtcaacaaccattgacagttagattatatgtagacatgatatttggtttattagaaggtcttcttcgagtgcaaaccaagcagttgatgtcctgagggccgagaggctatttagcagtttctatcggagatggaacaaaattgaagagatttgtgattcccatttcgtacttaaaccagcactcatttcaagagctgccttcccaagctgaagaagaattcaggtttgatcatgcgatgggaacgaagtctcacaattccatgcaaagaagatgttttcattaatttagtttcttgcttggatgatgtattgtttacaatattgggtttaggattaaatgacaacgacaatgaaacaagtttaagtttttactagttcttgtgataaacttgaacttgttatatgttccttatatttgtatatatatgcaattctccatcaaaattcttgctttatcaacaccctgattttgaattttgaattttgattttatatatgtatattttttatgtcccgtgatcttcttgttttaagatagagaaagttaggatcaccattgttagattacaaatcttagtgtgtgaattctaggagggatgttaaacagattgtttctattctcaactttgttcatcaataaattcatttcactttctgaatattggtttagctactgtcattgtatttaatacttgattgaatctttattatgttgtttcttgatgagattcaatccacaacagatatgttctgatttcaagttgttctattagatcagccacttgtgctgtcaaatgctgatgtgaactgagatcagtcatttgtttcccagctagttttagttttggagggttgtaaagagtttgagtgtgtcttgatgtcgatctctcattggtgagttttctttgtaatttcaaaagcaagtcttcttcttggtgtgattgtcttgtactgatctcgattcatcaataaagtttctcatccatttcaaggctgttgtacccctcggattcgatagcaaagacacagtattggatatactgtagtgagtcaagatacaaacttgagaataagcaacttattagaagagaaggtctcttcttcaaatgcaaacccagcagctaatctatgttcctttctttaccttattataattctaaccattctttttaatgtatggtggcttcttttctatcttcaatatgtaaaataaagatattggagctatacaataatctaatcattaagagttctcatctcaaactttataatgaaatgtggaatttttgttttgccaattgggaattagatgcccaatctaatccatttgccttatcactaaaaaaagtatgtatcctacttgaaattactcttatgtccttttgtttacatcctataatgcccttggatccgtacatggccccaactcataccttgcccgactccagcttagaccttggacccagcttggatttcaaacctgacccgaatcatcgacatgtacccaaacccaaaccccagacccaaccccgaactcagtctcgacattgctagcgtatttcagccccgaccaccaacttagacccagactccgggtacatgtgagaaaatataaagaaaaacatgttggacaaaagaataaaaattgtgtttaaaaacaaaaaacaatatttcaatattttctaattttattttttttcaattcagttttttgaaaattattttgcccccaaattgattaaaaaagttctatgttttaaaaaagtaaaagttaggaagtggaacatcctctattatcaacttaaaattactcaaaggccctttttttttttgttacattcttcaactctaccaaggacacaaatgaactttcacaccctaaaaatccctatgtataaatatataatattttcttctaaccctaacacttcctcaatctctctatcgaatttatagtctctctggagattaataggtcaaacacatcatgaggatcactaccatcatctacctcagatctcttcaagcaaatcaaaaactgatttgctttgatttgtacaggtatacaattatatatacagatctcgttttttaaagaaaatttcttgctgtgtatttcttagttggtatggttgaacag

SEQ ID NO: 264736 - DNA, 507 bp, Cannabis indica
taactctttactggcagaaaatgagctgactttgtgaaacggtctactatgacccatacagaattatacattctcgtggttctaaataaaccagccacgaagtccattacaatatcctcccacttccatttaggaagggctaatggttgcaataaccctgtcggtctctgatgttcagctttgatttgctagcaggttaaacagttagatacgtactctaccacatctcttttcatcccataccaccaaaaataaggttttcgattctgatacattttggtggttcccagatgcaacgaataaggtgtattgtgggcttcatcaaagatttccttcttaagctcaccatttccaggaacataaactcgagctttatatagtaacattatgttattcaagattgaaaagtccttaggtcaaccggccaatacctcatctcgaattttgactagctcaggatcttccaactgcacccttcagattctttctaacaaatctgattgaagt

SEQ ID NO: 264737 - DNA, 970 bp, Cannabis indica
atccacgtaagttgatctctgagttgtagggattgagctgatgactcatgatgcgaaagctaaatttgctaagtgttgattgccctgcacggctcgttgaatatctcattctggatgtgccagggaggcgtcctgctcggtctatcgttctgagcagatgctctaagtagactacacgtgtcaccagtctcgtgatgccacatcagagtgcaaaatttaggataaaaatatatttatgaagttaataaaagaattaaaaaaataaaacaagtaatacaccaaatggaagcttaactctacaaggaatatctatatataacaaataatgaataaatttaataatttacaaattacaaaaacacaagaataataatacgcatatattttaatattattataattataacatatataattatgggaatatatatgatcaatatgttaatttctgatagacatttacaaacttaccttttataataaaaatcaaatttcattaatttttaatatatagtaatgatcatcaattaaaaaaatataaattaccagaattcagaaaaattctattaattaatgatcatcaattaggaaaatttcaacaattaaaaaaaaactaatatatatacattatattattagatcaccactacaaatatcaaatctgaagcatcaactacacatcaaaagaattaacctcatataatctatcaatatgctatatatgtacatatataattcaagacatttaataatactcaaatttgtaaaaaatatatatatgataatgctgcatttcaaaattatatatatacagatctcataaaccaaaaaatatcaaaaaaaaaaataaaattgaaatatatgttaattattaggtcactgacatgtcgttcaacattattaggtcactgacatgtcgttcaacattacaaacgatagtctctttaggaagagacattagatgaagtac

SEQ ID NO: 264738 - DNA, 2766 bp, Cannabis indica
tattcatatagtttcccatataagaaatagaaaatgtaacacttgtttctcttctctttttctttgaaaatgaaatagttaattttatttttctctaatcatggaatgtacatgtttctccacaccaggtcaaggcaaaaggcaccttaatgcaaatggttggtgcagactggatgaaatcgaacaagcgagaagatgatcttggtggccgacctgatagtattgttcaggttagagcaaatcatatcataacagtttttctcagaaaagaaaataacaaaacaaaatatatcagtatggttctgtaataatgaacacttagatacttgttctgattaaaagaatctcatagttagtttcattatgcagaagtttgcaaatctaggttcaccagaattcttcattgttgtcaactttcaagtgagtgtctttcacaaaatgttattttgaataaacattataaaatggtgtttgatcaccaataaccccaaacttattaccttatcaggttccgggtacacctatgcataccttggctttttattacatgttgaaaactcctctagaagagaatccttccttacatagctttgtcaatggagatgatgcctatagaaattcaagattcaagctcatcccatacatttctcaggtaagtatatatttatgtggtggatcttagtagactagtcatgcatgcttgtttcaatgtataatggtttagagtttgtttttctcagggatcatggattgtcaagcaaagtgtaggaaagaaagcttgtttgataggccatgcactcgaggtacattattttcgaggaaagaactacttggaggtaataataaactcactcaaaactcttttctattaacacaaatcattgtttaaggtgtccattgtctaacattgaaatcttgataaatactaggttgaagttgatgtggcatcttcaacagtggcaaggggagtggccaatcttgttcttggctacctcagcaatttggtcatagaaatggcatttttgatacaggtattcagctaaggcaaagggagtttagaattggaactttggatgtatatttgtttttacattattttgattttgacactaactgaaatctaccttatttgcaggctaatacagaagatgagcttcctgaagtcttacttggaacatgtagacttaaccatttggatgtatccaaagctgttttgagtaattcaacctgaaatattttgttcatagatcattattgtgaagggcagaagtcaaagtttgactttagtcctaaagagatgctgatgaaatacattatactacagtgccatgtacagacttttttatctttttacaatcaaatcaaattgaaagtggtaacaatctaccactgtgtacttgggtttcactaattcactttttcagcgtagtattcctatattttaagtgttttttcatagggataaccctaataactgacactaataacaataagtaataactaagacaaacaaaacataataattattttatttataactaatttcatttagtgtaaccctaataactttccttaaataattttatcaacattgtttttgtacggtttcactataattagttattcctttctattaacatatcaatccttattgaaagaaactgatgaacagaaagagtggaaaaacgaaggagaaaaggatgaacaataaagagaaaagttgttcaactaaacttgttgagacagaatcttatttattgacttttgattacaaaaagatcgtacaaccaacatgtaactgatttaacaaacttgaattagttataatagaatttggacagctggcactcagtcttgttgatcagtttgttgctgggttgtttcaatatcccccctcaagtgacacaagaagacaccaagtgtcaacttgttctttaaaaaagcaaaaaaggatataggttatggtttagtaaagatgttagccatttgtttaatggtgtcaacgtatcttactttgagttgctaagagaggactcgatcccttacaaaatgcaagtctaattcgatgtgtttcgtttttgcatcaaaaacacaggatttgatgctaaagagctatctccaagattatcacaccataaaattagacaatagagcagatatattgatagttcggatagcagggattgaatccaaattacttcatagtagcaagagctaaggccctgtattcgaattcagtattagatcgagcaacaacttgttgctttttggagcaccagcttataagattgttccctaaaaagatgttgtaaccagatgtggacttcttatcgtcatgacaatcctgcccaatctgtgtccgtgtagccttgaagttgaagattgtgtgctggtgtgaaaacaattccaagatgtagtgtgccaacaagatatcgaagaacacgtttggtcgcaccctaatgttctgaagttggagattgcatgtattgacttagcatattgacagcaaaggctatatcaggccttgtatgacactaatattgtagagcccctataatgttcctgtactctgttggattttgcagaggagttcctaaatgtagagacaattttgaacttggacacattggagtggattgaggtttagcatcagtcatcttggtacgaatgagcagatccttggtatgcttgtgttgagtgagaaatattgttgagttgtctcgaattacttcaaaaccaaggaagttgctgttggaaattatttta

SEQ ID NO: 264739 - DNA, 833 bp, Cannabis indica
tgatctgctcgcacaattcaaaagctatagcctcaagcaaattccaagagaagaaaatacaacagcagatgcgctagcccgattggcgagcagcaatataagtgacaaggcgaacctggtcccgatccagtttcttgaagagcctagcatcaccggcacggaagaaatcgaaatgatcgacacatctccgaactggatgacgccaatagcagcctatctcaactctggggaactcccagataaccgaaatgaagctcgaaaaatgagaagaaaggcagcacggtacatcatcgtagacgggatcatgtacagaagaggattctcaatgccattactcagatgcgtcacacaaaatgaagctgcacggcttctatatgaagttcacgacggattctgtggaaatcatgcagccggacagagcttatcaaagaaaattctaaggcaaggctacttctggccgacgatgattgaagattcgaaagcttatgtcaagaagtgcgacaaatgccagagattttcaaagataccaagagctccgcccaacgagctgacacaaatgcaaagtccgtggccctttgccatctggggaattgacctaatcggacagttacctaaaggtaaaggcggagtgcagtacgcagtggtagcagtcgactactttactaagtggactgaagccgaaccactcgcaactatcacatcaaagaaggttcaagactttatagtgaagaacatcatatgccggttcggactaccgtacaaaatagtttcggacaacggcaagcagttcgacagtcaatctttcactgatttctgtgcgaaccatggcatca

SEQ ID NO: 264740 - DNA, 978 bp, Cannabis indica
agcaaatccgactatcaaatcaacagccagttcacagatcctctactctctctaagcatggcggccaagagatggatttgttatgatgaagcttgggatattggaatcgttatgatggctagcatatcttcaatagaggctatgatcagaaacttcccgagaattatcttccgtagcctggtattttttctatataaagtaagatttaggttacatttttgcttatctgttctctccttgtttacttgtctaagtagtcttgttcatagtgtgtgtttgaaaatggaagacctaagtttcaatcctcgtcgtcagcctctgacattaacatctgatgaaaatatggtttatactcttgatgacctcccatctgagacccctaatgacattactctccttcttaagctttgtactgttaaacactttagtcgtttatctttgatcaaaaccctatcccagatatggacttcccagtgtcgattcccagtcgtggtgtctgatcattcagagggtctttttcttgtcacctttggctgtgaaggtgttaaacgtaggattctagatggccagccatggcattttgcccaaagtctgaaaattttcgctacccctgattcctcttttcctattaccccggatcaattacactatgtttctttttgggtccaaatatatggtattccttttaggtgtaagtcgtatgagttggccaaacttattgccacaggggttggggacctcattcaagctaacagtactactgtcaaagatggcactggtccttacttgagggtccgtttttgttagatgtcaacaaaccaattcggcgtggcattcatatttcgtttcgttgcgagtgggtagggtagtttactaaggtggctagtattttaggtatagaaagtattgtcagtcttttgtttctattgtggcaagtcttgatcataactaaaaaatactgtcatgtctttatttgac

SEQ ID NO: 264741 - DNA, 591 bp, Cannabis indica
gtagcgtgccttagcattagggcgttacaacgcatatctaaaaagttaccaaagcaagtaccacgataaagcttaagttgaacttcattgaaattggaattgatatttttaatcatattgttctcttgattaggaaataagatgattttacccagtggcggatctaggatttaaagtgaagggacataattttttttggtaagtgaggggagcaaaagtaaacttaaaaagaaataaaaatatttttacgataaagcttaagttgaacttcattgaaattggaattgatatttttaatcatattgttctcttgattaggaaataagatgattttacccctctaaactatatgctaagtagcttaatcattacaccaaaattaatattatgcttataagtatcatctttaatttaaaatatctattgtaactaactaaaatacatatgtatattttttccaaattttttttagggggttacttgccccaccttgtcttatatgtggtctgtccgtgatttcaccctgaatcatttcatcaggcttcaaataaaacttccatcctgaaaaatataaaaacaactgtaacgaac

SEQ ID NO: 264742 - DNA, 700 bp, Cannabis indica
gagactggagaatgaacaagtggtaaagacgtgtatttagtttaatttttatttttaaatatatataataatattataaaattaataaagaaaaagtcaacatgaatttctcataaactaagtaggcacactttatataaaatagatatatatgagcttgtttggaataccgtattaagtcgtattgtattgtattatattgaattggattatatatcatatttttatataatactatgttaaactttaatttatactaaaatattatatatttagatgtccataaaagttaatactacatatagttttatgtaaaaatattgcataaaatacaattcaatataatataatacaatacaatacgacctaatacggcgtaccaaacgagggccggtttatttttttcccatagtataagaaagtattttggaccaattatcaagtaggaattttaagttttattgtaatacaatgcactttattgtaggaaattattttattattttaataaactttttcatttgtttttcttttgaagttcttttttctctctgcttgcataatattttcttttttcatattttgcttttaaatttaaacatttaaatcttaaaaaacatgttattaattttttggaaattgaaaaaataattattttataaacactcaaaaataataaaaaatttatattttattggat

SEQ ID NO: 264743 - DNA, 969 bp, Cannabis indica
tttattgaaaacgaccttctgttcatgcgagaggtagacactttcccgagtttcattaagctcagtatagacagtataaatgggtacgtatttgtcgtgtttcttttgtttcttatctttggatgaccttttagagtcgtctttcctctctgaccctgaagctttcgacttgaattcttcaacagaatcacatcccgattgtcttcctagctccccgacttgatgtctcttgaacttattctccaacttgtctattcgcaaatggattgaatccccttgctttggaccaagttgttggcgaagatcaggttttttctggttcaagctgtaataccctagaattatgaaatagattagcaaaaccctaattacataattatgtattattgagaaattatattattatataatttaatatatgtgaatttacatgatttatgacatgttaagaccccgttggagagccaggggcattttagtaattttgactcgaggagggtaaaatagtgaaattaatttactaacgtgcttataggactatattattgtatagtatgcatgtgttgtctttttcaggtgtgttctgataggttggcgcagtatactcacaattgagttttcgggccgaactgggttcggggccgaaatacaatttttggattaataattagaattttaattatgtgtgaataatctgaattttatttgagaatgttcatgtatgaaatgacctttttacccttgattgtgcatgggtgtgcttaatggccataagggcatttttgtcttttcgggcattcgaattattagcaaaagaatgggatttttcttacaatttggaaaatgaaatttttctttacccttgcttcattcgacccctctctctctccctaaacctatttttttcccaaactttgatttttgttggaaattagcttgatttggtgctacctttggagcttgatactt

SEQ ID NO: 264744 - DNA, 1799 bp, Cannabis indica
cactgtaaagtactaaagttgatgatatattttttttgtgttacatagttgggattcgatcccacacaccccaatactttctattatgaccacttgaactagcctcaaatggttactaaagttgatgttattaagaaatcaaatagcacattttagctcttgctttagactttgtcctttgacatgattgaaaactagaaggcaatccacaaaatataattgcaaatataattgaaaaaccccacaaactctctaaactagaaacccttaattagcaactctacaactctttcttatctgtccttgatttccagtgagaacgttaaagtgtcccaaccgagtcatcgactcgacaaacttatgagaccatgctatagaatcaaaagccatatgtttcacaaactgtttagttcgtggatctatggccaatgcctgatccgattgaagcaaccctctccctttcaacaggttcacatagtaaacattgtcgagcctgtccgatgtgtagggatcaaacctcacaactgcgtttcttttccctattttaggagataatttcatctcattacacctttttctcagcttagcagcataggttggctccatggaaggtttagagggatcattcgggttagtttcatttagtctgtactcgaacattgtgcagtgtgcttgtccaatggagtgtgcacctgataaaacaaccaaatcttctacgtttaaccctttactggcaaacaatgctattaggtcttccacagacattgttggaagaggtaggtttccattaacatcagccgaacgagaagtacggctatcgcggcggccacctaggacagcatagtagggaagcccggagaggaaaatagcttctcgagcagcgaaagccaatatgtctgcacatgaaactgtctctggacatagttcctctagtttggtcttgatgtcatcaatgacctcaaaacctctaagggtgttgccattgaaataagaacgcttctctacaggctcaccagagaatgtggaatccaatagaatcgaagcatcacaaccctgtaaatattcttagatattaatgtccacaaaacaagtaaagttaacaattaggaacgaaattaatagaggccttagaatagagagccttatttgttaccttgacgaaacaatcatgaaaaaaaagcctaatcaaaccagctgcaacaccatgatctcttatgaatgcctgagctacatagtgagacaccacaaactcagcaggggtacatttttctttataaaatccaacatgcatgaattcttcattggtgtctgagataattgcctttggaagaatgactaaggacaatgtgaagatcaccactgcataaatatccttcatatctttaactgaagaaaaaagaagagaagaaaaagatatagacttgttgggtacgttagctttttagaagcataaaatcatatcatgtaattttttttttggaggggttctaactaagagtctatgcatgttgattgacttgatcttgatctctctccaaatatgtttatttgtttgagcagttttaatgggtggatcagagttaaaagtgtgtttggttgaaaggtttttatgattattattagatttagttctaattatagttcttttactctgttatgaccaccggtacgaacaaaagaggttcacatagattttttttttttttttaaaactatctcattttcctaattttttccgtgtgagaagaaaattgtgggttagattgtttgtttgttgtatagataaaacatctttaaac

SEQ ID NO: 264745 - DNA, 524 bp, Cannabis indica
gattttgagcattttatgtaatctaaattggggggtttattgttggaaattaatgcatgaatatgtgttttaagtccctaatatttgctagcagctctagtttataatttggaagttttgattatgaatttgaatgagtttgattgaggtttgtgttgaattttcgtgatttttgtggctggttttagggtttgaaacctaggtgccgcggcatgggttgagcatgtcgcgacccgcccctattggtggaacttgggatgttgtcccaggtgccgcggcatgcccgccctcgaatttttgggcagattagattcccaactttgaaattttataactttcgattccgaacttcaatttgggagttctttatactgttggaaagctcgttccgggctctatgtgattttctgagttttaaatgccatgattatattttatgagtttgaaatcaggggttaaacctatgtgtaaaaatcccggattgtgtgactaggattaccgggcacctgggtcagggagcaccc

SEQ ID NO: 264746 - DNA, 3872 bp, Cannabis indica
ctcacactttttgaattaagcataaagcttgtgatcacgtaagcgttgaagtactaatctgagatgtaattcatgttcttcttctgattaagaataaacccagatattgtcaatgaacactatcacatgtttgtccagaaagtctttgaatactatattcacaagatccacaaatgcagccacgacatttgtgagtccaaaatacatcactagaaactcgtaatgtccatacctagtatggaatgcagtctttgagatatcctcttctcaatttcttaacttatggaaactagagagaaggccaatcttagaaaagatcgttttgcctttcaattggtcaagtaggtcaccaatttagggtaaaggatatttgttcttgatagtaagctgattcagttcctaataacccatacacatgcgaagcgacccatctttctttttcacgaataacactggagcaccccaaggagaataactcgatccgatataacccaagttaagtaattcttgaagttaaacctttaattcctttaactcagttggagccattcgataaatcgcctttgataatggttccgctcccttaactctataacaaattcaatttctcaagaaggtggtaatccaggtaaatcctctagaaatacatctataaatgcacacaccaatcttgtgtctttaggtccagatgaaataggttgactactatccactgtcataactaagattcctaggcaacctctacacatcaggtatctagcttttaggattgttattcggggtatacgtgatccttgtacattacccacaaacaccgctagattggaactatcaggttcaaataccaccatcttttgattacaatcaatcatttccccatatttagacaagaaatccattcccaagattatatcaaaatcagataattgtagctcaattagtttggtggttaactcataaccgtcagtctaaaaagacaaagacctaatccatcgagtagatacaattaggtctccagagggtaataaggtattaaaccccgaagcatacacatcaaacagttaaggaaaactctctattactctacttgatacataagaatgaatagctcccaaatcaattaatactaaataagaacaagaatttatagacaactgacctgtcaccactgatggactaggatcagcgtcaacttgagtcatagtgaacaaccaccctagatttcgattgttgttcttcttttattattctttcctaaattttagacagtctgtgataaaatggcccaccatactgcactgggaacacgttttggctcgacactcaacctgatggtgctttttgcatttaggacactccgggtaagttctaatgaagacccgcgacattgacggccacctctattcccatgaaagtttctattacttcttggtgctctagaagctttagccttccgcttatggtctaggttgccactgccagtccccttattcactctatcaccatgaacaaatattcactcttgacactcctcaatcctagttcattttacccagtgtgtcacattcacctcattcagtcgcaccagatatatctaatcataatgcaaatttgacagcaccaacacctgctcacactacaaaccactatctcaatcgcctgcaccacgactagtaagtccttttatttttgaatagaatatatcatctctacattaatcaccaattattgcaccttaggacacatcaaatactacctcaccactctccactcctcctaataataattcttagactttaattcacccttctcatccaataatcacacaggcataagcaagaatcttgaaaccaaaagtgtaccttggtcatgctaagttttatgtctcacttcatcaaccttattcaatagagaatgcacttcagcatgaggggtggaatatgactatgggagaagagattgtggctctccactataatcgcactttgattcttatcactttaattatggttactcacaatattgtcagatgtaaatgggtttataagatcaaatataatctggatggtacatttgaaagatacaacgcacgccttgtggcgaaaggatttcatcaacgtctaggagttgatttttgagagacatttagccctgtaattaaagcctcaacagttcatgtggtgttaactattacagcagatcataattgggatattagtcaactcgatatcaataatgtatttcataatggcattcttgaagagaatgtattcatgatgtagccatcgggtttcgaagatgccaccaagccttgtcatgttcgcaagctcaacaaatcgatctatggcctgtgccaagcaccatgatcatggcatgaccgattaaagaacaccttgatagaatggaattttaagaattcaaaggtagattcatccatgttcttgatgaagaattaaaactttgtgattataatattaatttacgtggataatatcataagtatagggaatgatgtcaaagaaatagaactcttcatcaacaaactgaatctaatgctcacttgaaagacttagggcacctgcactattttctacgaattgagctattgaaagatacagcaggcttctcttatcacagggtaaatacataggaaaattattacaaaaatatgacatagccaatataaaaccaagtcccacaccaatgacagtaggcagacctttatctataaatgaaggagaacaactagataatttgtctcactatagaagcatcatcgatgcacttcaatacctcagtcacacgaggcctggcatctctttcgctgtaaacaagctcagtcagtttttgaaggatccaacaacatactcgagtgccacaaaaagggtacttagatacctcaaaggcataatgcatcacaggctccacttaacaccaagtgacaatttgactcttcaaggcttctcaaacgttgtctgggcatgttgtcctaatgatcgcagatccgtagctggctgttgtgtattttttggatagtctttatttcttggttatccaagaaacaaatggtgcttgctagatcgagtaccgagtctgaatatagatctctttcacatttaccagttgagatagcttagcttcaaaagttgttagaggaaatgaagtttaagtctccagctaccccaattatatggtgtgacaatatgagcactagtgcttttgcatccaatttagtttatcaccctcgcacaaagcacatagaacttgatgtgcatttcataaggataaggtgttacacttgatattcgatacattcatttccacgaaaaaattacagatttcttgacacagggactttcgcatggcagatttaattttttgatcgacaaagttgaactaatggaatcaccctatcacttgaggggtggagttaagaaatgaagaacgtatactaagagtcttttagtcatttaccaaacattccaagatatttggaaacaactttattcctttatttatgtgccatgttgaaataattgtagtcagtccttcttcttaatttattgtaacaaactctacacgtgttgccattttaatgacccttgtgattttctgtatcctagcttttaggctatataagctaatgtatttacctcactcattttgagctgagaaaacaatatatgtcttatactaatttttgaactcgttatagttacaatattatttttataaatttttgaatttttttgaaagagtttacaatatcgaaaaagagttcctggtgtgattagtttaggatttgaaaactgttttatatttttaaaaataaaaatggtgggggtctacctaagaattcttgattggttgag

SEQ ID NO: 264747 - DNA, 797 bp, Cannabis indica
gcccaaaagcaaacatataggctcatacaggtcaaactgattaggatggggcctatcatgtttctaggtttacacagatgaaagaaatacaaaatttatctgttacaaattatttataagatctattgacaatgggactatgattaaaatcaaatcattagatctgtcaacaagttagtcatagcaatttagatcaaataaataataggtttgttaaaaaaaagttttgaataaacaatttaaatatataagaaacaatttaaagtaacaaatgagaaatattatatttgtatataattaaattattatttaactaaccaactaaattttgaaaatttagggttgttgaaacaacctgaaagattttttcaaaaatttaaaatttaaattagtttaaaatatctaggtttatttgaattatttttatcaaattaaattaaacatctaataagataaatgatttgaataaccaaatagatatttttaatattattttctaattttataatttaataaaattaaaaaaaaaacaaaataaataaattttaaaatacatatggttaggcaaatattattttaagaataaaataacaaacaaataataatttttcaaattatatatcaaaacatcttaaattaagttttttttttttcaaatttcaacaaaaatatctaagttatttaaatatttaaaatactatttataaatgataggtaaaatgatataaaatatcatttttctaacttataatttataaacaattaaatattccaaaaaaataaccaattttgaattt

SEQ ID NO: 264748 - DNA, 621 bp, Cannabis indica
agttaaatttaatttaaaatataatctattaaaaataatcttatgggcatacatattatcatatttcagcacatagaaaagagatacattaggaaagtcaaataagagctacaaagttgatttaaattaaataaatttaaatgaaaattgataacagctagcagtactttttttttttatatatagaatattaggtatatactcagcattatttattcgcatatttatcattgcacatgtaaaaatgataaaaagtagtagcaaggaaggagaggagggagagaagtgaaaggagaggaaaaattccttatttgctaagagagagagaaaggaagggagatgagaggtgtggagtgatacattcttcctccaaattttaaaaatagtaatttacggtataaatatttaagtttaagttttggtagtaataatccaaaagttatatttttagaactctgtaggtagcgaatcgtcaaatgttaagtcattatccacgtcattttcttattggtatatttaaattaattttttttaaaaaaaataaaaaaatttaatgatttgggccaatcaaaaattatcacgtggcaatttacttaacacttaactgtcaggtacctacat

SEQ ID NO: 264749 - DNA, 690 bp, Cannabis indica
ttttttatttattttatatattggaaattttttttggtgaagccctcagatttgatcttaatgtatgagtatttttattttggtatatagagaatttataaacatatgatggtgttatagttatactaggcatctagcctctttttttttttggaaattttgaataattttttgtgcagaaaatataatcaaaaaatattcaattgtccgggtgcatattttattttacaggcatattttgaattttatttttcgacactacaaagtattcagaattttgtaaggaccgacataatgcctattattattacctctaattaatatattagattatatgaagaattgagatttaatttccataatgaacaaaaaataagaaatgcttctacaatggtagaagtgaaagtgaaaagtttgttatatatagaccacatgaagaatatatgatgatatatattatatacttaccatgaaatgtataaaatatacaactaaatatgtaatgccctacaaaccacaactatttaattttgactagctagagagaggacccaaaatttatcaagagggtataataaaataaactttatgaaatcgctaatgaattatcagattcaccaattaacaaatagcttaattaataatacatttgtaaggggactcaatagtgaaataatgacacaagaaaat

SEQ ID NO: 264750 - DNA, 1054 bp, Cannabis indica
cttgaactttcgacaatactgattttggcatctaaaatattcgatttgttaagaatctcccctaaacttttacatttacagaaatttagtctttctgttaggttccgtcccattattctgtttaaatgatgacgtgtctttgtcaattagcaactttaccccgtaaactttgacaactatcaaatcgtacccccccaaaataaaaatgagaaatattcaatatttttttttagtaaatcttaaaaaagtaatatagatcttaagaaaaaatattttgaatgattaagaaaattaaaaaaataaattaaaattttaaaactaattaagcgatataaaaaattatttattttttattagaaattttatttagatattaaaaatatatattaaaattaatttttgtaaaaactaaattttacgggaacaaacttgagtatgttatatttaacaaaaaatgtagatttgtttaagtaaacataatattttttttagtttaatatatattttattgaatttttaatatatttttttatttgttaagatatagtttataaatataaataaatttcatttttttttaaaaaaatattagtttatttaaattatgtattagattctcaataattttagtttgattttttaagatacgtgtttataaataaaataaagtttggaaatacttttagaaataatttaagttttttaagtaaaattaacattttttaatcaatttaatatttttattcaattttctaataatttttattatttttttctgaattattagaatattataagggaaaataaccacataaatacttaatgtttcagattttatacacttaaatatctatccaatgttacaattctcttacactcgttactaccacttgtgttaactcataaatatggacacctgaagggttcagatgtattacatttatttatttatttatttatttaaaacttaatattcttaatatcaaatttttggtagttgtactataatgaactgagttatgggtaatcttatgagaaaaattattatcatagt

SEQ ID NO: 264751 - DNA, 855 bp, Cannabis indica
ctttctggttgttttcaccatatctatctttcttcttaccatcgtatctttgcccacccttggacaaagatggtttatttttgttctttttccctccaattgacttcttggaaacatctccctatgaatttggacagtgttatacttataatcaacaagtttcttggcagccacaattatcgatggcaagtccaccactgcttgctatctcagttcagcctggacccaaggctataatcgtgataggagttgaacatcttctcctcctcggatattttctttatgtccagtaacaaagaactgaactccttcacatattctcaagccaaaccagtgtgtctcaatttcttaagaaactcccgagtgacccatgtcgtatttcatggaaggaattgatcctttaattgtttctttaacacatcttaagttttgatcttaggcccacctgagtgtgcatcctcttccatctgagtttgccacgacagtttggggtcaccatgaagatacatgctggtgatagtcatcctctatgaatttgggattctcgtggccttgaaatattgtttgacgtgccaaaggaagttctccaactcctttgagttttggctgccattaaaagccttcggttctgtaccttaattttggatggataagacgaagaagactcagcactagtggatggattcgccctgaccctcttcagtagtgtaacgtctgaatttagagcaaggaatcgctttttcactgaatttgacaggtctatcactttcttcatcttctccctaaaatccttttccaactcaatcattgcctttccacaaacagtaacttggtcagttgcatccttttacacag

SEQ ID NO: 264752 - DNA, 301 bp, Cannabis indica
atatttttctattttaaaattaggaaaaataattagtatataaataactatctagaaaatatcttaaattaactaagtatcttttcaagatttggaaaatatctaatttaagtttttatagaagaatctataataaggaacttaaaaaaaatttccaaatgaaattagattaaatatcaaaattaagtatagtaactacctaatttaagaatattccattttaagtttaaaatcaactaaaaaaaatattaaattcaaaagatattcaaatttaagttaacaaagaaagttaataataact

SEQ ID NO: 264753 - DNA, 545 bp, Cannabis indica
aagagtgttatatctatatgttttgctttttttcatgataaactgggttcttacaaagatagatggatgactggctattcgaatacacagtcactcctcctttgatttgtttcaattcataaagaattccacaaagccataaggcttccttgaatgcttttgagttgccatgaattctgcttccgtgatggaaaaagcaagcacagactgtaattgggccttccaacttatacagttctagtttgtcaagaaaatgtaggaagtgtttgattttttggtatctctgttcgaggcatagtcaacatccacaaacccttttagctccaattctcctttttctttcttttaggtcagaccataatcccaaatgcccttcaagtatattaataaccatatgagagccttctaatgttcaatacccagaccggacatgaactgacttaggatgcttaaagcgtgagcaatatctggtctagtgtttaccatcacatacatcaaacatcctatgaccatagcataggatacatccttcatttcctctttct

SEQ ID NO: 264754 - DNA, 419 bp, Cannabis indica
gtatgcaaactagcccacgaatgactacccgtgtcatctcgtgttgagactcgtggcctaggcgtgccacgacgtctcttgcaggatttaggccacgtcccgtgcaagcgacataccaacaagccaaaggaaacgtaccattgaacctctggcggcattcttcgatgcactaccgggtcggcccgataatgtccatgagtactccaactcatggagacatatgagtcccctcgtggtactcatatgcccgccctaccagtccccactgactagtagtagctcacttagcaccaaggtgcaaggggtggtggagagctgacaccagggtaccccttaaacgtaagcatctgagctttagtcctctatcaggaacgatagatgattttagtctctgtagacatatgggaagcaccactata

SEQ ID NO: 264755 - DNA, 771 bp, Cannabis indica
aataataaaaaaattcaaagtaaagtaactttaaaaaaataataataattcaaaataaaaattaataaaattttaaattattaatattatattttaaaaaataaatatcattaaatattattataatttgtataaagtttgaaatggtatacaagcagtcctattgtaagagtatacaccttacatcataataaccacatggtaaatttagtatactacatttctaaggttgtcttttattattaacacctgtgatgtacgtgctttatattaaaggtaaatactattttagattatgaattttcaaaaattacaaaatagaccatatgtaaaaatgagatcactgagcttaatttttgacaatttttttttaatataaccaacttgaagacaattcctaacacgaacagatacaaaaaatgtaaacaattttgttataacacatttagactagattattattaaatttttttttgacaaaaaatcagttcagagtcctatttgtgcaattttagaaaaatacaaggtccatttattcatttaactaaaatagagggtccaattagtaacttttgcaaaacataagattcaaaatggtatatacccttattttaatttataatatgaatataacaatatattatttaaataaaaactatattagtttaataaaagtttatttaatttttttaattaatctaaaaatgaaattgaaaatgaaacctcctgtcattaaatcccaaattatatttgctcttaaataaaatatat

SEQ ID NO: 264756 - DNA, 989 bp, Cannabis indica
atattatcgataaatgcacattgcatgacaagtacgtgtacaattggacaattaatattaattaatttttgacatttgttatcccaccttcctaacaactattctggtctataaaaaaatttctacttcataagttatatatctttcttattctttaaccctacaatattcttctcttttaagttgtaaatgtctagtaacgagagcaaacagaaacatagtgaagaatatcatcgcgctctacaaaaagagcatttggaatttttggagcgttttaaaaatgaaaggttagcgaacgaatggaggtttctatgctatgaaataatagtaatctcgcttatccaccaccagggttccctcaagagtgccatcattgtagattagattatgttaacgacgaaccaatcaagcctgggtcgttgtgcgtgtattgcatgcatcacccaaactctagagacttttaaattgttatgattgtttaggagttacttttaacatttgttttgccttcatttatgtttaatagttttcacttgtttcgtctttacaaatgtgtaaacgttttaacttgttttgtctttactgatgtttaaatttttttactctttttgtactaatatcgacattctattgattaaatatcgacaaataaaaatactaaaaaaattccaaaatattgacaacatgtcgataatgatgcttaaattaacatataggtgtattgtcgataaaatatcgacatgatgtcgataatggtcatccctgacattggattgcaagaaattgatattacatcgacatactatcgataaatcatcgataaacagtaaaaaaacccaaattccgagagaaaactaaatctagcatttcgaataaaaaaaatagcaaaataacatcagttcaaacaaacatcacacataaaataatggaaacaaactacatattatttctaatgtttactcatggttgaatgatttttgtggaattga

SEQ ID NO: 264757 - DNA, 3770 bp, Cannabis indica
atctgcgatatcaaaattttctgagtgtattcgatggtgctctacaatgcagcggggttccgatacagtacaacgattgggctgttttatcctggggacgaccggaaatttctgactgcttgcatattcctgggcagtgccgcgaacttcttaaagagagcgacttagtccgcgagtcaacccagaattcttcatttggtaatatcgttactcttttattttgctagcagtttactcaacaacaactagcgatgcaacttaaatcgtaacaaaaaattgtatagaaactcctattgcaattagtgctgcaactactttagaaacccaaattgtaaatttgaaaaaaaagttaaaagaacagtatatggaatgaattcccttttattttcagtgtatatttatattatttaccttgctcatttctttttctttttccctctgaaaattgttcttgcatgtttatataaatagccaaataatattaaaatcataggtaaaattacatataaagtattacatctaaaagaaaatacttacaaatatatatactttggagtttttaggagtcatcatgtaccattcttgagatggctcataagataagatgtcactgcttgaccttttaaaatgctagaactattatacaatacaatttagttgaaaggatatggattttattttcttatgttggtgcttctttatttttggattcaatctagcatgattcaaatttcgtgaaacaattttatcagtaactaactatgcatatagatttttattaagtgaaaataagttgttattgtgattggaatgtcatttagtcgacttagaaaaaggtggtggtaaaatatttctagtgagctttaattgttaaacttctagtaaatctgtggtgatgtagttgaaggatttagcgaatagattgatccctagaccaattatatcatttatagcataatgctaccatttctacacatacaatagtccatgatatttgactttgtgaacttatttattcgttagttgttttagaatctgtggtgtcatttttacacatacagtagtccatgatgaatctgtaatgtcatttctacatatacgatagtgacagttcatgatttttgacattgtgaaattcttcttttttatccgtcagttgttttcgtcaagagctttcagtaaaagttttgattggctactcaatctaaagtaatcctcctccccctaaaaaaaaaatagttcgatagacatataacatacaaagctaataaaaacattagtaatgaaattcctcgtgtagagaacaattaaagggttccttaaggtacactattgaactgattttatatattaaagtatgcaaaaaaaaaaaaaatacaagaaagctaaatgtactgggcggattcacatagaggcgaatgcttcttgaaaatatatatatattttgactagttaaaacatgtatttataattagaagtgataaatataaacataataatagctttgacatattgattaagttatctcacacatgttatagaggttaagacttcaaattttaagtaaaaacatctttacttttaatatttagtttactttttgctttcccttcaaaaaaaaaaaaaataatgccccagtcaactttagttagttactatcgtgttaaaacaaatagttgctacttgctagctttatttactaattggttgcttaaacattcacgttgtatgctactctcttcactaaattattatgaagtttagttacttcctctaataattacatagtatcaaaatcattgttccaattatctcaaatcattgatcaagttgattttaaattcattgtctttttatttagtgttcttgcattcatatcggatttcaaggactagttttattatctaatgttcatttacatgttcctacaacaactttaacattggcatcaatcactaccttaatcattgaatggttttgccgttctcgttccgtatcacaatccctatcatttaaagggaaatgcttttgtgaaatctcaactcaaagacggcagagtgagaacgttttcatttatgggccaagtgatacataaatgacttaatacagagtgccaagtggcattacaagaagtaaaaggaatactctaaaataacataaatcaatcccaatccaattgtatcattcccaatgctaacaaataaatcattatcacatagagaagaaaagatttcaagtgtgcagcaatttagattaagacttgtgcattagatatttcaacactccctgtcaaacgaaggggtggggtcgaacaccaagttttttttttgggaaatcagccattcattgtacaaaatccatttctatacaagctaagagcaccacacccaataaaagaggcctcactgtgtatctataaaaatttataaattattgaaccatattacatcttccttactcactttctttggccaaataaggagtctttgtttgacacttcttttgatctgaatcaccacctgattaggattgggggttttattttgccatatcaattcattcatgcttctccaaatattgtaaactaggctggcaaggacagttgccatcactttccttttgaaactactcattcgcaccctccgaatccacctagttatacttgctaagtcaggagccgaattccttttgtcaatgagatactgaaatttggtaggtgatagtcctttggtgagacaattagtcacctaatctaaagataggatgtagcgaacttctagagcctttagcaacaccttatctcgaatgtaatgaatgtctattttaatatatttgttctagaatgatagacataatttgaaagtagtgcacttgcactttaattatcacaccaagtgattagtgtctaagaaagtttgaatttgagttctttcaattaggactcaattcatgtaatttttgaggcaacatgagcaagtgctctatcttcggattcagtgttggatcgagaaatgatagcctgcttctttgaagaccatgacacaagagtatctccaaagtagtcataataacaaaccacaaattgtatatcatctgggcaacatacactacaagaaaacctcttttagcgccgacaaatgtacactacatgccccggtaaacctttgtcggcgcaatacttcgtctgcaaaacatgtcagcgaaccttagttggtaaagaacgttttaccagcgcataggtgaaatgtgctgacaaactatgttttgctggtgccgaattgcgccggcaaaaggtaatcgccggtgtaaaatgatacccttatccgatctgaaccttctttgatatatttttgccggcgcattccggcgcaagaatgcgccgataaaaatgttcgcaccatttctcaaattggcgccaaaagtttgctggcgctataagtgcgccggcaaaacttttcgtgccaatctagaaccttttagtgttaagttttgatggcgcattttttttttaaaaaaataaattaattataataattagttatattatattttatattataaacccaaaattaattatattatattttatattaagaaaaaaatcaatataatttacattaaaagataaacaaacattaattatattattttgtactaaaattagtatataaacaaaacattaaaagaatgttcgaatcggataataaaaaaagtaaaagttactaattggtatataaaatttctaatgatctataggcgagtaatgtcat

SEQ ID NO: 264758 - DNA, 829 bp, Cannabis indica
agttgtttattgttatattcagaggattgatatgagtttttatgttgtttaatgcatgatctaggggttgtttgatgggttagtcaagttttgagttttgaactcaatcttgaacctttaatggtgaaattcatttctgtgtgtgaagctttgttttgtcacttggaatatgttcattggggtctaaatagcaggtctgcagagtttggtttgatttggggttgaattgcatgagttatgaatttttgaccctttcctgcactgaacgaggcctgtagcaaccggtctaccggttggcgtccaggaattttacccagaatcggaattccggtcggggaaccggtctaccaattggggcaaatttgagaaccctagttcttcacttttttatgttatttagggtattgccatattgtttatcgataggaatacttttagtttctagtttaagtccccggaaagtgatttagcgtatcacttatcggtgttgtgattattatgatttaggagcctgtaattcgccgagcagattattcgactcaggttaactggcacaccggaatttgaaatcgaggtaagattagtataatagtatacatatgtatttacatgtttagcgtgcatgttaggaagcctgttagattacattagatatgtatgttggcttcgtaccattcgacagtatcacatcggtacggctagagtatgactagcgtaccgagtacaggctgatattatggtcgatggtactgtactgtttgaccgtatcacatcggtatgctcagagtatgactaacataccgagtataggctgatactgtaacacatc

SEQ ID NO: 264759 - DNA, 581 bp, Cannabis indica
tagatgaagaagattcttgagtaagagtgtaagagttgaaacactttgagagaactcatcaaataatctttgtcaactgtattgtacatgttcttgctcaatcagaaaattcgatggtgcctcagaacttgaggagagtcatatattacatcgatctatcggacttgaacctgtatatattttggtgttaattttatctttttactgctttaattatttctaaattttatactctgttaatctttattcatctcccattattgatcatgatttgttatttttgtcattgctaattatttaattgtttaaagtttaattattttaattctccaccattagttgtaacatttcacaatagtgaatatatatttttcgtacgcatttgaaagtttgaacactattgtttggacttgtttcaaaaagtgtacacaatttataacatataaatatttattaaaaaataagtatctatttctatataaagtgtgcctatataactaaattcttggtttatgagaaattcatgggtcattttttatttatatataataaaatattatttatataaaataaaataataa

SEQ ID NO: 264760 - DNA, 1819 bp, Cannabis indica
cgcttcagttctcgcaaggatgcacgaggagagagggcatggaaagcttcggggtctggttcaggagtatcctcctcatcagtgaaaacgatgggttcaatccttaaaatttcatccattgatttagttttctttgcatcacccaacgaagtcggtccacgcttcttcaacgccttggtaattttagttgcagaaagatgctttccatgattcttggatctcgttcgtgccatggcgccagctcaggagctgagagagcaggaaccagagaaagcaataagtagaagagaagatgacttgacaaagaatgtgtacatgcactaaaagaagaggtagaaaggctccacacaaacaagttcattattgaatctttctacccggcttgggtagccaaccccgtactagtacccaagccaaacaaaaaatggcaagtatgtatcgacttcattgacctcaataaggcgtgacccaaggactgttttccactcttaagaatcgatcagcttgttgacgcaactgtcggacatgaaatcttaggctttatggacgcctattcggggtacaatcaaatcaaaatgcatccacctgactaagaacatacaagcttctgaacaaaaattggtctatactactataaagtaattttgtttggtttgaaaattgctggagctacctaccaaaggttagcaaacaaaatgttcaaaaaccagatcggacataatatggaagtatatgtggattaaattcttgtcaaaactaggaaggctgggggcatatagagaatctggatgaatgcttcaaaatcttcagaaaatacaacataaaactcaatcccttaaagtgttcctttagggtcaactcgggtaaatttcttggatttatgttaatgctcgaggaatagaagccaaccgagagaaaatacaagccttccgggatatgaagtcgccaacaaaaataaaggaaatgcaatacttaattggttgatagccgcactcagcaaattcgttttaaagtcaacaaacaagtgtgttcccttctttaacatcctctgagataacaagaattttgaatggatagaggaatgcaaaaacgctttccaagagctaaaaaagaaactctcaaagcttcttgtactctcaaaaattttagtcggtgaagaattagggatttacctagcagtcattgaatacgctgtaagcttcgtgctgataagagaagagaataatgcctagcatccattctactatatcaacaaacaattggttgaggtagatggtcggtatcctttaattgagaagctaactttctgtctgatcttaggcacaagaaagttaaggccctatttccaagctcaacttgtttgggtatatatcgaccaacccttgtgccaagtattgcaaaagcccgacacttctgggtggttactccagtgggctatagagttgggtttgtatgaaataatttttcaaccctacagagcagtaaaagggtagaatttggcggactttgtggtggaatgtacaggcaaagaggaagacaattcaaaagatagtcccgagccagacaaaggactagaataggactccctaccagaagagaatgaagacaagcccatctggaaattacatgtagacaaatcagccatcaataaactttttggtaaaggaattgctctcatcacacatggggggcaacagttggaatatgttttaccaggatctagatttactaccacgtatgttatttaacatcctaaatatgaatctctaaaacaatataaataaacacatataaagttacagaaaccttacagtgggtg

SEQ ID NO: 264761 - DNA, 667 bp, Cannabis indica
aatgaagatctaattagattattacgtttgtgcttttcttaatagcatctccaataaagtaaaaaatgtagtgtattattatattttagcacatttatgaaaaattactatttttaattatgttctaaaaattattctaaatttggtgcatgataaaaattatgttaaatttagtacaatatagtattatatcaaatttgacccacaataaactctactttttttttttattatagtgtcacgaattattatgatttattaatttttagaaaactttgcattcttcttttatcatatttccattatttaaacaataaaaagtaataatttttgtactctcactaaaatattaaatcgccattaatataattaattatttttacttattttacatcttgtgcattggaacacaactataaatagtaggtatagttcaatcttattttgtgcgctaaatttagttcaaaatttagaaattgcagtgggagatggtttaagatccactttttattagtaaagaatcgcaatcattgttacggtaaaatcatgatatacaaaaatgtatcaaataaatattttggaagaaaatttacaatgctaaaagggttttatcggtgctaccttttatttgttttgacatttgggagaatattttagtaaaaaattt

SEQ ID NO: 264762 - DNA, 950 bp, Cannabis indica
aaaaaatttctaaaccagaatgtcaatccatgctttgatatgaagtaatgttagtcaaatctaccatggtagctactctataagatctaaaaaaatatatttttcaacaaaattaaatgaataaagaccactacatataacaagagtatgcaaatctattatcactaaatataaacaattatttacacaattttggttatgagtgactaatgtacctaattctccttgaccattgttaacgcaaatttttgttaaccaaatttgagcctcacgattatgattcaacacagaaaatataaaagctatagaaaaataaaatatgaacaccggggtttttacatggttttgcagttaaaattctgcatagtccatgagtcaatcttattcagatttttgagtattttttcagggcctcttgtgtaagagttttttcgtcccttttttgagattgtttgccactatttataattgcatagtggtagttaattacaaggctgaaaaaaatgtaattacaattattatcccttcaatcatgggatctgattacatattatgaaatgtaaatgcagtgtatgattttgaaaatcatttagctgtgattttcccgcttttactggatcagaaatatcatatattaaacacatctttaattgttgaatctggagatgtctcgacagaaacttgattgcagtgatcccaatggcaagctggagtcatccttctttctgaggtcgacttgacatcttttacgttgattgagggtatatggaaatattctgacttgttagggttatgagcctcgctcctgttggttggatggaactatagggagcttcctcgtagcgagatggtcatctcgcattcttgttcttcgagccgattcgaattttacacttagtttgcttattgcaagctagggtatgtgtaacttttctccggtgcctcgctat

SEQ ID NO: 264763 - DNA, 1969 bp, Cannabis indica
tgcccagtagacttgcctcatacagggcttaagggtcgtctgcgaccttaacagggagaccgtggagaggatgcctggggtagagtcttctaatccatccagcagaacccatacttaagtatctacagcatacaacaatcttcttctttttttcctagtcctccccctctttactctttttattttacggggacattttaattatgccctaactgcgggggctctttgtaataattttaggtatttacccttttccttgaagcttcacttctattttattatactgttttaagagctattatgttaggttgttttaaagtgtatggtttcaacaaccagcacttcaaaccttttttcacccgtttgtgatctttcagctgatttaggaggcatctggggacttcaatctccttctccttgatcaccaggaagtaatgaagcgtcagcattttttatattccattagtagtaattatctgtttggagtttctactcaaagaacgctggctcaaggatgattttcttcgtgaaagggggagcttcttcttttcaagcgcctcttgggctcttatgtttttgtgaaatcgagttccgagagtaatgcttgtaagtgtcgtaggttctaagagttttcttctatccaggaatggggctgaaactgcctcatacttaagcagattttcttatcccgaaccttgccaccatgagtctttagctccttgcaaacccagtcaaataaaaccttaggaaatcattgagaccattgagaaggaatccaggtagatttttcttcttggaaaatttggctaaaacgcatcccatctctggatttacttcaaattttaaattttgaagaaggaattcaagcgtgttttcccttaagaattttggttgaaaacgcatcttgttttcagtttaatatgcatggcgcgctaatgatttgacaaggtaattgagtaattatactgctagttgctgagtcataagcagctagtcataacacctcccaaatgagctgagagacttggacgcttccaaattttcaataatttgtccaaaacataaccttggcactgttgtgttacttctagtctccaaaggggagagctaggttcgcgtcaaagttctagtcaagctcttttctaggaggtacaaccaggcttgtgttgtttaataccccaattgtggcctctccggctatcatcgcatgtgaaggattttttccaaaagataatgaaggccaggttgaatttgacagtggtcttccgacttgctcgagggaaggcttttgccacactaaaattcaagcgtaggcttcacgctaaaaactatatgtgaaaatgaagttgggtgacgggcttcaagcaatcctcaacctgaaggggaaggctgaagtcacgttcgacaccccaagcaatatttccacaaaaacatttggaaaagtaacccatcaagatgacagaaattgtgtggcgagaacacacatgcatgtggaacccatgttgaattgggtggcggactttcgcttccatgaaggaaggttgaagtcgcactaaaatcaaaacaatagtttcacactcaaggaatagtagaacatcactgggcgtgtgacagacttcaagcaatccttctcttccaggaaggagcgttgaagacacattgaacccccagtgatctttcacacacggaaaaacttacgtgctcacgagaatcatgttgaattttatgtggcagacttcgtcttccgtgaagaaaggctaaagtcgcactaaaattcaagcaatgatttcacgctaaaagaccaaagggcatgaaacatcactgggcgtgtgacagacgtaaaaactacatgcttgcgagaatcatgttgaattttatgtggcaaactttggcttctataaataaaggttaaggtcccactaaaatccatgcgatgattttacattaaagaccaaagggtgtgaaacat

SEQ ID NO: 264764 - DNA, 600 bp, Cannabis indica
attcttgtctatgtggatgacatcctcataacaggcagtgactcgaaagtggtatctaatctcatcactgctctcaacaacaagttctctttaaaagatcttggtgatcttcactactttctgggtattgaagttcattctacaccatctggtttacacctctctcaagctaaatatgctcgggatttactagtcaaagctcagatgcaagaagcaaagccatctcccactccaatgaccactggtgtaagactttcagctcatggcagtgaaccaatgtctgaccctcatctctatcgatcaattgtaggtgcactacaatatttgctcatcacaaggcctgacctatcctttagtgtgaataaggtgtgtcaatttatgcacaaccccttactcactcactggttagctgttaaacgcatcctacgatatctaagtggcacaatctcatacggtttgcatttaaaaaggcctacagatcatgatgttgtagcattctgtgatgctgattgggctacagaccctgatgatcgtaggtccacctctggtttcaccatcttttttggtgaaaatctcattgcttggcagtgcaaaaagcaa

SEQ ID NO: 264765 - DNA, 1287 bp, Cannabis indica
tatggtatatctacttatgattgtggtatatatagtttttgtatgctactgtatattgtggaaaataattcatttaatagtatattagtttaaatttgtgatatatgtatattggtttaaggtatattgtttgtatatcatacgatatattaataaaaaattaattatatggttaaataacatattagacaacaacaacagcagcaaaatttaaaagaataaaatatataataccttttatatgaaaaaatagttgacaaaaattcagtagagaggttctgatttattgttttttataattcctattaaaggaataacacatataataccttttatataatgaagggtattttaggtattaaaaagtaaaaaaaggacatttgctttattattttgaaaaagggacattaactatctataaagttgaaaataggatcatttacttttatttttcaaaaaataaactaaaaattattgtaagtgtcaaaatagataaaaaaatctatcgaaatacccatttaaagaatgtaccatatgtaaactaacacaataacatataaatggtatgtaaatctccaaataatagaatttagagttgtggtaaagtaaagggaaaaatagagattttcttgttatctccaaaatactacacatctcactttatttcatacatgatcgatcttaaggtgagacaaaagaggcagccaccttgtgctccccatcgctcagggcccttattttaaaaaataaaataatatataattagtaataaaataaatattaatactaataatattaaatatgtgttaacttaattagtttaataactaaaagattgagaattcaaatcataactgttgcccctgattttgtccaatatacgtggaccaaccagacaaggatatgtggatacaaatgtcttaacactcaaattaatagctaagtctttataaagaaaggcataatccgggatctgcctcccggagaaggcatacgaagtcctctatactcccggaggccaaggtggcatcgaagcatctccgggagatgtcaagctttctctgaacagtcaactcgcatttaatgccgcatgggaggaggcgtgttggaactgccacatgcaataaagtctgacgacacaacccccgatctgcacctacaaggctatgatcacttaagtctaatgacggctacactgtgaagaaacacatcagtcaaaaggcaataaggacaatccacataaaatccctacagcacctagggatttgaccatgcattacccatggt

SEQ ID NO: 264766 - DNA, 663 bp, Cannabis indica
gtttatataaactttctaaattattaaatgttgaaacttattattttgattcagccgtcgtgctctaggattaccactagaagagccaggaaggtatgtcgaagctagttactttgggaaggatcaatatgacccagacagtgctctgtatcgctatgactactggggagagccaaagaattcagagaagagcaagcaagagcgaatgacagatgcccacaacaaatctattgttggcaagggcaatgtgtggtacgaaatgtcatatgatgagtgcatcaaacaaaaggcggaaagagaagctaaaggaattaagccaagagtagtcgatgatgaagattcagacggaagtcaagatgacaatgatgacgacgatgatgattttgatttcagcattctgagtgaatacagtcttgagatggcaaaccagcctcatgttaatgggactgaatcttctaaggtttcagaggagggtatgtttgaggattaagagttgggaccatggtaataatggtgcaacatagctctagggggaaaaaatggtattgatttgtaaagtagttagatagatgagagaaggctttttatatgcggcaaaatccattttttgttgatgttacaagaattactccctataagactgaaaagagaaagaaaagaaaa

SEQ ID NO: 264767 - DNA, 1379 bp, Cannabis indica
aaaattattcaaataattaaaaatatttcacataaatatatatatatttatattattatctattaatggtgctatgttttcctcaacaagacttattgaagtgtggtggtagatcttatcttctcattattataggaatccattcctgttatccccttattaatgtctatacaattttgatattttaagatgtttaatactatattaatataatatcttataactgattagcatattcttatattatttattttaaaatgtatgagacctcatatgagaatgtaccaatattttttacctcttgtgatatttgacatcttatgaaaaaatctattatatatatctatatatattattttatgttgggactcacatgagtcaaatgactctttctcttctttctcttgacaacttgttctttttcttttactattcacaaatgccacataaactaccattgcgcaagcttagatctaccacgtacccaccgagctgccagtttttaaatgcattatggacctgtgcaaccggtgacctatggtgatctcacacctcactttcggtgacaatcgaaactgagacacactcatacgagtagtgcaaagttttgatgttaaaactttaagtcgatattacaaccaactttggaaaccatttgagaaatgacttatacagttggagtcaaagtcatgagaagaatatcgaccactaagtcatttttgtcaactcactacattttagtaatgagattctcctttggaagtatttttacgaggttggtgcttgggctagtaggtcatacatgcatccgtgatctactcatcaagggagtcattttgatatatgttatgtcaagatccttaatattacttggaacaccgtctttggctaccagaaaatgccattgtgtgtggctaaagtgagatctttgagcatctttaaatggtatatattgtgtcatatatcgttggactctatttgaataattacaatgatgataattgattattcaaatattagatatattgtaggaaaatttaacttttgtatggttaagatatttggaacttaagaattgggggcttagcaatgactcttttggagaaagtttaacgatcctaaggagctagagacttaacttgattattagatttatttttatatgcattgaatgacattagacatattttaatttttatgatttataaaatattttaaaaattaaaattttatattcatatttttttgaactgttctagggcattcaatgtaaaatatatatatatatatataatgcaggttataatttttagttttatttaaattacagtcgttatgttgtcagattttttatatttaaaggaaatatgttttttttt

SEQ ID NO: 264768 - DNA, 638 bp, Cannabis indica
aaattcaacatgactctcacatgcacgttgtttttcgtgcataaaaattcaaagagaaggactgcttaaagcctttcacacgccctgtgatttttcaccctttgatcttttcaagcaaagtcatcacttgttttattatgcaactttagccttccctcgcggaagctgaagtttgcttcataaaaaattcaacatgactctcgcacgcacattttctttcttgcatgaaagatcactgggggtacaacacgtcttcaaccctccttcctggaagagaaggaatattagaagtatgtcacacacccagtgatgtttcaccctttgacctttttaagtgaagtcattgcttgaatttttaagcaactttagccatccctcactgaagccaaagtttgcttcataaaaattcaacatgattcctgcatgcacgttgtttttcgtgcatgaaagataattgggagtatgacacgtctttaaccctccttcttaaaagagatggactacttgaagtcaatcactcgcccagtgatgtttcaccctttgatctattcaatcaaagtcattgcttgaaattttatgcaaatttaaccttccctcatagaaaccaaactttagttcataaaaattcaacatgactc

SEQ ID NO: 264769 - DNA, 805 bp, Cannabis indica
gctcataagcttgctaagtggtcttttaactcttaccgttttggtttttcaatgctgaggagttggcacctcttgttgccatctaaaactgtttgtgtgttttggtttgtttgcctttctcagcaaaaaaaaaatgttaaaaaaaaaaaaaataatatttttcaataataatatattttgtccaaattaagatatttcacaattttaaagaatgtgagggactaaatgagtcccttaaaaaatagccattcatgaaaagtttctttaatttaataatgtgccttttgagcacttgaagcatgaaagtggattttggttatggacttgacttgagattggtgatataaacatccaattggaaaaaatgtgaaatgaaactactggggcctctaatgcttggctcttaggtgacatgaatagatgccatgccctagctaattatagctaaacacataccttcaaaatttgtttagaaacccttttattcagtctcttttgtaatatagtgaagaaaaaaaaaacgtttgtttgccttttatttaaaggtgacaatatactagaaaaaggacaaacaaatatctgtatgtaccacatatttttaaagaacacaaaagggccaactcttagccactaaactaagatatttttatataaacccacacccactagctatagccttggaaaagatgaagatttttagtgtcatatgctaattatatatgtatatatatatatatattacagaaacttagaaaaaagaaaaatatgttatatattgtgtgagttaacatgcacattgatgcac

SEQ ID NO: 264770 - DNA, 1791 bp, Cannabis indica
tccattaataatctttctagcaccttatcaatatatgttgcttgtcacaaagtataataccccaaaaaattcttggaaaaacagagcaccattaaaacccaaaacatgtgaatcacgtaaccttaaaatttctagccctagattactaaaaaaattcatttaaacccttatttcaagaaataaatgatgtaacaaaaatataggagaaacaaaacaagaagaaattagaagattgataaagaaaggtcacttaatggtttgatgtaagaagttgggtcccgaagaatattttgttgaaaactcctgatgtagagatcctagatgatgtcgattctgggtttgaggaataaaatcacttgatactcgaagaaaatatgtaaaggataacgagggcatgcaatttcagtgagcaaattggttttaagttttttgagttctaagagctttgttaatgataatggcagaatagaaggaattttgggtttaatatccaaatgatgaaaattgtttgattgcaatgatgactgatcgaacggatgagaactattggaaaaagaaggtttagtgtaataaatgttgaagtaatgtgtacctcaaaattttgaaccaccaaaataaagcgtgcaatttttaaatgggaaaaatatgatcgtaccttttaagaaattaaaaagttatttctattttaaaaaatacttcttagggagcaattgttatacccatatttcgagaagtaatatggtgctgacacatgtaatgaagctagaatatgaaccaaccctaattatacaataataaatacatttagacaacttgcctcaggaagtacagttagtaagaatattcgaactcaccctcttaaatgcaatggcgagtcacgaataaactattaattgatgagaccggcgacacgaacaaagaaggtcaatttcgggatacataaaatgtacaacagaatgacaatatttggaaatggtagataatgaattattcaaagagctcccagctcattgacccacatactcgtgagtatcttaaaaggctaaagacaacacccttagcttggttaacctcgcaattgtcagatggtgataagcgtctcgcttatgccttactcgacattgatgaaagaatgcgagaagtactacttgttatacacttagacgctaatttatgataaattgataaagtgtctaaaggagaattgctacattacgagaaggatgacgcatagtcagcataagcgccaatagataaaattaaaagagcggttatgagaagttattcataattatctcatgtgtgtaaatgtgaatcgtgagaattgtccacgtttcacaaacggttaaaagtgataagatcctaagagaataactgtcatcctaaactcttataaatagggacagaatccagaaaataaggaacgaccaatctgaaaaagaaagagaattatacatgtcattcattctataaataatttattgtattttgtatacaatttatcaatcattgaataagatggactcgtggactatgaagaattaacttcaaaactacattaaaaatactctcgtcatttattactattattattttcatcattatttatttagattgttgagtacattaattatataaaaaaattattattagttaacgaaaatagtatacaatcataaaaataaaaataaattgattaaaaaaaaatttagttgccaaaataaatataaaatatatcggtatatctcttttaaaatagcttaaaatataccaatgtgttattcttagcac

SEQ ID NO: 264771 - DNA, 1223 bp, Cannabis indica
tagggttaaaggctgcaacaattgtgccggtctgtaatgtttagccttgatttgctgacacgttaggcatctcgatacgaatactaccacattcttctttattccgctccaccagaagtagggtttaagatcttgatacatctaggtggtgccgggatgcagggaatatggagtggtatgagcctcttccagaatttcacttctaagttccgcactattaggaccacaaacactggtcttgaacaacagcatcccactatctgacactgtaaaatctttggcttgagcatctgaaacctcttatctgatctttaataactctggatcagttaactgagcaactttaagtcgttctaacagattagattgcagcgtcaagttatgaagtttgtctacaacaaactcgatgcttgatctgaccatgtcttccgctaattgaggtgaaatttgaaccatactagttacctgcccaggaccctacctgcttagggcatcgccactacattggctttcctaggatggtaaaggatctcacagttgtaatccttaaccaactctaaccaacacctttgcctcatattcaaatctttctgagtaaagaaatatttgtgatttttatggtcagtataaatttcacatctctccctgtagagataatgccgccaaatctttaaagaaaacactactgtgacaaattctaggccatgagtcctgtaccgctattcataatatttcaactgacgggaggcataggcaataacctgatcggcatgcatcagtacacacgccaaaccttgtctggatgcatcacaatacaccacaaacttttctttgtcaaaaggtagggctaacactgaacctatgattaatctctgtttcagctcctgaaagcttgcttcacacttgtctgttcatacaaaatgccgattctttttagtgagatccgttaagggtgttgaaattttggaaaacccttctacgaacctacgataataaccagccatacctaagaggcttctaacttctgtcacaattttcggtcctggccaatctctgatggatctatctttcctggatccaccttgatccaatcaattctaacaatgtgcccgagaaggacatcacacttcttgaatttggcatataacttatgctctcgaagtcgttgcagaacaatcggaagaaagtgctcatgctccttttctgattgagagtacacaagg

SEQ ID NO: 264772 - DNA, 643 bp, Cannabis indica
gtgtatattgtgtccacgtggacaatccaacctggcagttaacagctaaatttggacggaagtgttaaattgctaacagtttactggttttgggggtttacccgcagaaatttaggttttgggaatttaatgaaaccaaaacgaaagtattgggggttttgccgccatttacccatgaaaaaactgtcatggtcttatcaattttatctaactattaaatttaatgatctttatttaaagttataataatttaatttaagaaaattacattgtatacccactttattttatttattttaatttttacctttatttctatattctttaagatatatttacacttttatagatgatgtctccattataccccttaagttagtgtaaatcatgtgctacattggcgcgtttaataaattgtaattggaattagaataatcaatgagagaaatgatcggtttaaaatagaatataatcagaaacaatattttattatgctgtttactaaactctccggaaagaaaactagaatcatattattttgtttatataactaggaaaggtaattagaatgctttaatttgacaaaattgtcattattagaacatgtaattattttctgcttatagatttttaaaaagcatat

SEQ ID NO: 264773 - DNA, 983 bp, Cannabis indica
gagttccttcatggtgggctaccaaacacaaaatgcttcttgctaacataggtagtcccacgcctataaaatctcaaaattagtgcataatcactgccttcaattcacctatgattccagacaatactcataaattgtcccacttttgctaatactagatcactcctaaacaaaatattttgttattttaatcaattagatcgatgcctccattaactactcatgtcttatattccccttgggaatatcaataatttaactcatattgtcatctctctaatttgtctaccctgtcaaatgggttaccactaaataacatacatcaacagtccattcagatttcttgatgtctctaactgaatgtacaatgtttaatatcgatatcaattgaaacaacagttgtaatatttcccataaaattctaatttgagtcggccaaaggaccgacgcccgaatccccttgagtcataaccagtacttgggtaggacccacacccttttctcctttaacatcagtatttcttaactacaggtaggttctttttagatgacccactaccccacaataaaataagatctggctctacattggttcaaatggcgcatttttgcatcttgaacactcaagataaggtcaccatttcttattctcacctcgaccgttatcctgaccaccctagaacctttttcttctgtctcatacttggtggttcatttaatttttacaacctgatctactagtaagttggcttcatatattccaccacatctagtggtagaacaggaagtgccggtagtataagaacagacacaagatgagcctattgttctttcagatctcaaatatgtttttcccttgttgtctaatcatatcttgcacagcagaatttacatgtttctaacattatggaaataaagaattctcttccttactgtttatcccttagcccaggtagctccctaatcaaactatttgatttccc

SEQ ID NO: 264774 - DNA, 525 bp, Cannabis indica
tcaaactcaactaacatgcattgataataaattatataataagaaaaagttagttaaagtctatacctatatatgcaagttcaaatacgatcaacacaaaattatgccaaacctataatataaagaaatacaacgaaattataaaattaattatttcagtacctactagttataaaaacaagtaacaagttacttagttactaaattatacatacatatatataatcaattatatcccacactaattcaatgttaaattttttatttttaaactaattaaatccctccaatgtcattaggcacgtttcctaagataatttaagtaacaataatcccctagacgagattactaataaaataagcgtggaatagaagagattccaaatccccccgtgctcctgaacaagtattggtaatcctagtcacaaattctgaaattttctcatatagggttaatctctaattccactttcccatagtataaaattgacattaaaaataaagataatcacataaagctcggaa

SEQ ID NO: 264775 - DNA, 755 bp, Cannabis indica
acccttagctttagactcatcccatttcagttctagctaatacctacacgtacacgtaataactgtgagccgacagactcagtaagaaaagcataatcataaacataaatatatatctagaccgtaactaggtgcccatacacctattcacgatatgataattgggtcaggaatgttcttgacaagtatgactaactacgaatccagcctattctcagtactctagtcgtattgatgtggtagcaactacttcatactatttaggggcctagcatatatatgttgacatctttgtgcaactctatgtacatttcactgataccctgatatgctaatatgatggccagtgatttgcctaacatatatttgttagtacctcggtgcaactatatgtacacctcactggtactttgatatgttattctaacaacaactaacatgcacactaaacatgtatagtgcaaataattctactaatcttacattgattccgaatgcaagtgtgtcggtaactttgagtggaaattgctgctcgatgaattaaggccctaagtcacaatttacgtaaaactggtaagtgatccgctaaattacttttggggtttctaaccttgaaacttaaagtttccctatcgctaaatagcatgactaaatcttacacattgagaaaatttctgaaaaatgggatttcaagaaaagtatcccaaaaaatagtaggccatttctgtgaaaacggtaaggcgtttttatgagtt

SEQ ID NO: 264776 - DNA, 804 bp, Cannabis indica
aataaaaataaaaaaggaaaatttaggacatagattagccaaccattatgagatttgaaagtttaaactatgagaattatcaaatgaaaaaggcttaggtagaagtagaacagaattcttaacacacttcaaatgtgtaatgtagtattcaaacacaatcagacctgtccttgaagcatcagtaattttaaattctcaatcaattaaatttattaagagtgtgttgtaacacttttttgtttttttaattaaattagagaaaatattttcaaaaattatgttataaaattgttttcacttttaaatttaaaaaattagaactaaaatttgaaaaaaaaaaatcgctttcaagtttttttttaaatggattgtttatagtctatttgtattgtctttcatcaatattttggaccccaacccaaccttggacccgacactggacttggactcagattccaaacttgactccggaccaggactcgaccccgaacccaaactcgagccccgcccaacccgtcagactcaaacctacttttctaacaccagtttcttattcctcacttaataaaaacaaaaaacaaaataaaatttacaaaatagacttttgtcttttgtttttaaaattaaaaacaaaaataattatagaacatattttggtttttcaaaaacaaaaattttactttcacatttgtgatttaaaaattacacaataaaagtgttatcaaacgttgttttgaaaaaaattaaaggtgttaatggaataaaaatgatgaagataatcatcataattaccatttgtctttg

SEQ ID NO: 264777 - DNA, 937 bp, Cannabis indica
tttttttattgtaaacgacaggataccatggactaaatatttaactgttgcaaaaaaaaaaaaaaaaagaatttgttcgaacaaaaagaaaattaagtacacgttcgtaatcttcttccttcatttactttaatatgtttctctttttgtactttttttttttcaatttattttatgcaatgaaaaagaatttgatgtgggtatgtggtccacttcattaacgaaaggtttagatatttttcccattttcagattgacgctgacttatcttcaaaatgggttaatcatggcatatcaaaaaagtcaagcacttaataagatttttactattgaatggtcttatcttatatgactcttactcatacacagtgaactgtatgaacatcttaaagggatctatttaaatagagaaaaaagatatgagtttttaactagagatcacacacttgcacctgtgttcctaataaagaagaccaacggctctgtttgaacttggcacaagtcatcaaaatcaatggtttctaacaccacaagggaatctttttagggactttcaaactaatgatcacttctctattctctattaattaatctcttgaagctactaaacctgcaaagaaataaaataaatacataaataaagagccttttgatttttaaatatctagacattaatcatgtagtgaaaaaaaaaaaaaaaacaaatagaacattgaaaaaatataatcatgcctttgcagcagttggttgttggaacatcaactaatcgctcaattgtctgtagttgatcatatggtgctatctgcattacaacatagaaaagtttaaagcttaaatatgaccaaatatgggtattactatagctaattacacgacttttccccacttttgtctttgaaccttattttctactgaaagttgatgtcctaatttgact

SEQ ID NO: 264778 - DNA, 748 bp, Cannabis indica
aatcgattgttgagtgcatggggagcgccaatgtgggcttttagcttagaaaataggatctaggagtggctcagctattaagtcttatttttgtacttattttgtatttttaggagttgtgcttgaaccacctgaagaaagagaaccgaaattgaacttggtcatcaaaaatacaagacacaggcacccatatatcctatctatgcgctaggtctagtgctcatctcacttgggtggggggctaggtgccttttctggttgttttttttttcttttttgagcaaacactgattactagatttggcattacaatccaacgggtgaatattttgtacaatcgatatggttatcaattagcttgttccttagaagatcaaaataactcatcaacttcactgtcaaatgcttcatggtggcaagctttttggaaacaaaacttaccttcaaaagtaaaaatatttgcttggagagtcattaacaattccataccagctgctgctaatctgttcaagaggaaaataattaactcttctgcttgcaacctatgttcgaatgcttgggaatcaattggacatgctattttcagttgtaagcatgctaagtcaatttggagatatttagattttaatcctaattttgctgtagcaagtaggatgaatgatggagattatcttattcaattgtcagcaatacacaccaaatttgatctggaaaaaataatttgcacaatgtggtctatttggtctga

SEQ ID NO: 264779 - DNA, 1867 bp, Cannabis indica
ctagtacatatataaaagagatgatgtgtcgtcctaaaaaactatttagtttttaatatttggatgatttaactttagtgattttttctaaaaaaaaaattcccacatcacttaaaaattattgtaggtttgtagttgtgactatatacatgtcactatttcattcattttgattagtagcaaaactagtatttttaaatgaattgaaccccttattttgtagtactaacctatagacaatttcattcctttgcaagatattcaaattactgatagattacatatggttaattactagaatggattgtgcccaaaaaaagtataaaaaaaaaggtctaagttgcaaaagatcaatgaagagtttaaacatagcccaagcaaccataatatcctagcatatattgttacaatcagaagcagcagaagccaataagatcagtctccactagcgcagcccttacaaccacaatgaacacactctataaccttctcctctctcaggtgtttcggcactcgacaaacacacgtagttgcaaagttatgatctcgaggctgcatgcaccttaagcagcagaggcgttcataaccaggctgcagttcaacaaaaaccattgaagttaatatgcaagctaaataatccaaagaagagcaaagggcttgaaaaacctgcctgcattttaaaaaaggtaaaggaaatgtggacagttttgacattacaaagagaaagatgatcaagtagtgatatcaaaaataagggaaagtccaacaagttttgatttacatcccatgaaattcgtttagtgttattattaaatcttcacacaaacacaaaagaaaaagaaaaaagaaactcatcccaatgtctctttctctacactactctgatatattttaacacaccacatgtaactcataataagaattcagaagttacagtattgtacttctggtcctctagacactctcgtgcaaagacaaggatgtcatctacaattaaacacaaaagcaaagataggcagcaaaattatcatctttttgctctaataattaataattatccaaccaatcattcaacagttgtgtctatatgtgtatatacacatacgtccatgcctatattcttagtctaaccaagtattcaacttacttatcttgatctttttccttgcatcgctctccctacactgtttttaataatcaatatacatatatatatagtactctaaagtctaaattaagttaaataacactaattttttaattataagttacgatcttagcaagagcaaacaatttcatcttcaataaagtatacagtagacgaaccttcttccatttggcaatgagatttcggtcagcatatccttggtcaaggcagaactcaaacaattctttagatatctcctttcgccgatggtaaaggtcaaaaatgtacctgctcttctgatgagcaattttgaatataggccacaaagcctcgcactttctcttgccatcatgaggatcattctcagctgcccagtacaaaatacacaaaatgtgagcttcatcattttcttctcagtactctgaagtttaattcatcaaagttaataaaaacagagaaattaagtacatactaataagaatgtaaggaaaaacaaaataaaaaatctatcaaccttctctcatcttcgcttgtagttcacgaagagtaggttcaatcaattcccacccttctgggtaattaacacggtttgttttgactttaggcattatctgcaaaatcagaagcagaagtgcaaaataaattaacaaaaccccaaacatcatcagcaagcacaatcataacaaaagaatatgacagattctttttctttttgcaaaa

SEQ ID NO: 264780 - DNA, 473 bp, Cannabis indica
tgacacgattaataaatgggttgagtttgtgcttaacattgttgggaatacctatgccttgacacgacatgacacaaacacaactcgtgaacacaaattaccactcttaaatgcctgagtttagcctttcaaccacaagcttgtcgaacactctttcatgtgctactttctttgtctattaagaattatgagagtgttttttttttacaatttaatatcatgatgaaaaggagattaaaagtttttgttttctttttggtgtgattgaagtagtcaagaaggaggaataattgtgtgttaggatatttgaataatgtcttttaggtatgtttggtaagagagaggaggaagatgaaggatgaatagtttaggagagatagagagagtagatgaatgaaaaggagagtagtattcccttatgtagtttggtattttagaaggagaaaatatgatattttgttggaaatatttta

SEQ ID NO: 264781 - DNA, 540 bp, Cannabis indica
gtcaactccaacgcctcaatttcagcaacctcttcttccctaacaagtcgaacagctttagatccattcttcactcccttcttcctgtttgctttagtgatcgattgagctttcccctgagattttgacctcgttttagccatggcaccagcttctcagctgcaagggcaagaaccccgagggaaaacaaactataattatatttattaaatcaattaaacattacacatacacaatgtttcttttaagaaatgaataaaaggatttaaattctataattgatcctaacaaacgagatcattttcaaaatgagaaaatgatgactaagcaaaaaaaactcatcaccaatatcaagattttcaaaatacttcaagtccatatcactaacattttaatatttttcaaggctaagatcaataaagtgatcaacttgactattaaattattattttttttaatggttatttttagtttatgcttgttttttttttaagttttataacttagtattatgttgtttgtttatttcatattagtatt

SEQ ID NO: 264782 - DNA, 592 bp, Cannabis indica
gtatactcaatggaaaaagaaggaccaattgctgctctcgtggcttcggtcatccatgtttgaagtcattcttgcatctgttgcaaatcatacttcgtctcactctctctggcgcgcattagagcaaaaattttctagccaaactaaagctcgattacttaactaaagggccagttctctcatgttcacaaaagcaatctatccatctccgaatatgtggagaaagttcagaccattactgacgctctcactgtggctggtgctccagttcaagatcaagatcttgttcttcaggttctcaatgggttagatggaagaaactacagagcatatgttcttcgtttgttcaaaaaatgcaaactgcctcgtggctcttaaaatttagctgcaatggaggtcttcggcgcaaacagttggagacatagtcaaatggtggttagtgttgctctcatttacaacatttggtgtggtaggaatgacaaatattagagcctaaataatcatactattgagcagatcatacaatgtacaaagagttttgtcaaaggtagagaatagtattattaagaaaattttatttgtttattggggt

SEQ ID NO: 264783 - DNA, 1504 bp, Cannabis indica
cataacaaggaattcataatgaccgtatcttgttcgaaaagctgtctttggaatgtcttcttcccggattctcaattgatgataaccagaccgcagatcgatcttgaaaaaatactgtctataatcaatgcacatccgaagagttctatctttctttttcacaaaagaactggagctcccagggcgacacactagatcaactgaaccctacatccaacatcctctggagttgtatcttcagctctttcagtttcgcgtgagccatacgatagggtgcctttgagacaggttcagcccggggtactaggtcaataacaaaatctatttcccgttgtggtggtaatcctagtaattcctcaggaaatacatctaggaattctttgaccactttgacctcgccaggtccaagtatcacgagtttaccataatcaatcacaactggttaaaatcctacacatccactgcatagtaaatccctagcctttagcgctgaaattcttagtacacgaggaccttgaactgatccgacataaataaaggttcctgattctccagttgagaagttaccatttttcgttcacattcaatattggcagaatatttagatagaatatccgttctaagtataatatcaaactcgaccaaaggtaactcaactaagtcagtacttaattctctaccctcaattctgattggcacggatctaatccatttcttggaaataatcaactctccattaggtaacaaaattccaaaccccatctcaaaaacatcactaggcctaccaagctgactaagtactctcatcgctatatatgagcgtgtagctccagagtcaaataaaacagtataagtaaatccattgataaagagctgacctgtgaccactgaagggttggcggctgtatccacctgagtaataacaaatatctgtgttggagcaggctcagcttctagcttaggttcttctttctttaacaggggacaatctttcttgagatgtctaactgattcacactgaaaacaagctctccggttacacgtccccgagtgatatttcttgcgttggtttaggttcaaatggcatagacctcttagactttaatttttagtttttgaaattttctgtttcacttcttggagtctgtacttttagaagcatgaagttttcttattttttaacatgattcaacttgtcatttatccaagtgtggtaggaagttcttacctgcgagccccctaagagatccaatttcaacagcctgaacctgctgaattttcacttctaccccaaaacctaaaggtaaacatttacacttaggaaaaattttaaatctttggacgtacatacctatatatactatctcctaagtgatcaaagagcctgggcctttggtcacttgcgaaaacataaattcaaaaagattttttatttttctttaacatttatttcttaatgtattaagcataagaattccattcatacatcgccttgagttgtgcc

SEQ ID NO: 264784 - DNA, 2043 bp, Cannabis indica
gttaaaaaaaaaaaagtctgccatttcaaatgttactaaccctcaaaaggaagaaaaaaagttggagaaacgaacaattttattagagagagccaaggaagaattattatttttttcctattattttttttaatttttttttttttttttgttaagaagtataaagctgaaaaaataactttcaaaatagtgaatcagtataaaagttgtttttcttttcatgtcacaatatttttgtaattttaaaaatttgtaaattttttttcttttttttgaagtaaacaagatttgtaatcgaaaagagaacaagaggaaccaggtcacaaataagggtgaaaatcggtcggttatggtcggtttttacaattttataaccgaccggtcggttacagtttttattttacgaaaattgtaaccgaccgtttaaaaattataaccgtagaaaaccgaccgtacagtttttggcagttttttcggtttggcggttttggaaggtttttggcggttttttgatttaaccatttttttatttcaaaaccgttcggccatgtcaaaaaaaccaaaaccgaaactgatcgccaaattcggtgatgacgtggaatcgaaaattcggttacggtcaggtcggtttgatggtcggtttcggtttatcgatttttatgaacacccctagttacaaatatctaaaaaggttggaatgctcatttttccaaacaaactcttcgccagttcctaaagcagcttgggccaggttatgcgccaggatgttattagctcttagggaaaatctgactgaagcaccaataaaagaggacaaagaggagactatttccatgatcaaaccagaacgggttgaacgatctttatgctacttttggattcttgagacaaggttttggctgtctgaaatcataggatgaatgggaaaacaaactgctttacaccaagttaatgctcgacggagggcctctgcttttgcaaaaatagaagggagacctgagtaggctgaagagtagaagccagcaataactctgtcttgagagtcttgaactacgacactatagccgtgtctgttggtctggttccttactgctgcattaacactaactttatacctcccaagagaaggctgcacaggttggcaaaggtgtgatcatgctgagtacttggaggagaagtgatcttagtttgagcatttttgtactcctccaagtaagtaattataaaaggttccacttccaaacctgaacacttgttatctacaaagagaagtttattacgctggttccaaatagcccataaaatactaaaaaaaaaacacaactaaatcatctttgttcaacacaccataacctcttaacaaaacttcattaatgtcacaagatttattattgtgggaaaaagtggagaagctagaatgtttccaatacttacctgccctggaacagtgtaaaagggagtaagtgttagagtcaatttggtttaaacagatggagcaatatgaattatcaaggatttttctcgagaaaagattaagtttagagggaagaagatgatgaaaagctttccaaatgaagtgtttaattttttgggggaatattagaagaccaaaccgacttccaccaagccttcaaagcttcaggattagaagaaccaggataggtgttattagagtttgcaaggtgattagcagagctaactgtgagaatgcccgaaggatcgtgtctccaaatgaggcagtccttattaataggattaatcagaacttgaaggacagagctaacagtggccttatcaaagaaaatgttgagtgttgaccaaaagtcaatcactcatttattttgatgataaacaaatatttgattattatttgttactaatcttttcttgatcattttgcaagcaagttcacaaagtatcaatatttgctcggtaaagtcaaacataatcaaagaaatatattcaacaagtatatcaactacttcataattcataagagcaaaagattcatcaaaggatcaacaactcaagaccctattcaaa

SEQ ID NO: 264785 - DNA, 1345 bp, Cannabis indica
attctattactaatttttttttttaagattcgttcataaattttcaattctaaattttttatttatgtatatataataagaaaaaaaaaatggtccttaaaaaaatagaggccttgtgcaatggcccaagctgcacaatgtttgggccggccctactccagtataaggtttctccttcctattagaaaggttgtggaacaacaaaatttttgaacggccataaaatgatgaggtggagtatatagtcactaatgctctctccatttgcaagcttcttaggcagcacataactattgaagatactacttcccctattcatggcggagatgaggagtcatggagtacttatttcttcattgtaatttggtttactatctttggggctcgttcccctgaggtctcatttcaatgcatgattatagagtaaggatgtaggattgggttaagtttctgtaggtcttaattcgagaggaatcaatgttattaagatttttttgtgcatatccattcttggttgatatgatttggagagctcgtaataataataataataatgtacactaataatttgtttggcataaagtattatattaactttattacaattgttatgcagagtacaccttatctatcctcctttcccctatatcccatgttgtgtctccttagtccccatcaatattgactatgatggggactatgatataagaaatgggagggagggagactatgtgtatggtagttgtgattcgtgatcatttgggttcagctgtgtgggttattgtaaaaaagatttccttttttagatcctcttattagtgaagctaatgcatgtttgcttgcaataatttttttttattgccatttaggttgcttattagtttctatagagatttttatgtaaaattctgttaaaaaatacaacaaaaaaaaaaaacttttttaaagtataaaaataaaaaagaaattaaataacaaatcatatttttactgaaaaaaaaatcttagggaaaactttaactagggatctaatagaacacaaacaatcaaaccaaataaactaaattttatttcttaaaaagatattgacacatcaactccactaaaaaaaatgaccataaataatggccaagcatgttccatcctcaatttttagacattataaattctcatgagaattaattttataagcagattatccaacacttaaaaaaaaaaaacaattagcagatccaacaaaatttcaaatggtcaaaatctttttcaaatcaagcaatttaaatgatgaaaaaagaaatagttgtttatgtaataaaaatataatattaaacaattatataaaaaa

SEQ ID NO: 264786 - DNA, 1152 bp, Cannabis indica
cgctattcatatttcgtcgatgtctcctagagaagacacctccgatagctagaattcacacttttaaaaaaatttggataccacttgtgattcctgagtcgttgtaataccatttagagatgttgcccctactcctcttctatctgagagtacacaaggaaatcattgaatactctattcatgagattcgtaggggccgctagagcttttatcaatccttatgacattaccaaaaactcagaatggctatacttggtccaaaatgcaatttttcgaaatatcttctactcaaattttgagttgatgataactaggtcacaagtaaatctttgaaagtacagacttcccatgaagctaattggtcaaatcatccattctggcaacagatacatattcttaattgttaacttatttagttcgcgcttgtcaatacatatttgaagggaacctttcttctttttaacaacaaaataggagctccccaaggcgatacactgggtcaggtaaatcctaaatcaagcattccctgaagttgtatttttagctccctgagtttcattggagccattctatatggtggtttcaaaacatgttctactccaggtgccaaaacaatcaaaaaatctatttctcgttgtggcggtaatcctggtaactcttcggaaaatatgtcgagaaattctttaacaaccttgactacctcaagctcaaatgtttcaggtctgctggaattaatcacaaccgctaaaaatcctacacttccactgtgtagtaaatctctagccctcaagattgaaataatcgggatccgagacccctaaacagatccaacatgaacaaatagatctttgccctccagctgaaaagttgccattttccacttacattcaaagcttgtcaaaatacttgaacggaaatccaccctaagtatgatatcaaactctgttaatttttagctgtaccaagtcagcactcaacttccaattttccaacctaacaaacattgacataacttgccttttgaggataaccaatttccctaacaggcaataggattccaaaccctctttcatgaagtcacaggcctatccaatagattaattactctcgataccacatacgagtgtatagtcccaaagtcaaatagtacat

SEQ ID NO: 264787 - DNA, 857 bp, Cannabis indica
aaatgcagtgtctttaggtgtctctccaaatgctattccagcttctacttctacacagactgttgcaccaccatctgagccttgtgttaacaatcatcaaatgtagactagagctaagctcttacctctgcctctaataagtccgcactcaaggatccataatggtcacttggaatggatactggaattcaagccttgaaaagaaataagacttggattttggtgtatctacctgacaatagatttccaatagggtgaaaataggtctataggattaaagagaatccaaatgggtccattagtcaatataaggccagattagttgctaaaggatttcaccaacaagctggttttaattttagtgaaacttccagtccagttgtaaagcctattaccatcagaattgtgctcactttagcagtaacaaaagggtggatagtgaggcaattagatgttagcaatgcctttttgaatggggatcttcaaagagaaatttacatgacaaacctactagttttgttgatcataacatcccactaatcatatttctgcaatgatccatcaaataaatgagaactcgacaatgaaataaatcagtcatcttcttttgaccaagaagagacttttgaaacttggtctcaagattcaaatactagtgaagatgacataccgccttattttatggcccaatttgcaaaagaatcatattccaaccgagcctattgtcaaaagtgaagacaaaagtgaggaagaacaagcagctacaataaaactagaatccaatcatcatcaaaagagaatattcaaaatttcaaaattttactgttgatgacattcttattggaaattattttacc

SEQ ID NO: 264788 - DNA, 3171 bp, Cannabis indica
tttcatccaggaattgggattgtcttttttgtagaaatgtcgcaatctggttcagaagtttattctctagaatttttagaaattaaatatcctaaacaattagccttcccatataaacttagaaatttccaacctcggtccaaattggaagtgaatgatgccaaaattagagaccatctgattaagtcgaacagagaagagactgccagtcgttataggcgattcctgcaagagattttcgagggcaatcattgttttttatgggacacagcctggcctgaacccacaatattaacttctattccactcgggagaccaatgtttttacccaaagtcactgttgcttttgaaccaggtgacctaaagtttgacattatgtctcctaagcctcgcaaatcaaagaccccacaggatcccagtgttactttcaaggccgagcttatgaaatccaaagttaggtcgattggggcctatgttggcagtttcttaaagttctgctgcatcaagcagaggaagggctatgtcataaggtccgtggcacctaaggaattcaactattttcctccaaaaaagggtaataggcgaggagtgcagtgggcctagcacgagtaattcctcaggcattggagcctggagccttgaacatatcaaggttgggacagtcctttccctaagagattactttaaggagttctgctactatctcggggttgccccattccaactgaaccccatttcgtataggatccttgtgagcctgaaggtcctatgccatatcttagaatgggagtgccctactcctttagagatagcctgcttttactcagtgaaagcagtcatagtgaggaagaatgctgcgggaggcttctactatcttgggacttacactggtgattgaaagatcatagttaggttgccaaacaagacagattttaaagaagatttattctagatgacgggcctctctccaataaatacaaccacctttggcattatacgtaagttcatttccttagaaacttaactttaatttttacccttaaaggtcgcttactaaacttttgtctatttacagcggttcctcagagaccagttcctactcctgagatagccgagcgccacagaattctgttaagtcttccatacgggctatgagcagcagacttctgattaaatgagaagaatctgaagaacgttggccttcttgcctcaaacaaatttacttgtgattacaaaatacccaagtattctttgtggtaaaaggttctgtctccaaccgaggaggaaatcgaagactttgtggctcacgcacactatcatgagagagctgcccctcgggaagaaggagcatcccgaggtaatcaatgtggatggtcacccacaatgcttagggtggaatgtaacaccttagcatctttctgagatagtcgatataacttttacacttcgaaccccttcctcatatgtcgcataactcattggtttgatagttggtacccgaagtttcacgtttagactagttgtactagttcttattatgggattgtcgagcagtacgggaccatgttggataggtcgggtcacatagattcaagctgggatttagatccactgaacccttataatatatttatgatcacgggatctaggaagtttagtgaatattatagtcctccctcatcatcttctaacgattatggtaaccttctcaagtgggagactttcccattttcacctatttattttgtttaagtgctaatgaactcctcttgcctcgcagatatggatgtggattgggagaacatcttcaagagtcctcccccagccgaaaagaagtctaagaagagaattgcctaagctggtgaggcctcgggttctgccaaagaacccaaaaggactaaaaccatgaccaacaagaagaagtcctcgagccagctaagtctctcgagaaagagaatgaggtctctactgcgggggttgtcgacgagccacccactgggttagtgcaccgggtgaaattctctagttctcgtccagagatggttctcctcgagccctcctatcccctacccctcaaagttgggactgaagggtcacaactcagctcgtagcatgctaccaacagttggcgcaacctcttaactcttgggtccagcgactgggatcttactatgcgaggtagctctgaggatctggctaaaaggagcgaacttttgcatcaggttaattcccctttcctcttgttctcacttttcatcattttaccgtttttactatctttgatttgtcttctcctcgcaggcttctttcctctcccatgtcacacatcatcagtcgtctaacgggttgaaatgctcgagactgagcttcactagtctgggagcatagggataccttagccaaaaagtggaacgactttgtggcctaggtctctcacacaaaggaggaggccaaaaagtagcatcaggccgactgaaagaagatcaaagaacttgaggattccctcaagtccttccaagctgatcacgagaagaaactcaaggagttggaagctgaaactaaagatagggttaacagcatcagttggaggaccatctatcaaatctggtcagccaaccttgatttggaattcagtttcttgggtgataatgctgaagccatgcttgccttctgcgagaagactcagagaaaagaactatgcaaggaataagagattgaagtagaacaagaatatccaaccaagtctcctacaatgtaggcttggtttttaagttggttttttgttttcatttaggaaaatggccatatggcccagacaatggttccccctttgtggctcttttcttttataaagacaaatttgcatcgttggatgaccaactttgcttttattttatttattgccacatattttgcattcgaacttaatatatttgcttacttgtgttttttctcacaatttaaacaattatactttgatcaaattttaaaatactttttccgttgctcttattttcctttgatattatttaagtagttagtaatttactatgtgcgcgagcagttattatctgctatgcttttgatttgcaagcagttatcagttctgcttcgcgtaaatagttatgatctgttttagacaaactttaacatacttttaataattcatct

SEQ ID NO: 264789 - DNA, 1032 bp, Cannabis indica
gagtggaaacgcagctcgacgctttacagggcgctaaaccatatcattcagaatccgatgagagacacgctaaaacacttgtcggggatttaaaatcaaaactaagaataaccctatcaataaaaaggatgctaataccctaaattacgtaaaaagggaaaaactagggctcgggaaaaagccctaaccggcagaccggttcccaaccggaaccccagttcctaggtaccaactggtcgaccggttctaatggtcccccaaaatcggtcgaccggttatgtgctgggaaccttaaaaccgatccctagatttcaaaacaagcccaaactttccaataacctccagaacacctgcacataccataatgaaccaaaaccaagcaataaaactcaataacaaactcagaaaaacaaatcaccattggagcccaaagcttgagctccaaaactccaatctcaaccaaacaccacaacaacccatcaaaacaattctaacaacttaaataactctatcccaacttcagaattcataagctagaaagctatacatttcacagcccctaaacttacaaaaaaatcaaaactacaacataacctatgctaaggaaaatcaaaggggagaaggctaaagaattataccttaatcaagatacctttttcttgctgaaatcactccaattgcagcaaactgatccccttttcttgctgattcttggagaatcgaaagaaagaaaggaaggaaaaagagaggtatgggaaaaaaatgatgaattcttctaggttattcttaacctttctaacattagtttataaaaatcattttattaaattaataatcagcctaggttgatcacaaaagacaaaagtagggttttctaacattatgaccattttactcctaaataactcaaatattcaaaatcatccaaggataaattagacgttttgcaaatctcgaccaattcacaacacctctaatacccaataataacaccccgatacaaatattctaaacatataaacgcgactctct

SEQ ID NO: 264790 - DNA, 3622 bp, Cannabis indica
cgttgtctgtggaaataatttgagcaaaaagttgaggactgggctacaatctagaatgggatctaagaaagcgtcgcaaaatgtgtagaaaattgtagtttcaaatgaaggagatatgtcaatctagatcattattcttatcgctgcagtggcagtataaataaaagagataaaccaaagaatgactatgcaggacaaacttaacgaggaactacgacgtctcacggaagagaagctttgataagaacatcacattgttgaagaaagacatcaagatgaacaagacaaaaatcattagcatcattaagatgccacttagtgtttgcagaagtttatgcaagaaatggcataggcgtacaaagatgaacaacactcaaacatcacaagacattggggaaacaagatatatagatccatttgtgggaatcatttgaacaaaaagttgaggactaggctacagtctagaatgggatctatgaaagtgttggagaatgcgcagaaaactgtagtttttaatgaaagagatatgtcaagatggatcactattcttatcgttactctggcagtggaaatgaaagagataaaccaaagaatgactatgcagaatagacataacaagcaagtacgacgtctcatagaagagaagttttgacaagaacatccccttgttgaagaaagacatcaacatgaccaagaaaaattattgtcatcatcaagacgccacttagtgtatgcagaagtttatgcaagaaatggcaaatgcatgcaaagatgaataaaactcaaacatcacaagacgctgaggaaacaagatatacagatcctctgagaagcgaggaaaggttttaagagcaactgcagtagccaaaatctcctataatatgggagaagaaaggagaaaccaaccaaaaacatttgaaaatagaaaaaaaaaaatttgctcgaggagaaaaggataaccactacaaaaaatggaaaatctacgtccttacaaatatccaaaaatattgttggcgcaaagcgaacactttaaaaacaatttcaccaaatgtatggtaataaaaaaaaaggaggtagagtgtgatctcaagcaaaatagaataacaaagaagtttccattaattacaatccaatctcgatattctgaacttgggggatctaaagatgacaattgttataatgaaaataaaagataatgaaggaagtcatggataaaattggagaaggcgagctaaacaacccaaatagagcgacattggaaacttagcaaaatctccattcacaagatgaatcgtagaagattcgaagcttaaagacttcaaaatgctaacctttgcattattcgatagagtatgcgatccattagaacatgtgcttcaatttgaacacaaaattgcattcgagacaaataatccagcaatcaagtacaaggccttctccaaaactttatggttcaaagaatagaaggattgattgattaattcattcaatgaactggtgtagcacttcactacacaatttgaaagaaatgccagaagcaaaaaataaaggaagaacctctaccatatagaatagaaggaaggggaacatccccaccagtccttacaaaggttcatgacataatgtaccaagtgagcgaggtaactccaaaagacgcgacaagctatttcaccaagaacttgttgttcgctgttaagggaacaactcatactttcaaagctaaaaacaattacagaagtaatagagagaggtgaaggagtctttgagctaatggaaaagcgagatgaagaacaaaaaagaacaaaaaaatggggaaagctagaaaataagaagaaaagaaaggagagttgctctgatctcaagttttcctgaaggtcatcctcctccatgaacaagggaaaaacgctatagaagctctaacatgaggccagaatataatcaaaggggatatgttgagaagaggtcaagaattgagccagattttaatgtcaagctcaatgcaacacatactcagatctttcgtaaaaatcaagacaaacaaatatagaaagagccttacaggattgttgtgccaattgagagaatggttagacaaaacattttgccttccataatgatgtaggctatcacacaaatgattcaaggtcactaatcaaatagatacaatcaataatcaaggcaggaggtctccaacaatattaaaaaaagagtcagggaagatgagttgaagaaccttatactgaagaaaaaactgaagggcaaataaggcaaataatgtgggaagagcatgcgtcatcttaagcgaaagcgacagtaatgatgcagatccccatgattctagggaatacggagccaaccattcaccacgaaaatatcactcgacaagagaagtgaattgtagaaagagtaaagaggatctaagctcagcagtacaaggtcaactacattcttttggaagagaatattttccaactctgccaatcacttttatagaaaatcacctttgaggagtgaagttatcgcatgatgatgatttggtgatccaactacaaatttcagattatattttagacaaaatcttaatacatggaaggatcaacatagatatactattctataaggcacttatcaatatggggatagatgagacattgccagtactctccattaagaataactaggtctaccccatgggagcaattaaactcaatgtaagagtcgtagggagaacttttagagtggatttcattgtgattaaagaggtatctagatataatgcaatcatggtgagaggattgctacacaggatgcaaggggtggcctctatgttgcatcagatcttcaatgtccatcgtctaatggagtgcacataaacatcaagggatgtcaaaaactagcaaaaagttgatgcatgctgatgaggaatgtcaatggagtgatatgggaaattgcggctaaagagaataaatagcaaacaaagggcctcttacaaccatatctaaggcacctagagggggaataagaaaggataaataacaaacaaatggacccttacaaccatatctaaggcacctggaagggggaagaagaatggagtgcaagagatatcacagaggatgagctggaagaaatcccacttgatttgtcaatgtcatgaaaatagttctagtgagggtgttaatcctaaaaattagcaaggctaatccttgagattacccgaccattaacctgaagactagaagagacaccttaaaagaggtaccccacatgtgtgatctcggatggccacatatgtgtcccgacatgccctgagaaaagttactcagccttggcatgaggaaggccactcagaaatggcatgaggaaagtcactcggccatggcttaaggaaggtgactcgaccacggcatagggaaggtcacttggtcttggcttgaggaaggtcacttggccatggcttaaggaaggtcactcagccttggcttgaggatggtcactcgaccatgatttgaaggtcacttggccatggcatgaaaaaggccacttggtcttggcttgagaaaggttactcgaccatggcatggggaaagtcactcaatcaagtgttgagaaaagtcactcg

SEQ ID NO: 264791 - DNA, 1155 bp, Cannabis indica
agacccattttcaacaatgtgtctatgcttgcgctcagctttaccattttgagtggaagtgtgagggcatgaatgttgaaattcaacgccttgatcttgaactagagtggtgaagggttggtattcaccaccccaatttgtcctgagacatttaatctttttgtcaaacttgtttccctccaagtttttgaattgaatgaaagcacttagtgctttagatttgaacttgagtggatatagctaggcgtgttcgcggtgcgggtggtgcggtttttaactatttttttcaaaccaacccgcacatgcagtttttcaaatttcccaaaccgcacccgcaccgcgaaattaaaaacccgcaaaaactgcaccgtaaaaaatagtcaccgtaaaaaatagtagcggtgcagtttatacggttttgcggtttagactattactaaataattaaactatcacaaatacaacaaagtttgagcagcacttatcaaaaatatcataagtcttgaaaataaatatgaaaaaaaagtttcaagtttcaacaatacaataattagtgggcttagattaggtcttcacatattgaacctaaataaatataaaaattggtctttttataatatgcagtgcggtgcagtttgaaccgcatattaataatcaaaaccgcaaaccgcaccgcaccgcatggtttaggaaaaatttaaaccgcgaccgctcagcaaagaatttcaaaccgtattttgttcgcgctgtggtgcggtactggcggtttaagcggtttgagcggtttgatgaacacccctataaataagtatttaaaaataaattataaataaaaaatgaaaacaactttaaaaaaaaaattgtttttttagtaataaagaaaaccaaattcatttcaccataaccctaaattttatctccgtcaccattcagcctccctcaccctctttctcttccccatctctactacaccagcacaacaaccaccacccgccaccattgagggaaacgagacttgctcctcaccaccaaccatcaagactacaaaccccttcctctctggctcacccgcaactcaaactaagtccactcgcttgatgttaagtcagatatgaaacccccgactcgccaagtgatctctggccggtgaaattg

SEQ ID NO: 264792 - DNA, 1010 bp, Cannabis indica
tacaaaccaacacgagtattttccagcaatgctttttcctcactcgcacactccttggggtaacttcccaagagatcactcatctcgtgattactccaagtcaagcacgcttaactttggagttctaaatgacaccagaaaataagaatgcaccttgttaatatagctagttacctatcaatccatttaagtcatcttcacatgtgtagtctcatacctacacagtcttgagatcatcacacttgacctttccctagcgatgtgggatgcacaacttatatggcatttccctttatggatcacgggactactgacattcacaaaaccctaaagttctttatatagaaaactaactagagtcccataagccctaattaggtttactattgggtattagacattacaaagtccatacaaataagacttttattttattcatttaattaggaggttcttactttctaacttttttacttttttactatagggcataatttttttcaaaaatactgtgtattgtgttaagttttcactgttgttctactgttgttttttttttttttttgttattccaatgttgttttaattattctattttgttgtttcacggtagttttataaaaagatagtatttttgtaaaacattccgtgtgacagttaaatttataaactttggcccaaaatttagtatttttgtaaatttagatcacttatttagccaaatttagaatattagctcaaataatttttcttaatttgtaagcttacatgttcggttattaaaaagagaaatgtaagtaaatgaccatatttctagctctatagatagttaatgtctattttttaaaataataaagcaaatgtccttttttactttttaatacctaaaatacccttcattatataaaaggtattatatgttttattcctttaatagaaattatgaaaaacaataaattaaaatatctctactgaatttttgtcaactatatattcttttagattttgct

SEQ ID NO: 264793 - DNA, 578 bp, Cannabis indica
cgttaggtcccctaccaacgttatacaaattggctccatttcgttggacgcgcctgaaccttccattttcatgattttttgccaagtttttttcaaagagcgtggctaaaggggttgtacatttgtctgcattttcgagacgatcatcgaaccaatactgcagtgtgaacctaataaatgcaaccaaagtagttattagatatttcctgaactcttctgtcacattgttgaagctttcggcaacgttgctggtcatgatgttgtatcgatctcccaaacaataagggtgagcccacttctcaaaccctatagtctccacatatgcagcaatggcaggattcatctttctaagcttctcaaactgtctatcacattcagttttcgaccatgagtaagcaacattatatatttggttgtgaaaagcatcagtcttgaacttggagttcatgttcataataatgtggtgatagcatgcatagtggattgctctggggaaaacaagttcaatagcatgatcaatctttgatggctatctgacacaaacactaagttctcaaccactccaattgctaccctca

SEQ ID NO: 264794 - DNA, 2306 bp, Cannabis indica
ttcacggcaggaggagaggggaatttttgaatgtggacatggcatagtttggaagggccaaagcaactgagtttatgtacaccaatcttccggccttggacaagactttagtttccaaccttcaagtctctccaccagtttagatttaagaaaatgaaattctttccttttactccagccaaagataaagggattacccaggtacttgtccgagtcaggtatcacgctcatgtccaacttgttttcaatggcttccctgagcaaatttgaataattgcccgagaaaaggattccagatttctgtttgctacacttctgcccagaccactcttcaaatttttggatgcaatcattcaaagtctctatgtcccagagattagctcgggagaatatgatggtatcgtccgcaaacataagatgagatatagctggaacattgcgagccaccttgataccatgtaacaaacctctgtcttgttcgaaagagagaagccgagagagcacttcgttacagagaagaaaaagatacggggacatggggtctccttgtcaaataccccgttccggcttgaagcgtttcaaaggcttcccattgagaagtatggaataagacactgttgtcacacaacacatcaccaagttgatgaagtgagtagagaaaccgaatctttccatgacagccttcaaaaacccccattccaagcggtcatacgctttgttcatgtccattttaatggctaaaagacctcctttccctttctttttcttgataacattcactacctcctgagtaagcaaagttgactcggcaatccaccttccggggaggaaggccgattgagtaggagcaatgagatgatcaagaaccactttcaaacgatgcgccataatgcaagctataatcttgtaaacaaaattacatagggcaataggccgaaatcgctccacgcaatccggattgattcctttcgggataaggcaaatgaaagagtgattaagacccggatccaaagttcccgaagcaaagaaacgctgaatgctcttgactacatcatctctaacgaactgccagcatttacgatagaagcaacccgaaaggccatccgggccaggcgccttgagaggatgcataaggaaaacatgggatctaatttcatccttatcagggatcaccgtaagaaaattgttctcattgtgagaaatagaattgcttatcaaaacatccagaccatcataagaaacctgacctttggaggagaagaggtcaataaaatactcattcaggatcgaaccaatctccttcaaattcgaacataaaattccattggcatttttcagattccatatttgatttctctttctccgaaccatggtggacgcatgaaagaaggaagagtttctatcgcctttggacaaccataattctctggagcgttgcttccacatagactctttacgtctccataactcgctcaaatttttaagaatatcctcctcagccacctcgtccactttatgaacctctttggattgaagagtttggagctccaattctagttccttaatcttattttcacagtccccgaacacattcttgctccaccaacgaagagcactttgagttctattgatacttttcccaatactccccctgtcattctctttgttacccctacaccaagcctccctgataacttcccagcaagaagggtcctcaaaccaagcttcgaaaaaccgaaaaggtctgaaacctttagtcttacacatgatagagtcaaaaatcatcgccccatggtcagaggaagtgatcggcaaattgcgaacccccccccctctgggcacgcagttaaccaattggtatccactatcacacgatcaagtctttccttcactaacccgccattcttgcgtttgttacactgcgcttaggtgaggtttttctatagtttatttttgtcaattattattttatttttcttataaactttgcttattagtatattggtaatactagagtaaatcacatgagcttatatttagatatgacgattgatgatcttagcttcaataagtgaatctataccataatatgttcttgtttaaacatattttattttaatattttttaaatataattaatgatagtatgatatgtgattataactcacatattttaacagggattacgtatgtggcacgtagtactccacactaatatatatatataaatatatatatattagtagtttagttttgtttttgaaaataatgtttaaagtttttctttatgttttttggttttctct

SEQ ID NO: 264795 - DNA, 538 bp, Cannabis indica
aaacaaaggcacttggcgtcatcacttactcatgccacttgcatcatctggttgtatttgattggttgcatttgcgaaccttatcgtttaaatgatttcttaggccattcccttggcgtgtcaccttttctcctttggctttctcatattggcatcaagacgccttcagagatctatggtagaccaactatctttagagagtatttcttccacctcatcgtcctagttaacaaaatcaatagggtggctttttcatccttaggctttgatactttagtactacgccttttgtgtggcacaaccttgcctagtggagcagaaggacgtccaagcctggaggcgttggtggtcttctacgtccataagggctggttggccacgttcacatttttcctaagaggtaatggggcagtttttgtctgaggctcatccacctttggcttcctcttgtccttcgaaggaactgaggttccaaagttggtcgggtttactctattttctccatcaataagtccctctgaaccatcttccttagagt

SEQ ID NO: 264796 - DNA, 892 bp, Cannabis indica
gctccaagaacttgagtgtgagagactccattgtatgaactgctcaattcatcattgtttggtaaaggggaaaaagtgagaggaaagaaacctttgcagagaaaagtgaagagaaaggaaaaacaaagaaaatggatgtttggtatgagagaaaagagaatggaaaaaattgactaaatctcaccaaaatcataataaaaatgaaaggaaatctttttcaaattaatgagaagactaaattactaatatattcttactcacaaaagtcatagaaaaattgaagaactttcttttccctcttagaaattttctttccctccattttttttttccttttctaccaaacataatgtaaccattaaatggaagttcaaagacagcttaggcccttcttggccgaacctctataaattctgttgttcatttcgggtttaagttatttcgaaaaaatgaaaaaacaaacaaacacttacacaggggagtcaggggagacattagccatcttcttctgctcatctaaccacctaacaatacacataacaaaatagaaagaaaaacaaaacaaaatgagagcaacaaacaaaaatcaacaacagcaaaatcgattacctttttacttactcagaccatgcagacacatcaaaagttctcagctgccatagcctcttcctgttaggaatagtaacttcattttcattgctctcttcaaactcaaaactaggcacattcccgtcgctacaaaatggcacaacgagcactccacgttccaaaagcccttcggtgaaaggctggctcagtctaaaagactcagtgagataagactcgggtccagcacatatcacaagcctagcaatgcctctcaatgagcttagaggaatcactctcttctcgt

SEQ ID NO: 264797 - DNA, 281 bp, Cannabis indica
atattgtggaagattgtgaagaatccaaacaacaagaaggagaatcagcatcaaaggaaggagagaaagagatccaggtttagatcttggtgatgctcattaggatgttaatgaaacatacgtggtagtaaatctagatcctggtaaaatatttccaacactcttccccacttccttcagcatgttcacacccctctttattcattgcagcaggttttcttctgattcagcactctttacagccttttgattcttagtggcagcacacttttcttccaaac

SEQ ID NO: 264798 - DNA, 1602 bp, Cannabis indica
gagcagcgtcggccctaggcatagacaagctaagcttgtgcttaggactcacacttttcgggggcctaaaataaaaaatgaaagactttattagatttttatttaagtaaaattaagtatattgtaaacaaaaatattattaacttggttagttggggtgtatgacacattacacaatagttcgagttacatgacactcttttcttatatttttttcatatattttcaagtgagggccttaaaatttaaatctccttaagcccatatattctcaggaccgaccttaatgaaaataaagctttttttacaggtggagaaggcaattcaggaactggaaatggaaggtcgaaaaccggctgcagtctttgtaacttctcctacttatcatggaatatgcagtaacataagtgagatttctcaactgtgccattctcatggtattcctctaattgtggatgaagcacacggggctcatctcgggtttcatccacaaatgcccaaatcagctcttcaacaaggagctgatttggcggttcaatcaacacacaaagttctttgctctatgacacaatcatcaatgctacacatgtctggaaatcttgtagataaagaaactatctctagatgccttagagtgcttcaaaccactagtccaaattatcttctcatggcatcattagatgcagctagacaccaacttactcaaaacccgaaagccttatttgacaaagcaatgcaaatagctttcgaggccaaaaattcgataagaaaaatacccgaaatttccatattgaatcatcaaacattcccaaaattcccatctatggatccatttaggctcaccattggttttaaacaactaaacatgtctggttatgaggcagatgaaatattgtacagagataatctcattatctctgagcttgttggaaccaaatcaattacttatgcatttaatcttggaacttgtgaagaacatgttgagagattagtatttggcctaaagaagatagtgtcatcatcatcatcatcatcatcatcatcatcacctatgagccatggtgtgtgtgcaccttttgctgattttacaacaagtttgattccaagagaggccttttttagaaagaagagaaaagtaagcattgaaaagtgcattggggaagtttgtggagagcttatatgtccattcccaccagggattccagtgttgatacctggtgagactattacacaaaaagctttggattatgttttagatgttagaagcaaaggtgctatcattagtggggcttcagatccacaactcttttccatacttgtttgttattgacagttatgttagttaatttagttctttgtgtgtttataactataacatagactcttaattcataagagtcatgttatacacaaataataagagaaattttgtgtgagctagaaagagttagtagctcacacaaagatatgtattgtttttcgaaaaattgattgaacctcgtcatatcatgtattgttttgtttgggtttttgttttttagttttcttagtttggtgttgtaatgtgtagaacacacatggccggctttaggtataagcggg

SEQ ID NO: 264799 - DNA, 2115 bp, Cannabis indica
atccgatccaaaaaatattaggtctaaaatattagataaaccctaattaaacaaataaacatatatgaaatacatccaatggatagaaccgatccaatctaacatccaatggatgttggatcgattggatgacgaaattaattggatcagatcggatggtaaaatctaacatccaatatatgattggatcgaatctggataggcctaaaaatattggatgtgatccaatgaacacccctaggtggcataatagaatcttccattttatattgcatttaattcgagattcttttttttttggccacaaggaatggtgattccacccaatcaaaacaagctctctttttaatgtattgactatatatttccaatgtaatgtttgaatagttctaatttttttttcgaaattaaaaaggttattcaattctttatgatatataatccaatttattattttcaatattacatgcaattattcatatttacatagatgaacaagaaaaaatatcataccaccactattgttgaaatatctaacccagggtcgaaagtttgaagaaagaaaaaatccaccaacaaataaacgttttgagagctcgattattggagaagaaaattgaacccgccatagaagaagacgattagaagtagagaaggagagatggatgcttgtggttgatcatattattagttatattaaactaaaagtatacatgcgtattgattaaaaggattcatatacgctacatatagtataattaaaaaaaataagggttttattcttaaaataaatatagctacaggaagttgtctttttctctagctagtaagagattcaatttttattattaattgcgattactcttatctctataacatggtacttttgagtgctttattgttgtctctctcacacggttttaatattttagtattgtctgtgtaacatgattttgttttgtttctttatttcgatgactcgtcatcaaatcgctattagttgttgagaataacaagtttttcgtgactgaaacaactattagtagttcagttacgcaccttgcacaatagtagagtgctcaagttataaggttgaatgaatctgctgcaacaattttactgtcgtgtcttttgagcgctagataaaactggatataggttttcttaatgttaatgatgcttcagtcttttttatctgattttatttttagtatttttatcaaattattaagcgattatttgactcgtttttttaatctaattctaatcgtgtctccaaagagagacttattagttaattactattaacaaaattgcatggtttattaaaaaaataaaaaggtattaattagtttaaaaataattaataatcttcacaaataatatatataattaagtggaatccgctcacacgtcctaataaaatgatattagttacaaaattattagtggagcttacattaatacatatttgcttatattatacattcttcacaattcacatacttttttgtaagtatatattagtatattatcaaccaaattaagtaaaaattattaacttattagaaataattaattaatgtttataatatattgcatatatttttgacagtatatatcttactaaattaataagtttttttagcataaagtaaattatgtatctaattttagtaatttagtgggctacaaaaagctaaaagaaaagaaaatagtacaaaaatataaataaacaaataaaaataaagacgataagttagtgagcatatctaaattatgttcggtaagcacgttagcagatcagtgggttttcttcttttagaaaaaaaaaaaatatataatataataaatataaatatattgataggtcaccaatgacatcaaggcagaagtacattacattaacacatattattaattattatattttatattttttgaaatagcactaaataatattttgaattaatttttactaaaataaaatttaataataaatcgatttagaaatattattataaatttggttatatatatatttttttttcatctgttcgtgttaatttttttttttaagttagttatattaaaaaaaaaaattgagctcgtggt

SEQ ID NO: 264800 - DNA, 1041 bp, Cannabis indica
acaagttacaataaagtataaaaatttactataaactataaagtcattagtaaatccagtgtagttgttgttgttgtgtttttttgttgaatattttgatgtagaacatgttgacctcagaaattaaccaatcgacaacggaatcgtattaatctaatacttgccacgtgttccacaattagaactagaaagtaaatgaatacaaggattttatagaggttcgaccccctttgttagcggataatgatctactcctttttcagttgtattgataccgagagagaacactattcatatcactataggtgggatctgatatagctctcataaggttacaaaataggaatcaaagatgacaaatctcaagtgttgagagatattatagtgggcatgtgagagagaatatactatccgacttacagctttaatgaggcttagttatgacttaatgacttagggtttttagggttgagttaaggctctttatataggagagcttaaatcctaataagtagatatttacatagtaaattggtaaaatacaaataactaaaatgccccttaaataggtattttctgtctatttttgtgggttgttaaggcccaattcacattctagattgcactccacgtcaggaccggtcctaaggtatatggggcctaaggcgaaatcaaatgttgggcccctatatatatagtttaactattataaaaatgatagttctagtgcttagtgtaatggtaaaatttttaaaaactcttaagagctccaaggttcaatcctccataactacacattaaatatttttttaaaaaaattaaaaatagaggttgggaattgaacccataatctcttagtttaaaataaaccttttaccactacaccaccaaacaatttttattatgttatcttcttatttaatattttatctacatattaatattttttttccacaatttcagggccctgggcgtttgggccataaaattgtcatttaatatatttattaattatacttaataaagtctcttaattaataa

SEQ ID NO: 264801 - DNA, 1549 bp, Cannabis indica
aaaatagttagtataggcgagaaagaatcaaatgaatttattaaaaaaaaagtgtaaacttacaactcagtcaagttcttcaaatttttgacaaaatcaagggaactgctcccatttgataaatccccaatctttctacaatataagtgaaaaacatatattaacctactcttgtccaaagcagaattatacatgtacagaaatcaagagaactttggaaattttatatactcacatagatgtcaacgaggtcaattgagaaaaactagatggtatgggaccttgaagagagttccctacaaatgtcctacaataacatttaagaggtttaaaacttaagaactcatcagaaaaatgatggttaacattaacagtgttgataactttataaataaaccagcaattttaatacttacaaattagttagacgtgtccagtttcctatgaagtctggtatcttcccagagagaggagtatctagtgtatttctggaattcagcaagtaacaatagtaagtttgagccaaataaaagtaggtgcataagagatttcaatatcttatccttacaagatttgcatattttttaggttggcgaatgtggggggaaattcaccacttattccagaactgtctatgtaactacaaaaaaaaaacatttagtatcataataacaagataagcatagagtaattgagttaggatgtagtttaggagtcaaaagtacttctcaagttctcaaccctctagtttattattatagaacctttcagttgtttcattatacagaaaattaacactaagttcaaaagcaattatttaaacaaggagaaaattgcagaaagtgaatagattggcatttatcttaaaataagaaaagggacttacatttgctcgagtttcaataaattaccaatttctgcgggaagtggtccagaaaaattatttgaccccaaggcactgcaaagcataggaaaaatgggaataaatatttgaaagcaatcacttgcacttgcattgacacagtcttgagtaattttgacaatataattgccaacaatgcattattaacaaacaatatgcaaaccacaatttgcaagagcgtctcagtgttttgacagcatagagtttcaacacaatttggaaataaggtagataaaaagcacctacgatcctccaaaaataacttttaagttcactttccttacagttagcctgaacataccagatatacagaagaacttgctaatagcatttcctccatatctcttatcaaaattgaaagttaaatttatcttaacagattaaaagattttcaaaattcagccccaaacaaagagttgatgttacatcaggtttgatagcttacagcatatttagattcttcaggttgccaagctcctttggtaccgccccatgaaatgtgttgtggccaacatctctgcacaagaatatagtcagatatttctaaagttttacacaaaattgtaagaaattattaaaaaaaaatctcaaattaactttgtagaactactaagaaaagttataact

SEQ ID NO: 264802 - DNA, 5629 bp, Cannabis indica
ttttttttaaatttgttcaaattgtttgtgccactaatatggtaatgagttatattaaaaaaatagtattattttatgaatgtgtatatataatacgtaaatgcatcaaattataataaaataaataataaataattgagactttaaataaaaaaatataagtaaacttagattaataaaattgtatattaaatatgtacaaaaataatatatattacatataatatatatgttcggtcggttctcggtttaatcggtcggtttgcgattgacactaaaaccgaccatgttaaggcggttttaaccgaaatcggttttttcggtgtcgattttttcggtgttcggacggtcggtttactcgatttggtcggtttcttggattttttgctcacccctaataaacactattattgaatgaaaactaaccaatggttaagaattcattgaaccaacactttagaaaacgaatcgaaggcagccacaagtgcaagaaccgatgccacccccaccgcgaactgtagacgccacccctcctaaataacttagcctcttgggtgcgctccaacacacatacttgctagtggcacttcattttataagcacattatttttttttattattattctcattttaagttttagtgaatattaataacgagcttcaaagtatctgagcctcttgactgagtttcaacgtaaccggtatgtttaaattgaatattaatactgtgattagtaatgtaagaggtaagttgggatttgggcagtggtcaaagatgataaggaggcaaatcaaggtgtttgaagaccaatgagataatatttaaacttaagtatggatatttataaaaaaaaaaaaagaaattgatttttttgagagtgattgcttgaatgttattttggtcatttagtaaaatcacaattgttttgtaaatgacattatttattagagatattcaatattttatgcatctttatcatattggttcatgtcactttatttttcgcaacatgagagaaataaaattatcaattacttagcaaaacttagtctactcattaattttccagtcaattaaccaatggcgtaattaatgattccattactcattttatcgacgagaatatttgattttagttcataaaatttcttttttttttcaaaaaaaaaactaaaataaaaaaaaaatcgtccctttaaaaaaattgctctagttggcttttgctcatttctttagctaagttagctatctctctaaatgattctagagtttggtagtttaattttccgccgaatttactttagttatttaatgaaattatttttctattgatctctaaatctctttgactttgtgccttatcaaaattatttttttttctgtaaaaaaaaatattataactacaattaaatttgtgttattaaatctttaaaaaaaaactattaatcaaattttataattaaaataaaaataagagcgggaacgacgtcgtttatgtcgaatcctggttcacgtcactactatataaaccttcgattatctctttcttaaaaccttttattagggtttcattcactcactctcgccatagccaaaaacctcaaattccattgctgacggcagccctaatctctgctttctcaacccaaaatggcgactcagatgagcaagaagcgaaaggtacattttcaatcttcaatcttcaatcttctaattatggggaaagaaagaatctatttactgaattttgattttgtgaacagtttgtagccgatggtgttttcttcgctgagttgaatgaggttttgaccagagaacttgcggaggatggatattctggcgttgaggttagagtaactccaatgcgcactgagattatcatcagagctactcgtactcaaaatgttctcggtgcttttcctctttttgatttcttttgattattgttattattattgttattttaagctgttgatattgaattgaacgatgttggtttatagtttttggtttggaatctgacttgagagtgtaaaaatggtggaaattttgaatgtgattaggggaaaagggaagaagaattagggaattgacttcggttgtacagaaacgttttaagtttcctgagaacagtgtggagctttatgctgagaaagttaacaataggggtctttgtgctattgctcaagctgagtctctgagatacaagctccttggtggccttgctgttcgcaggtatagatacccttttatttctttatttgaatctgtaatgatatatgtttgatctttgttttgggtaatttgataatataacagtgtgaaagattgaatttttataattttagaatattgctatggtgcccaacttcactggatgggatgttgaattacaccaatcactgaattcatcttcatatggcgttgggcttttaagttttttcatatggaaaaactcatcatttcaagttcacttacacgattatacaaatatttgtctactattaggggttagttatcgaaatcatgttttactaatgagccaacctaagtcatctttacagcgagtaggttatgtaaaatgcctatttcgtgtctgaggatgacgatattatgtgattccatcttgtcttcaaatgattctgggaataatgccatgttccttgctttttgatggggttgaacatttcctttaattctgtatctttagcttcaacttttcacgagcaaggtgattcaatagagccaattgtttgaaatagtggctagttatcgtaatcatttttcacaaatgactcaactttagtcatctttacagcgagtaggttatgtaaaatgcctatttcgtgtctgaggatgacgatattatgtgattacatcttgtctttaaatgagtttgggaataatgtcatgttccttgcttgctttcttgatggagtcgaacatttcctttgattgtctatctttagcttcaacttctcacgagcaaggtgatccaatagagccaatagttagaagtagtggttagttattgttatcattttttacaacgacctaacttaagtcatctttacagcgagtaggttatgtaaaatacctattttgtgtctgaggatgacgatattatgtgattccatcctatcttcaaatgagtctggaataatttcatgttccttgtttgcattttggatggggtcgaacatttcctttgatttcatatcactagcttcaacttctcatgtgcaatgtgattcattaaagccaatagttagaattaggatgtttatactaaggccagccaccctacaacctaatataaagcaacttgaacatcattttggtgtaccttttacattaaatcactaattcatctccaatcatttacgtcaaattttacaccacaaagatcttttatcgctataagttttaacatttattttactaatcttttattaggagtgttagaaatattctattttactccttttacactcttatttgactcttgttgacatgtgtaatttattgagtattttgtattttaataaggattcaaatttgttgtctaaattaggtatcttaattggtgtctaaccaagtaaattaggataacacatgtcttaatctaatctaataggttagatactaattacggaacttatcttggacaacaaattttgaattcttttgatatattaaaagtgaatatcaatccacctgtcgtattgtcataaacaaaaagtgcaaaatagtgttgcacttccaaaattaaaaaagcttttagttctgtattaaatattttgaaagtattgaaataaatgtctagagtaatgctagacacacactcattctactcactcaaaatgcacaatatgatgtggcatgcatttgatttaaaataacattatagtgtataatgtgccttaaattactcaattaaagattataacttggattttaaaaaataaaggggagaaattcctacaatacaagccccaattgaagtaattagtttatagatgtatatattatttggaatatttgtttggtttattatctggtgtaatatgtaggagatgaaatagtgaaatgatgttacttaaagttgcaccatttaaattggagttggagatggtcataggtgttaatcacataagcaaccagttgaaatgatatttgcatcattccctctgtcctcctgagctttacgattttttaggggttttacagacgggtttatattatgtttgtgattttttgctagaaaatttctttaaatttgttgttggcaaattcttacagggcttgctatggtgtcttgagatttgtaatggaaagtggtgccaagggatgtgaggtattttcccacttttttactttaacttctgtaattgtcattatctagtttctaacgttagggtatccattagtcatgtaaatctaatctctcttctcacacaggttattgtgagtggaaagctcagagcacagcgtgcaaaatcgatgaaattcaaagacgggtacatgatctcatccggtcaacccgttaaggagtacatagactcagctgtgagacacgttcttctcagacaggtctgtaaattctctcttcttcctcttttgcatgttcttgctccacaaggtctgaggttcgagtccctcgatattctagtccgttgatctaatctttgtttattttatttgttgaaccataacagggagtgctcggtatcaaggttaagatcatgctcgactgggatcccaagggcaagcaaggcccaacaacaccgttgccggatgtgatcaccatccatcctccaaaagacgatgagtacattccttcagttgaggttgctgccgacattgatatcgttgaggttccaccaccagtagtagtcgcctaaactttatttctcgaagaaaaaaccgattcttgtatttgttttatgtaggttttgctgaagcatagtttccccaccattgcagaagattattaggttttaaagataatactcatgtttcagtaaatacattagctttggttttgttaactctatttttctagtatttattggtgattttaaattttgggccatgcccattttttttttctttttataaaaatattctatccttattttcaattgaagttttctattgtctagatagaacatatttgtagcattgaagagagaaataatcaattcattgctatatctattttttttagcctattcataaaatttaactttaatagtatcggcttaaagaaaatatggtatgggataaattttacaccacaattaatttatttttttttcaaaatacgtgctagttcaggaagcaatcaagaggtaaggggactaatgctataggacactcgccatcagttatctaggaccaaatggaacattgtatgtgcaatgcggcatgagaaaaaggatctgatgctttactcttacaagtgtgtttaaagatttaagtccattatatctttattttatgagctctatatatcaattgacgactgtataaatgagttgtcaaagagaaatttcaatttttggccttaataattcaaaaaaataaataaaaataaaatagctaaaatctgaaattgatctttc

SEQ ID NO: 264803 - DNA, 1327 bp, Cannabis indica
gtgtaaaaataaaaaagcatcaaaaaaataattgtaagtgaattaaaaaataataaaataaatcttggtagaatagtttttatgcctgaaaaccgaaaggctgcccaagagtggctacggtcaactaggcggaaagcatattcatttcaaatctcaatattccccacttacttcaacgttccatattcttaaatcatttcccatattcttaaatctcatttgcctaactttccaaaaataataataataataaataaataaatatcatttgcctactctaactgataaaaatgtatatcttaaaaactacaaatacacctttattaattattattatgaacctaactatgcaagtgagttttcttttcattttattcttattttcgttggattcttattctcgtttttattcaattattatttttatgttgtacaacgaaacactgtcgatcaaggattataattacatctatgcccatgccatcccaatcccatgatctactaatgctattagtatcttcttcgtttatatgagtaagtgtcccagtggcagttaggcagagagggtatatttggtcatgtactctgaactttcccactttggtaagttattacattacaaaatactctattaattcattacactattatacatttttctttcttgcattattaatcatgtctaatgaattttatatcatgtgagaaatctccataaatatctgggtatctctacctagctagattagcatcttaaaaatacaaatattatttatttttaatcaataatttaaccaagtcattcctccataggcatgcttaccactatatatataaacgattggcgtttaacttatttgatgaaaaagtagcccaaatattatattctttccaaacaaaaggaagtacataaaagttaaaagcctcccccaccaattatttatttggtcttagaacgttagaacgcgtttaaagattgattgattcttcagtatcaattaaaaaaaaaaagaaaaaacatacataaatatctatggctctgtctcttggctctgtctcttgatggaccacctcagattgtgaggctctcgtaaagtaaccacaataatcaacttttttaaaaaggaaaaaaaaatacaaatatcaaatatcaaaagtatgtatagagtaaatgaaaaccgagtttctaatcacatgacatactttatttcagggcacttggatactatagttatagcaactatccattagttgttaaaaataaattatattatatatatcaatcagctaagtctttttctttaaaaactattaggacatcaaaaac

SEQ ID NO: 264804 - DNA, 1755 bp, Cannabis indica
cgagaatatggtcaattctagtaataagtaattcacgaagtaaaacctaactatgtatctcaagaaatggctgtgagtgtcccagtatcccaaggggcatgcgattatcgcataaacattgagttaatggcacacacccaccatttcgaagaacctagttagttgcaatagcgactacaagacaagaaaaatgaaaactaaccgcatgtctcaagaaatggctgggtgtttcatagtgacccaaggggcatgctatgactgcatgaacattaagttactgtgacacaccgaccatttcgagaactcatattgttttcataacaaaaatacatacgagcaaaaagctaaaaggtcttagtaattaatacattttggcaaaaagagggacgaaaggcttagtaattggtctagtaaagttatttctgggcattcaaacattcaaagaaacttgagaacattcaaaatgctcatcaaagacttgtgagtactcgaagttctcatcaataattttgggaacactcgaagtgttctccctgaaacccatgattactcaagtttcaagagtatatttcttaaaaaaatagggaatttaatcaaaagacaaataacaaatcctatcatttcacacattttctacctctaaaagcacagagtgtatacagattctcaaagaaaggaaaacagtaacataatggtaatctactaaccttgaagtgcggtctctcttcgaatgattcttggggttatcacgaagttcaaaattcttttcagatgaagaaaattcaaaaaaatgcaaagaagttttgaaggttcgaagttaagagaagagaaaggaggggaaaatgaaaatgagagggaaatgaattaaagatcatttcagatcagaaagtttaaatactaatatccctcatttattgggatggggatacatgggaaaggaatgcctaaggtctctcaatccaacagttatcaataatcacgcctgcacaaaccccgaagaattttgatgatgtggcacctcaaaggattaaaactaatgattacaaccgtcttttcgaaactttcgactagacaatcaatggtcaccacctcgtggcaacctttcgcctacctctctctcatagtttccctcatgacataggtgtcaatcgcgaatctagaggcatgtgttatagtgtgaatttttcagctagaaatttgagatcaggctcctataaagatgacacgtggactcattcccctcaaggagtgctgagctgtctgaaggagaccactagagtataaacctcgcttgaaccagattcagcgagatgatgtgaccctgacagagtctagtcgcattattacgcctcgcatagtgcaggtccaagaaggtcaagtttaaggctcgcatatacccagatatatgcgatgtctataaagctttctcctgtgaatcagtaaaaatatattctttacttagcgagttggtctggaagacctaacacattcgatgacaattgaaggactcgcacatccaagtcatcgacttctacaggatatccgtatacgggactcggatagaacacagatatcttaacacatagactagattagtctcgtacgcatcttaggcccgcgagcttatgcgagaatatgaacagacaactcataccaataaggtcgcataggttgttgtagttagtgagttgagttgaaactgttcttcatttattctatttacgtttttattgatttaatattgatattcgatgt

SEQ ID NO: 264805 - DNA, 939 bp, Cannabis indica
aagtgtcagattatgcaatctcccaatcacaaactcaatgtctgccctagacatctctgaggctaattgaggagcaatcattaccatattggaaatctgatctggaccttttcgacttaaggcatctgccacaacgtttgccttcccaggatgatataggatttcgcaatcatagtccttcactagctctaaccacctcctttgtctcatattcagatccttctgagtgaaaaagtacttgagactcttgtggtcagtatagatctcacacctttcacaatataagtagtgtcgccaaattttcaaagcaaacaccactgctgcaagttccaggtcgtgagttggataacactgctcataatctttcaattgccgagaagtgtaagctatgactctatctgcctgcattagcacacagcccaaaccctgccttgatgcatcacaatacaccacaaacttctcttgatcagatggcaaagctaaaacaggagctgtaatcagtcgttgcttcagctcttgaaaacttttctcacacttatctgaccatatgaactgttgatttttcctagttaactcggataacggcattgcaatcttggaaaaacttccacaaaaccccgataataatccgctaaactgagaaaacttcgaacttcggtgacagtttttggtctaggccagttcttcactgcttcaaccttccctgggtctaccataatcctgtcttttccaacaatgtgccccaggaaggatacttgcgatagccaaaactcacactttttgaactttgcatagagtttatgatcgctaagtcgttgtaaaaccatacgaagatgttgttcgtgttctacttctgaccgagagtacacaagaatatcatcgataaatacaattacaaaattatcgagaaaatccttgaataccctgttcatgagatcc

SEQ ID NO: 264806 - DNA, 1669 bp, Cannabis indica
cggtctcgaactagattaggacccaaactcggccccgaacccaggacctagggccgagtccaggtctgggtccctaggttgggtccaatgccaagtcctaattcggggttgggctaggttcatgtcgttttatagcgtagaatattgaagtaactttgtttttggtaaaaaaaattaaaaaataatttttagaaaacattagccaaataccattaaattacaatatgacaaaaaaatattttttattctcacttttaaaaatacattttcaaaaactgaaaatacagttaaataacctataagtagttcctgatttaggaactattaatatacctaataacaatacttaaaataaaaataaataataaaaaaactatcaaaaatcaattagttgttggcctaaataatatcatttaaaattggggtggcaattcaagtcatgacacaaaataggacacagactcgatacaaactattgcgggttatgatcataaaaaataaacgcaggtcaaaattgagttaaacactgatgcaatgattatatttgggttgtattaaggttaacacgtgtaacacgaaattgacatgaattgacccataactattaatttatagttaaattattatttattataatagaaaaatatataaattagaaataaaattacttaaaagaatataaggtagctaatttatacttgatgttatgaattttattcattgtattgataatttgtgataaataattttaattaatcttattatttatttgtaacttaatatatttttatttagtatattattcaaatgactacaaaattttgatataatttaaaatacatatacaaattaaatatgtaataccaatcacgttaatcaacatgtattgtaacataagtatagtcgatacacaaacataatatgtcgacatgagaacacgacatgttggttagggttgagatttattgacaaaaaaatatatatatggattcggttaaaattgaccatttaaacatgtcaatctacataacacaaatataaatataacacgacaacaagagtggcagtgttaaaatctctagccacgatgctgatgttcgaaaggaccttcattcatcgatcaatataagttaagaaatgttgcatttgcatatgtgttagagcatttctaatggagtgttaaaaaaatagtgtattgttatattttagcatgcttaaagaaaaatactactccaatagtaatctaaaaagtgtgtcaaatttgttgatacgtgctaaaaactgtgtcaaatttgacacatgctaaaaattgcaccaaatttagcccacaataaattctatcttttttatttactataatgtttcaaattattttgattcattgacttttacataattttatcttcttcatttactatattattattatataagcaataaaaaaaataattatgtttatattttttcaatacaatattaaatgatatcaataataattatatttatttatagcacgttaattacacagtattcggaatcagaataaaataatagagaaatgtagcggaataaagtaagaatagtcgaaatttactaaaactatttggaaatagaatgatagtgatttatcttatttactttatcaaaaaacgtaatcgaaatgcttaaa

SEQ ID NO: 264807 - DNA, 1123 bp, Cannabis indica
gtaaaatatttccaacactttgattattatgtatattgttatctatactgtcttgttgcgcttggttcacgggtgctctactgtgcaggaaaaggtaaatatgtttgtgatcagccatgagttcgagggcttggcggtagattgtacaggttcgggccatactagaccacgcgggttgggtctaccagttgatgtattccgtgttctcagtttttttggttaggacgacaagttaaaatcacttgtaatattttgtgaaaatttttatgggatctcgaaacatgtataatatttttggaatgatttgtaaggtttaaaattgttacaggttatattttcattctgtgaataatttaaagtttaatttatgctgtttttgctagtaatcccgatttagcgggattaggttatgtttatcagaaaatcgtagcttgcctaattgttaggacgttacatcatgcatccatgatttatccataacaaaaattctaaaaaaaatattagtatttagtaacaattataaatagttactacatacataatgtaactaactaggtttctcacaattattttatattaatttatatatttctataattcttgttttactttagttcatgttattaaattgtataagttgtaattaactaactagtgtagtacttagttgattggaatggatccaagaatggaatgacttttgatcctaaagtgaatccattcatttttttagtttggcatttataattagaaaccttcactacaagaaataagacttttaccagcgcatttttgtgctgccaaaagttaggtattgtactggtaaaacaacatttacttttgccagcgcatttttgtgccggtaaaggggatggcaaatctatgttggtattggaacttttgtcagtgcaaaataaaaagtgctcccaaaaatgacttttcccaacacattaatgcgctggcaaaagtctaacttttgccagcccaaatgtgcgctgggaaaagtctaacttttgccaatataaatttgtgctgggaaaagtaacttttactagcacaatagcaaattgtgctggcaaaagtaacattgtttatagtgcttattgttggatatattttacca

SEQ ID NO: 264808 - DNA, 7448 bp, Cannabis indica
ctttattgaactgcgaagctgttcatctgtttcgtgtttctcagcaagagtagtgtcaagtttagtctgtaaatcacctagtttgaccttatactcagccacatcatgattaagcatcgcatttgtctccaacagctctcggccctccttttcggactgagcatatttactttgtatctcctcggcactgctttcaatactttgtagtttcaggagagtttcctcgagctctaactttttggtttcagcaaccgttgatgcttcacgagcctgttcttccaacaattttagctggacttctagctcacttagcttctgagacatttcactggcttccaaatctctctgactgaacttctgaatggcttcttgtaattgtgtttctgcttccttgaaacgagtttcagtagtagagtgaagctcaatggctcttgaatgctgatctgctaattctgcaatagtacttttgtgagattcaagttgttgggcagctgtttctttctctgaaagagtagagttaaataattcctgaagttcgtcaatcttgcttttgagttgaacgttcgtttcaaccaatagttcactttctgaggaagattgagaaatttgtttttctgcttctaagatctgttttcttagttctgcattttcactctccaatgaagccagtttctttgaagtctgatctaattcttctgtcaaggaagcagcttttccagctgtttcagcaatctgctcttggtaaaccttcacttgatcttcaaaaatattcagcttctcaaacagagattttacttcagtatccctgtctgtaaaatttgctattgcttcttgaattttaatctctgactcttttttcagggactcatgtagcctttcaagttcagcattcttttcagttgtttgctctattagtcttctttgttgctccagttgctcctctgcagatttgaccttctctgctatctcagtttctctcagtccgccggccttgaggctgttttcgacactctccaatttctcttgtgtcagactcaattcattcctcaagacttccactagattttctgcttcagcaaacttctcccttgtactacttgatgcttcttcaaactttttcttctcatccgtagctaaattcaaggattcaattaattcattttccttttgattggctgcttgcaatgcaatttcaagactttctgttcttacttgaaatgcctcaagttcagattgaagatcagctaccctgtcagaatatttctttgaatctgcttcggtattctgacactttttctccattgtgcttatctgttcttcaagttcctgaattctatactttctgcttcaagtaacaactccaactcacttacttttttaccggcatcctccacttttgaatgagatgtctgatacaagtcttctagttcaatacttctttgatggttcatacttgctctgtcctcatgttcggaaccttttgccacggcaatcttcaactcctcctgaagctctaaattcttcgaagatgacatatttaaggcagattccagctcagctatcttgtcttgatattcttgcatttgactactcagctgtgtcttttcttcctcaacctctcgcaatgaagcatcgagttgcaatgctttttcagagaattctttcattcctctctcagcatcgctgctcttaagttctaccaagtttagctgttgttcaagctctgcattctttttttctgcttcaagaaaacgtgtttcaatctctctcagttgtgattttgcttcttctactgctgcatttgcagactggacaatatcctcaagctcaaggctcctttgagtagctgttgcagcagcagaacttgattcagtgtgaagatcttcaatagacttcagtttctgttcaagctctgcattgcttgacacagcttgagaaataagagtattggcttttgagatttcttcatctgattgcttaactcgctcctcaaaatctttacacaactcctttaagttctcttgactagctgtcaactcaaccacagaaataccaagatcattcttctcatcaagcacttgagccaattccttttgaatattagagacttgtgtttcatatgatttgactgaagattcaatcaactctttggcagccaattcctcttgcagcttcaatttagtttcttccagttcagaaactgttgtttgaagatgttcttttgtcgaagaagccaaattttcaagacctgaaatctcttccttcatctgagattccagagttcttttctgttccaactcctggctcatttcattgataactgcttcctttgaagaaagtctttgctccaagtccagcaattgcgatttcgaaagtgtcagctcctcatggacagtagaaagctctgctgctgttgacttcaatgcttcttcaaccttctcattttcagtgatctttccatacaagcccttgagttcctcttgcatagaagcgacctgatcttccacctcttttgcactcaatttcgacacttcaagcaatctctcaagctccaacactctctttgtctccgattcagcatgtaggccactttgcttgtgaagctcctcaaacttttgagcctcaccagctgaagtctgtagatcctgctccaactcctgcattctctttctagaactttcaagctcaaggttaataccatcaaatgcttctttaacctcaaccaactccttgtgcttattttcttgtccttggattgcttcttgtaacacattgagctgtgaactgtacttctcctcaacttcaacgatttgctcttgcaacttcctatgactgagctcaagctccacatacttgtgtccactttcttccagcttctccttcgtaacagaaacgtcattcttcagctgtgaattctcggactctgagtgcttcagtatgccagctaatctttcgatctcactctcgagttctctcaccttctcttgggcttctagtatttctctactggaattacttgagctcctttcaataacaatagatttttctactgcagaagatgtttcaacagtatgagaatcatccttgacatccagtgattccttctcaactttaatgaattcaccatcatccatactttcctcctcttctttcttcacttctttctctactgatttcaggtccccatttagtccctgcaaaatttgatcatattaatcaatattcaacttcctattaattttgataatatctttgtatcccccaattcacaatttcagatgatggattccaaattttgatttgaaggctttcagtattagactacatcaactagatttagtattataacaactaaagagttggctgtaagaattagcatgtgctcaccttaatagcgtcaactatttgcatcagcaccatcaacagactttgtcaccggatttctgaactcactagtgtttcttcttccattttactgtgattatgaccaaaattgtatgttatgaattaccaacaaataatgctgcacaaggaatatgtacacatagtggttggggggggggggggtaagtcatgtgatgtaaaaccaagatttatggcaaatctgaaagaataggcatgggaaacaaaattaggaagctaactttcaaaaatcacaacactaaattccagattttgctctcattttacattccatgacctcatcagattgattatttagctataatttgacattgcaatagtttgttccaaaataaaatatttaatatgaaccactaggctgtagcaaaccaagaacttcagttactgattagaacaaagaaaacccccaagtatagcagttcacaaacaattaataaaaataaaatatttccaaactctaaatagtccatataaacaagtaataataaaaagaaaaatcacacatcttattgcaaagtagtctcctttttcttccaagtaactatatttttctaagataatttactattattataccatgacacctaagatagttatattgtattgacttttaatatacaatgaaacatatgtaatacaaaatatagaaaaaattatattaagattttattgtagtataaatgttaagtgtaaatacagaaggaacatgaaaatattttcattagtggggaaggacaggacctatttgccattttggagtgtgtgcaaataaaaacaaatgacccgacgtgacacccaaagacagagttccttattttcataatggtggcctatccatatcatagcttacttcaaatttacacactttcatttttacttttatcttatttttgtaaaaaaaataataatttatgaaagggaatgaaatcaataaattacaaatgatataaatataacatattaatataggggttgggaaagaaaaaaggaaagtaatgcataaacaaaacaaatacctataggaaagatgaagtaatgaggaagcaaatgatgtaggggtcattgattacatgggccattaatacaatacaatatgggattggggaactgcggcccattttaattaatatttattaactgtacccaattatcactccctcttaatattactattttatttacaagaaaaacacaatttgttttatcttgttatttctatacttggtattttgttttccttttttgcaacagctactatttttggtattatatttatacgcaaatatacaagtaacaactacaaagtaataaaataaaaaaaaaatgagctgccttgatgactaacaggtagatctaaccacgtgaagttttcatgtgaaactctgaacacatcaaatttgtgggcccaatccaagtaattattctgtttaaaatctccacgtacatatcaactataagtttataacacaacaatagcaacacctttacatactcatgcctcctatactttactttctcagatcatactagtgaaaaatagatttatcacatattgctaaaaagtattaaagtaataataatattacaattttacaccaatagacccattgaatattgatattaaaatttgcaaaaataaagatgacaatttgagggttgcccactaccaagttaggcacccgtttcttcttttagcttgtaaaaagcatctctttcttacagagagaagacagctagcaatttttatttttaatatgaggaccattaacaataatgcacaaagacaaaacaaaacaaaatataatataaatagtgctttattcaagctgaataataattaacataggatcaactttgattttatattgatgtgatatagagattgtcaggacctttattttactatctgcctaaactttttttcaatatcaaaccacttttttttaatctctctctcttttattaaagttaaaaagaaaatagggaaatatttttaaaagaaaagaataaaaaaaaaacttgataaaaagttggtatccaggaccaaactaaggaagaaatgcgtgcttagtgagcaggaaaatattttatatagtcaatgatctatttataatttactaaaatctacctatgaccatgtacacatatttgaccaaataaaaaatatatattttataatttatttcattcttcaacaacaacaaaaaaaaaaatgatttgatcagtatgaaattttgatcaatatattttaatttttttcaaaagtaaaagcaaaagaatggtggttggtgttcttttcatcgtattttaattaagaactcagacaaagttgtttacagacttatggcatctaatgaaattagctagaatatttagtgaactaaatagaaataaaaacataaacaaagactatatagcaaagaaagaaataggttctaaccttttctttatatatataattgatcatatctatgcaaacatgattcttcaaattccattaaacaaaaaccattttgaagatcagaacccgattctagtatctagcacaccaaaatttgatatggaaatggttgattcagaatctgagactccaaaaaacatcatttaaccagagacatcgaaaatatcatataaaagatcaatatccatacatacatatatacataaatatataatatttatgattgatagatagagatgattaatcatatcagcaaatacatagtaacagaaacactggaatccgagttttgtgattcaggaaaaacacaaaacagaaacagaaaacagtttctgataaacagagctgcaaaaagctaaaaccggatttactatttagaagtcacacactaaaaaaagaaaaaagaaaatatgaaacaataactcataagagatgatgaggttggtgaactgagcttacctgcgttaccagagcttggatgattctggagctttttccaaaaggcgttttctgaatattgttttgaaaaatgggaaaacggaaagaatgggcgagggtgatcaatgttatgaaggtagcaaattttggaaaatataaaagagaaagagagagagagagagagattcttatagaaggagaggaaatgagtccccactttagtgccatgtagggtcacatatgtggcctgtggggcctaatagccagcaccagttgaaacaatggctggtttggtcgccgaggtattgcccctagatttgggtttaattacggaaataacatccataataggaaactcattttatggtgtgctagtatatttggatgtagattcataacctcaaagaaagtgagatctactcttaataaaaacagatatgccttagatttatttatttaagataaattatctgccacttttaattctgatgtcttattttaatgttttaaaatctacttggacacttttttttttctttttaatggtaagattaaaatttctataagaacaagaataaattctaaattactgaattttaacaagttactaacagtaaatgtgttaacctaatagaagattttttttttctccttgaaaatgcagtagattactaataatttagatttgaccttcattattatgatgatagtggaaaaatactgtggtgcataacaattaaatgagtaagaaaagtaaaaataaatgagtagattttgttaactattagacaatatagcataaatatgttgagcttcatgccaaaatgcacacctactaaaaaattatgaatataatgatgtcattatcatttcagtgatttatttatttaggttgaatctaagagcaatgaatatagagagaaaaaaataataagaagaatattagtgttaccaaactaccctaaatggttgtagtttagggggagtcccatgtggaaattccaaaatgtattaatgtttaaaaatagttttattttggttgaaaagaaacatccaagaatgttatatcatatatttgagacaaaaagaaggtgtaattggtcattgaataaaagaaagaaaaaaa

SEQ ID NO: 264809 - DNA, 945 bp, Cannabis indica
atttttggctctgaattgggacctcgtgttcttgatattcctagaattcctcatcctttctcggatcagattttttggaagaacaatcaaaagggccaattttctgtcaaagcagcttacataatggatcaatcgtggagatttgccccaggaaaaaatatttggaagtggatttggaatgggaaaattcacccaagaaattctgtaatgctttggagagttttaagtgaagcaattccaaccaggaaccggttgccttttattagagagaagacttgctgtttatgtgatatgtgggaggaaaatgccttgcatctgtttagagattgtgccttttccaaggcggtttggctagggggaaattatcctttaaggatagataatattcctggcaattctatgatcagctttgtggagaacctgcttgtttccctctcggattgtaacagatttgagctgctaaatctctgtggctatttattctcggaaatctggcagcaaagaaatttttcctgcatcagaaatcagtctgcagatcctatccaagccacaacaagaattggaaaatcaatggtagatttgcgcagcctggaacataactgtgtcgatgaaggagtttcagctgtctctaagctgtcaccatctgaagatctggtctcggaagaaggtacccgaagaagcttggatcatcatgtcattttcacggatgcgtcctggacaaatggtgagtgtgggattgctgcaattggagttgacacaagacaaggcatctggtttgtcaaagctggtaaagataaggctccttcagctctcgaagcagagctcaaagccatccttcttgctgtttcctgggcagtggagaggggttggaaccaggtgcatattctatcggattcttacattgcggtgaaggctcttgctgcagaagggagaccgcctgattgg

SEQ ID NO: 264810 - DNA, 735 bp, Cannabis indica
cataatattagtaaatttaatataaaaactactttcggttacttaccttagttaaaaagctttaaagttaaagtgctttaccagtcttaaattatatatttgaagcataaggaaaaaagagagggacttaaaataataatttctataaatatagcaaatcttcttctttttttcttagagcgttaaataataattcctataaatatgccataataattcctataaacatggcattaaatatgaaataaagttaaggattttataatacaaataacagtatcatattcacatctgatactaaaaggattacacagcttttattgaagaaaaagaaatatttttcaaaagaaaaaagaaaaaaaaaaataagcagctaaactaaaaaaaaacagcaacatgttttagagaccatgcaaaataaataaataaatttatctaaaacaccttaatttattttggtatctattttttaaaaaaaaaattatttcaaatttagtctattagagttaaaaaaaatatcacatataaaaattaaaaaatgttaaagaatactagtaatgcttaatactcttctatatgtaaatatcgctattagttcaattaaatatttaaaaaatactaaatattattagtacctaataacaatgctcatataataactaggggtgtacgtcggtcggtttagtcgggttatagcatatttttattaacccaatataaatatcgggttgcaaa

SEQ ID NO: 264811 - DNA, 654 bp, Cannabis indica
aaatatatttgttgaactgaaaatttgtttttgcgttgctaaatggttgagaaatagttgctaaataagtctgttaaatttaaattcaggaacgataattgacatagagaaacaagaagatgatagtttccaatatgcatttgttgcattaaatgctgctattaaaggttggccaaaatgcaaatcaatcatcgttgttgactgggcattcctaaaggtcgcgtatggaggcacgttgctcactgccaacacacaagatgcagaatcgaaaatatttccacttgcatactgtattgttgattccgagaatgataaatcatgggagtggttcttcaaaaaaaataaaagaagcattcgaagttcgagaagatcaatgcctaatatcagacagacatgaaagcatcatcaaagcaacaagaaaagtgttcccaaaaataacgcatggctactgcatcttccacctcttatcaaatttgaaaacaaaattaaaaaaaatgcaaagcatttcaaaggtccattctttacagccacaaaagcttacacagaaatggagtttgaaatttcatatgagagagctagacaacttaggataagcgcataatatcgtatctggaacaaattgggccatgagaaatggtcaagatatcattcaaa

SEQ ID NO: 264812 - DNA, 818 bp, Cannabis indica
ttctacaaagcaatgctttacaagatataaaataatattagctactctatgagcaacaccattgtcacaactatttggaaaaataaataaataaataaataaccttctgaactttacatttttttttattatcaaaacctttatatatattacattacacaattttaaactcaaactaaagacttccatacacacgcacattcccatactccttataatcacttgagctagccgaaaatgattttagaacctacattcaaagacacagtttaatacttagaaaagatacattagtacaaaacagagaagaaaaagtaaccaaaaaaaattgtattattcattatgatcaaaaggggtacaagctaatgagctttatatacagctcgagtttaatacaaggaagcatagaaaactcttataaaacaaggcaacttgtattacataaaccatagtcagcaactaactaaaactaaacttccctaacttacaaacttcaactcttgacactccccctccaacgatggagaactaatagctcattagtcacatcttgtctttgaagtaattgaactgtgtaggaaagagagccttagtaaaaacatcggccaactcctcttttgatgaaacatgacttgtctttataaccccttgttggaaatattttaccaggatctagatttactaacaagtatgttgattaacattctaaatatgaattctctaaaacaatgaaataaacacataagggtttaagaaactttacattgattgcagcggaataatatgactccttctcttcaagatctctagcccttgat

SEQ ID NO: 264813 - DNA, 1164 bp, Cannabis indica
gactggctgtcaaactgctttccattgttcgaaactattttttacggaaatatgaatcggcagattatgttcttcacaataaagtcttgaacttatttggatgtaatggttgctagtggctcggcttccgtgcacttagtgaaataatcaaccgcaaccactgcatactgcactccacctttgccttgggtaattgtccgatcacgtcaattccccaaatggaaaaaggccacaaactttgcatctgagtcaactcgttgggcggagctcgccgtatctttgaaaatctctggcatttgccacattttttaacataggccttaaaattttcttagataaactctacctgacggcgtgatttccacaaaatccatcgtgcacttcagacaaaagtcgtgcagcttcttcttgggtaacagatctgagcaatggcatggagaatcctcgtctgtacataattccctttactatgatgtactgtacaaccttccttctcatgtttcgagcttcatttcgactatctgggagttccccagtattgaggtaggtccctattggcgtcatccagtttggggatgtatcaatcatttcgatctcttccatgctggtgatgctaggttcttcgagaaactgaataggaacaagatttgctctgtcacttacattactgcttgcaagccaagccaatgcgtcagaattcgtgttttcttggcttggaatttgtctaagagtatagctttttaatagtgcaagaaggtcgtgtattttgctcaaatatgttatcatcttttcaccccgagcctcgtattctccaggtacatgatttaccaccagctgggaatcactgcagattttaatatgttcagccttcatctcccaggctagttttagactagggattaaagcttcatattcagcctcattgttggatgctttaaatgcaaacttgactgcagcgtgcaggtgttgcccctaggtgtgacaagggcgattcctgcaccggatagttgatcagtagccgacccgttcacatttagtttccaagtcggcttgtcttcattgttacttggctgaggtatttgtactggcccagggttaccttcgatatgctttcatccttgcctgtgcattctaccacaaagtctactaaggcttggcctttga

SEQ ID NO: 264814 - DNA, 576 bp, Cannabis indica
cataaaaagtcttttccaactttttaaaaaaccactgcttaaaactaaattgcatgttccaataacttccacttgtgagcccatcttgtttccagataagatgcgttgctcacttgccactagcttccttaggttttgaatatcctgcaaggaatttgttatgtgaattgctgaatcgaaatcaatccaccatgtgttaagattaacagtagccatattagattcataacatactaaggaattagattacctttgtcatccattcatttcttgaactggctgtactcctttttcgcatgtcccttttgtttacaaaagaaacatttgatggaatctttctttatggcagccttgggagccatgggctttttccctttgttctttttgaatggtttgcatttcttaggttgagtggtcaagtgaacactttctccttgctcctgtaggagcctagctacctcttgagcacacatggtcataaattcattgatgatccatttttccttatgtgtgttgtaggaaattttgaaaggcccataccgtggaggaagattgtgaaggatgtaatgaaccagg

SEQ ID NO: 264815 - DNA, 1004 bp, Cannabis indica
ggcaatcctcacaagagattttcgagggtaagtatcattcctcgcaaatgatggtatgatctggattattatatatattttttttgctccgttgatcttttatctttgtctctacaggaatggacatggattttgagagcaagttcagaggtcctcctcaggctgacaaggaatccaagaagaaggtaatcccagttgacgtggtcatggattcttctaaagaacccagctggcccaagacccaagcttgcacaaaaagacctttggaccagccaacctctggtgttgaaaaatttcctgaggctgggaatgaggtctcggctgcaagaaatgggatcttctgatgcaaagaatgaggtctatgcagaggtcgagatcttttacgcgtagacggtctttctcaagctacgtgtagatggtctttctcgagttcatcaaccccccattaataaccttgtattctttgttcaggaaaattacttaattgtttgcccctagtggcatttttgtaaaagacaagtttgtaaacgaacttgggttttctcttatcttaaatgccttgtacttttgtcgttcgaactgaatataattgcgtttgcttgcgtttttattcacaatgtaaacaactatattttgatcaaatgtaaagtacttttgagtttttcaattgctcataattttcctgtttaagtagttagttatctactaaccttttgattttcgtcgcagttgtcaattctgccttgcaatgacagttataatctgccttaagaaaacttgaatatacttttaatgattttatcattttgtatatttttgattgcttgtatgaatagttatattatctatccatttactaggtttaagtactttgatcatttagtactttcttatcttgcgcgaaccattaatattcagctttgtacgcaagttataacttattaattttcctttctcgtcagacaggtttaaaccaaaagttatggtggtttgatccctttctc

SEQ ID NO: 264816 - DNA, 913 bp, Cannabis indica
attcttgtatactctcagtcagaagaggagaacgagcatcaccttcgaatggtattatagcgacttagggatcacaagttgtatgcaaagttcaaaaagtgtgaattctggttatctgaggtatcatttctggggcatattgttggaaagaacgggattatggttgatccaaacaaggttgagtcagtgaagaattggccgagaccaaaatctgtgacggaggttcgaagttttcttagtttagcagggtattatcgacgtttcatcgagggattttctaaagtctctagcccctaattgagttgatcaagaaaaaatcaaaaaattgtgtggtcagataaatgcaaaaaaagttttcaggagttgaagcaacgtttgataacagctccagtgttagcttttccatcagagcaagagaaatttgttgtttattgtgatgcatcccgaaagggtctgtgatgtgttctgatgcaagctgacagagttataacttatgcctctcgtcaattaaaagattatgagcagcgctatccaactcatgacctagagcttgctgttgtggtttttgctctaaagatatggcggcattacctttatggtgagaagtctgagatttataccgatcataagagtctcaaatactttttcagccagaaggatttgaacatgaggcagaggaggtggctggaattggttaaggactacggctgtgagattctgtatcaccccgggaaggccaatgttgtagccgatgctttaagtagaaagggtcctgggcaagtttgtaccgcggttctgatagcccctcaattagcctctgaaatggttagtgtagggattgagtttgtggttgggaaatcacataacttgacacttcaatctgtattctgctagtagacgaatcaaaaaggca

SEQ ID NO: 264817 - DNA, 599 bp, Cannabis indica
aatagcgagagcttgaaattttattatcagtagtattcgcattattcgattatgttaattcgtgtacttatacttagatattttttgttcaaaaaatcctaagtatagggggatatatgcccgcatgtactattgattatatgaataaaattacttgctaagtttttcaagtgatttaaatttagtttaccaactttgaaaattttccctacttattacaccaagctgtaattaaagtcgcacatgtatataaaattgcgattacaccgagctgtaatcaaagttaaaaatatatataaaatcgcgagtacccgtgtactgcgtaaatattaaaggataagctatccccgcgaggatagaaatttgtccaaaagagaaggtaaatttgtctaagtacagaagtgcgagtacccatgtaccgcatatataaaaaaaagtactgaaattaaaaaataacataaatcagaagataatcaagcgtctggagcagtctcgtccgcgactttgctaacgatctcattctcgacttcctcggcctgtacgccctcgacctcatccagaaggttgcctccccaccttgagtctgggtaggcgacatg

SEQ ID NO: 264818 - DNA, 754 bp, Cannabis indica
ttttactatagtattgatgtaattttttttcggattatacttaagttggattgttagggaagtccagttcaactttttgaggtctgcctttcatggatctaaaaattgaagtcaagacattagtttatgcaaattaaattggatttccagttgaattttagtttcgtagtagtttttctacactttttttatgaatttgaagcagcccctgttttgattgattctagtcgtcttctcaggtgaagtcgccggaattaatggtggttttctttctgattgaatttttcgtttcggttgtgttgggttgctgcgtagttgcgcgatagttgcccaagaagcatggatcctgggttgaaggtgtgtgtaagtggtatttgtgtaattttttttatttgggttgtatatttgtttatttgatcagctggaagtatttttgtaatattattacttttttggttaaaattgaaaaaaaaaaaaaaacccccttttaaaaaaggtttagataaaagaaattttatttacaccttaaaaatttttaaagacacctcattttaatgatttttattttatgtaaaatttatatctttaattgtactaagtattttttttcttccagttcatattcttaaaaaatatacctatcaaataaaaataaattacattttaaacattataacaaaaaaattaaaataaaaaattaatatgaaatattcatagaaaaaataaaaaataatatatacatgatttagaaaaa

SEQ ID NO: 264819 - DNA, 706 bp, Cannabis indica
aatcgagccagcgcgtctgcagtagtattatcttctcttagaatttgtttaagaccgtagcttttgaattgtgcgagcaggtcatgtattttgctcagatatgcaatcattttttctacccgagcctcgtattccccggatacatgatttaccaccagctgtgaatcactgcagatttcaatgtgttcgaccttcatttcctttgctagcttaagtccagcgattagggcctcgtattctgcttcgttgttagaggccttgaacccgaacttgactatagcgtgcaagtgttgccccccaggtgtgacaagggcaattcctgcaccagatagttgatctattgccgacccatccacatgtaacttccaggtcggtttgtcttcaatattacttggttgtggtattggctcgggatcgctttctggtatgctttattttttgcctgtgcattctaccacaaagtcggccaaggcttggcctttgatatctgttcggggttggaagttgatttcatactgacccaactctacagcccacttgagtaaccgtccagaggcatctggcttttgcaatatttatcgtagtggttggtcggtatacacccgaataggatgagcttcacagtaaggcctcagctttcttgttgctagaatgaggcagtaggcgagcttttctatcaacgagtatcggccttcagcttcgatga

SEQ ID NO: 264820 - DNA, 636 bp, Cannabis indica
ttttagatgtatggtttagcaatcttaaaatactaaagtaggagaaaagccaatcgctaaaaatgatacgtttgattgagatctcataaatttattaaaggaataagattttcttcaaggatcaacgttttagagaggcttgtagacttgtagccatgtaatagtattggagtttgggattgtattctttccttcccaataacaaaagaataaatgttccattaatccaaatctcctcctatatcttaatttaagattatttttgttaatacacgatttattcatttcttttttaattatacaatgaaaatataatttatgttcctactttaattctattactttctataaccagcaaagcaaccacaaatgaaacgctacgtgatatccccttgtgtgtattcagtgataacacaccttattaacaatttttaaagaactataatcaataagtatgtctcgcatatagttctatattagcctaagcaaagtctaaagtaacgatgtttatatagttttataatgagaagacacaaatttaatgtccactcaggaccaactttttcattctattgtaacctcgttgtgcaagtaaacgtgaggaaaaatctttgatgagtatctgatgaattgatt

SEQ ID NO: 264821 - DNA, 633 bp, Cannabis indica
gaatttggggtgccctgctcatgtcttaagaaagaaagatgggaaactagaaaagtgaactgaggtttgcatgttcattgcaaattctaaggagactaggggtagactattttacagtcgaaaggatgataaagtgttcgtttccacaaacgccactttccttgaagatgactacattaagaacttcaagccgcaaagcaaaatagtattggaggaaatgctttcagatataactccttctaatgttccatcgtcttctactcaagtagaggataattccactccctctgttgaacctttgcaagttgatacaaccgagaaatctaacacttatgttcccggttagaagatcacggctcctcgccgtagtgggagggtttccacaaaaccatctcgttatgccttggatggtgaaatcaatatggtcattggtgacggcattgatgacgatccattaacctataaacacgcaatggcaagtccggaacagaaacaatggtctgccggcatggattcaaaaatggactccatgaaaaagaaaaaagtctgggaatatgtagacgcacatgatgattatcgtccaattggatgtaagtaggtctacaagaagaaaagaggtgctggaggcgaagt

SEQ ID NO: 264822 - DNA, 1551 bp, Cannabis indica
  modified_base (1513)..(1513): a, c, t, g, unknown or other
tttataattaactttttattcatttataccgtaagatgaaatttaatttacaaataccttttttttttttttacaattgtacacttctttcaagaactcattatatttgctctataaaattcaaatttcaaataaagaacattttataaacccatagttaggaattataacttgagaagggtttcaaacatttaattactttacggtttatatgaaaaagaaaaattattattgtattctagcagcaaaaataatttaacctcacaaaataaaaacaacataatctcgaaatgaaacaactaacatttaattccatataaagtgagagaactatgtataattgtgaggtggccatggccacctagctttttctaaaaaaaatattacataacaaacaaattaaattagaatagtttgaattttagttattagaagaaagagattctctttataataacgactcaaatccactaataaattatccaattgaaattaaaaagaagccaaaaaattcaataatccataagcccaaaaacccaatattccattaagaatattctcaaaatcatcaaaataactataaaaaaaataaaaactttttgtataatatatataattttaatcattataaagacagcgctaaattacattgcctaattacagtttaatttttttaatgatttcagatttttagttgtactaattattatgtgcctatgatgcaggggaaatgctaatcaatagtacgaacagtcagaagaatttaaacaagaactgaaattaaaggttagagaatataactaaacaagaatagtggagaagaaaaatgcaaatgagggtatgttgaagtcttggctatttccattattttggctattgtttttaagcatttaggcttttcctgactttgatgttttgtctatttgaatttagatatccaaagaggaaggtaggctgaaaaaggatgaaaaagaaaccaaagagatgtggaaaagaaagcgtgcgcatgaggagcagtgggaaggaacaagagagaaacgggtttgcttcttaacctcaagactggatcaaattaaattgtgatgctaaggttggaggggagcatatgtgtgtagcaactgttgctagagactacatgtgcaaggtgttttgggtatttacggccagaatggacttttctaatgttctctgtggcaaaacaactgcggtttgcttggcacttgaggttgcaaaggcaaaggacatcaatttatcttgatggaaaacgatcaaagatagtgatcaacactctcaacggtgtggaatcccaatgggaaaataaactactctttattttgtaaaaagaatcgttccttctttcattacctgtttattttgttttacgactagatcatgttattttatggcccaactaattggacttttacccagaacctttatgggtgccttgatgttactactattcctacgaacatttgttgtaatgtttttaatgctttatgaatgaacgtancttttttttttaaaaaaaaaaaaaacgaaaaaaacgta

SEQ ID NO: 264823 - DNA, 1044 bp, Cannabis indica
ttttatacattttaaatatattattttaattttaaaatgaaaaatttatgatgtggactaataatagggtgacacttggacacttacttggcagaaaatggagaggtacctacggaagttccagaagtgtgacggaaggtatttttaccgccaaaaatacgacttaggtatttatctgctactcaggataaaacttaggtatttttgccgcaaattactcaatattacgattagctaactattggtattttttgccacaataaatgatatttaagtgttacattctttgaaggcttcgttacctaagggggagaatgttggattaaaatctctaatgtgggctcatatgtatttttgtgtatcattatataaagtttgacccaaataaagtgatcattttaataattatggatcattgggtattaaagtgtcatgggctatattatctcaatttttgtcctcatgatgtggcatgcttacgtggacgaaacatgtgctacgtggaagtacagctcactaaaagaaaggccaagtcatcacctgagctattttcaagagatttgaattgtaaacctaaggtttaggcctcctatataaaggccttaacctatagttgaaaacctaagttgtctaagctccctcgaagctagaagtctcaaactctataagtgttagactctctctttcctcccccccccccttcactctctcatacgcccaagcctaggctgtacaacaccctaggctgtccaagacttgacttctgccagacatcaattcatacattgtaatcataagggtactatagcagatcccacctatagcaatctggatagtaattccctctgtataatacaattaaaaggggagtaggtcattacccgctatcacaagagggtcaaacctctataataaatccagttgtatattgctttttattcttatttgtgcacacacttggcaagcatcagatctgcatgacccactgtcaattgatcacttttcaaggtcaacaggctaaatgagtagataccttaagagata

SEQ ID NO: 264824 - DNA, 1133 bp, Cannabis indica
ttagctactaagaaacttctacttctatggtggtacatcaaatcccgcgtactcctaattaccccaatacctacattatcaacttatcacaatatttcaattaattctatcaattaagcatgttatgatatttttggcccccgatcgagtctccaagattgccaaaactaaaaatattttgttacaccagtaactcatattacattcacatatgccctataaatcttcgtaatttataaattacacttatttatctacttatagcaaatttaaaatttatgttgaactagattaggaggatcagaatcccacttattacctggttaactcataatataaatataaacactaattattaaatattaggtttattgggatattacaccccatgaccgtcggattcttcttcttcgaaatagggacaaagtttgtatcattcaacccatctggcatcatataagaggcaaaaaatttctaactaataaaataacatccttcccacaactgaccaatacctctcttaaaaagtcgaagtcataccataaggccttagagatttgtgaggatgcatctgaaataatgcatctttaacctcttcatctgaaacaacgcctctttaatctatacaaaattagtgtagaatcttttacctttagtgcaataactttaatgattcacacaaaatatcacatcaaatattccaccaaataaatatattttacttaaaaagatcttgcattttatattattaacatcattaacccaagatagctaatttaggatgtaatcatatcatgactactagtaaaaatttaaaatattaaactaatttagtaaaataaattatttgttcaatgaactgaacatgatatatattttttaaaaaaacttaaaattaaataacacctacataatttaattttctaattattatgatgttcctacagataatcagtcaatgcatttcaaaggacatagtgagtatctatatccttgctttttctatgtcgataaagaaaatattaaattatttaaatattcttcaaggctaaaatacttaggagtgttcacaaagtatccgatccaatccaatccgcacgatccaatccaatccaatccgcaaaaatgcggat

SEQ ID NO: 264825 - DNA, 573 bp, Cannabis indica
aatcttcgccttgtttcagggtatgtacatatatacataatataaatctctttttctctctaattataattagttcaaactcccaacttaattacccttatttagttaacactacttaataacttcactttaattatcatttatatatgtgtatatatcaatcttcttcatctctctatctctcactcttgtggattgaaataaactaggtggacctacatcttgatttagagagagagagagagagagtaattaattaatagtaatggtgatatgttaatttgtctcatttgtgtttaattaattaaattaattcaaattaagaatattttgccctttctcccattacaaaggacaaagggttgtttgttgaggtacctaattccttactcttacctaaatactactcttaataatgtatttaaattctcattattatatatagagtatcgttttattttgtccttaatcttctaaatttaaattttggcgataaaattttctaaactattaaattgttagcaaatttaaggtgtcacccagttaattgtcaccatagactgcttatgtgta

SEQ ID NO: 264826 - DNA, 1112 bp, Cannabis indica
ttattattttggaaaatatatggtcaattttgtcatttaacaaaacataaggtctaattagtaacttttgcaaaacaacggtctaaaataatatttatcctattatatttaaagttataaaaattctatgactaaaagtattacaaaaataagaattatattacaaatatacaaatacacaaaaacaataaaaaaaaattacaaaaagaattttaaacatttttacaatttttttgattttatttacagaaactacggtctttttatattgtactcttgctaattttttgttcattttttgttatttaaatgttattgttttgatgttatttagatgttacttttatgtagttttttttgttattttagtgttgtttaaaaataacatttaaacaacattaaaataataataaaaaaatagcatacaaataataaaaaatcaataacaaaataaaaaatgtagaatataaaaatacattaaaagactatatttttctgtaaataaaattataaaaatatttaaaattctatacaattatattttttttttttttggtaaaacttatgtatttgtgaaataattccaataaaatttagtattcacaagtttttttttagcccaccgagtttcggtatacccctaccagttttgatttttttttttataatggtattatatgtagactttccctaccttcttttaaccttatttttctactctccaactctttaaagaatatgttcttttagaagatagaatattctctttgttatttttcttgattaagtcctaagaattatttgttattattttattaatgaattcaaaatacgaactcaccgattaaaatattttgatattatataaattaaatattgcacatagcttattcataaaataggtgatttaatttaatttgcacgatccgatccaatccaatccgcaaagtgcggatatacgcattttgcggattggattagattaaaaaatttaaaattcacatttgtacagattagatattgatttacatgtaaaagtaaccgatctaatccaatccacacatatttataaaaaaaaaattaaaaattatatgtacaattaacattttaat

SEQ ID NO: 264827 - DNA, 868 bp, Cannabis indica
gtagtctagttagtggttttggaacacaaagtcgctaatcaagttcgattaggaacttggtaacccttttcataacaaaatcactaatcagtattgaattagtcttctcgttaatggtgccaatgtacaaacacactagtgacactatcattgtagtgtagtttgtggtctgagtacaaagtcactaatcaagtttgatttacgggtctcggtacccctttcataagtagaaatacactatcgttagtacgtagttagtcttatctttagtggtgccaatgtactaactcaatagtgacactatcattgtattgtagttagtggttccatgatacaaagtcgctaatcaagtaagattttagggtctctaacaacaattttaataaagaaattactaatcactatcgaagtagtcttctcattaatggtgttgatgtacaaacacactagtgacattatcattgtaggtagttaatggttctgggatacaaagtcgctaatcatgttagatttagggtctcggtaccccttttcatagtgaaatcaatattactatcaaattagtcttctcattagtggtgctaatgtacaaacacactagtgacactatcattgtaggtagttagtggttccaagacataaagttgctaatcaagttagatttagggtcttggtaccccttttcataataaaatcactactaatgtacaaacacactggtgacactatcattgtaatgtagttagttgttttgggacacaaagttgctaatgaagttagatttagggtctcggtacccattttcataacgaaataactaatcgctttcaaattagtcttctcaatagtggtgccaatgtacaaatac

SEQ ID NO: 264828 - DNA, 806 bp, Cannabis indica
ttctagttccatttgcgattctgagttcgagtttgggtttgagttcgtgtcagagttcgagtactggtctgagtttgggttcgtgtccgaatttctgtgtaggtccaaatcaggcttcgggtgtgggttcgcctcctgggtctttgtctaggttcggtccgagtcccacgttccaataccgatttgagtttggatacaattttgggtctaagtccttggatctgatcctggtctgggttcgaatttgggtccgggtccgggtctagtattgggtctgattctagatgtgggtttgagttcgggtccgagtctgtgtctgggtttgtgtccaggtgtggaccctgatctgggtctaggttcgagtccaggtccaagttcgggtcccgagtgcgggtccaagtttgggtctggctcaggatctcggcccagatctaggtccagcatttcgatcccagtttggctcttagtccgagtccaggttcgtatgcggatccctatcttgatacaagtctgtgtttgggatccggtcccagatttaggtccacgtccgggtctcagttccgttcttggtacacgaccgagtccgggcccgacttccagtctcaatttgggtcaaaggctaggactgtgcttggttctaggtttgggtccgggtcctagtcacggtgctagtcttgttctggggttctggttcggcgattcttcttcaggttccaattttgggtcccaggtctaggtcttgttcgggtttggttcttcgtctaggttctggtccttgtttgagtcccagatctagacaccgacta

SEQ ID NO: 264829 - DNA, 609 bp, Cannabis indica
tgatccttgactattaagattgtaacaatggataatcatacgtatccatatcgtggtacatatagagtgttactatataactgagagtgtattcaatttccaagtttttatagtggttcaatgaggaattaataagtcgagaatttactggtgaattctagatctacttattgaaagctcagttatataggcctatggtcccccccactagttgggataacactgcttgcagactcagttaattgattttagttaatcaattataattctaaaattagactatgtcttatttaagaactttcactaagcaagggcttaattgtgaagaaaagaggtttcggggtcaatttgttaattaagaggctttgtatagtctaatgaaaaaattacataaatggaaattttatttagtaattaattataattataaaataaatagttttgatatttataaggttgaattggaaaatatagtattattgaaaagaagaataagtggttggaaaaaagtggcaaaaattgtaacgagtaattggtctcactaatgtgtacgaccatatgttaattttgcccaatattttattttttttaatccatataattcaaccc

SEQ ID NO: 264830 - DNA, 801 bp, Cannabis indica
caagctttggttgcttagagcctagttctttgcctaccaggaaatcgcttttgggttcgtattggagtgtctgagcatagcgttctctggctttgttggtctctcctataatatggggtctgccaatgttgacccgtaagtgtcttgccatctaaggtttgggtagagttggtgctacttgcctgtactcatggccaaagatggatgccatcctttggagatggagaccagcctccggatgcagagatcagtcttcagagatgcaggtcagccttctaggatggaggctagccttcagaggcaagggctagcttcagagatggaggctagccttcggaggcagagatcagccttcaaagatggaggccaaccttctgggatggaggccaccctttggagatggatgctacccttctaggatggaggctagccttcgagggtaggggccagcttcggagatggaggccagcattttgggatggaggccagccttctgagatggaggccagccttctgattgcctgttgctaactccccctgttgggatatctggtcatgccttactttgggagttttgatagaagagttaagctacacacttctcctccttcttccttagacttcatggcataaagagatctttgaatttccctctttttccattacgttggtttgagtcatcgtagttgcgcgtgcctccaccattctcatttttttagaattggtagagatcgtttgtgctggtcggcatgctggacagcgctatgaggccctatgttgtttgtcattatgcttgccagc

SEQ ID NO: 264831 - DNA, 638 bp, Cannabis indica
ttcctataaaaaatacaagttttctctttagcacatatagattagacatatagaatctctaacggctcttacaacagttttaaccccactgtttagacgagttctgcatatgctaaaatcagaatgaatcaaaattattgctatggttgtgagagaatgttgttcatatttatgaatatagtttggtttttttaatatttattgacactatagttatggatgagaatcagccaacgcatgagataaacgtttagttctgtccatttcaattactatttttctttcatgcctcgtctctaaaataaaacctcattataatatgaataagatctgttagatcagtataaactatttttctttcattcttgattacaaatgatttcacataaaatatagaattagtgtactctgtacacaaataagcattatgcaaaacgaaaaggtagttgtgctttatatataatggtgttttgtctcaattagaggctttcacagttcagtaaaatcttgtcatagatttcctaaatattattgtgttatcatggtgtttctaaaaagactaattttcactaattttaatgctaatatcttcataatatatatcataattttcaatgaaaattacaccttcatcttaa

SEQ ID NO: 264832 - DNA, 1298 bp, Cannabis indica
aaggatcacatccatcgtgaaggacattcgggcttagatcttgattatactctgcgacagacatgaatcaagggttagagatctgagtggaaggggacacattattccgctgcgatcactgtaaggtttcttaactttttatgtgttttatttatcgttttagaagttcatatttaggttgttaaatcaacatacttgtgagtagatctaagatcctggtaaaatatattccaacagtttcgccatctactcctgtacatactgacaaggaattggttatcaagtctcctgagaaatcccctgttgatccaaggtttaaaagtaagaagtcgcgagcgaaaaacatggtgccttcgtcgtcaactaagtccaggaagagaatgtccagcggcagtaatctgactatgagagacttggtcggagacaatgagtagcatttgagtactttttaattggaagaatacttggttattttgtctgtagatgtttattatggaactatttgcattagatgtttatgccttgatatgccttttagaatatgcattgttaagcaattatataatttgtatatgtaactaccttgtgggtcttgtatatgcaagacattaaccaaatgtaaccaaatattgtgttacaatatatgatatgcatgtttagttatgatcttagatattatctgtatgagttagaaataatttttcttattgaaataaatatttattgtgtgattcttacctcaacttaagatgtttattatggtattgtttgcattagatgtttatgccttgatatgccttttaaaatatgcattgttaagcaattatataatttgtatatgtaactaccttgtgggtcttgtatatgtaagactttaaccaattgtaaccaaatattgtgttacaatatatgatatgcatgtttagttatgatcttagatattatctgtataagttagaaataatttttcttattgaaataaatatttattgtgtgattcttacctcaacttaagattttttacactatacaacctgctattttgcaactatacaaaaattgtttgcttgtaataatttatttttattcatattttcaaaaactatattataaatatgcatagtaaaaaattttatattaaataaaaagaaaaagtttaactcattgtcctttcaactcttcatgataaatattactaaaaaagataaaataaacttttacaagaaaactaaaacaaacattgtttaatattttgaaataacagccattaagaaaaaaagccaactagatataaagaa

SEQ ID NO: 264833 - DNA, 610 bp, Cannabis indica
ttacttctgtttattgatctttgtagtgccaatatgatcaacccacaccccgacccactcctagtcaatgtcttagcaaatgaactctatagtgtgaaaatgcaccctggtagttgcataaactcgcacctattgatgatgaatctgaagttccaaaaggcaaatctacttggaattgaattatcaaaggaacaatgggttcaattcatacttaatagtcttcctccagagtataatgcatttgttgtatctacatgatcaacaattttaactcttccgacatggataagctcgaagcagaattacgagctcatgaacggaatctgattgcaatgccacctcctggttttgcaaactttaatcagaggaaaaggattaagcatgaagcttctaacaaagctgcttcttcaagtacaattattagtcataatcttctatgttcgaattgtaatgaaaagggacatcaagaagaacgatgtccccggcttctaaacaattcaaacgaaggtaatgcttttgtctttgaatcatgtgttttagagaatgacaaatccatatggattgttgattctggatctactaaccatgtttgttcttcattgcagctgct

SEQ ID NO: 264834 - DNA, 908 bp, Cannabis indica
gaagattgattgaactactgttggttacttgtgcaatggattggaattttaactatgtgcttgagtcatgaactctttgaattaaattggatgttgtgtaagaaggtttttcatttagatgtaaaggatttacttttgatgtgtatcactttcattctacttggattgtggaatgttgacttgacatggaatagaacttgtgtgacatactctcttgaagcgaaatccttgatgatttttgtttggaaaatgatttaggcaaattttctttggatcgattgagcctttcgagcttacctgaaaagttttatccttagtttacccaaagttgagccttaacctgtttcaaaattcttaccacttaactaagcttaatttgttatctttaactactttcattctcaacataccttattatgccataagcatttaatcatgtttggagggaatgaagtgttgtaagtgggaaatattttgaaagtaagagattgaaaaaatatttgttatgtgatgtgccttcactataaaaagaaagaagaaagaaagaaaacataaataaatgtgataaattcttcttgagaaaacaaatgtgaacaatgaggtaggcacataaaagagaaaaatgtaatctcttactagtttctttgggatgaaagaatggataattgtgggtgcttgttcggtataattttgcttatggtataatgtagcctaaatgacttctcatctacccgttttacctaagccatgatattataaccgaaaaaagaccttttgattccgagcaagaattgtcaacattagtggagaaaggtatgtcattcaagcttatcgaacatgggttagcggaatgtcagagagtgtagaatgattgtgatatgattgtcaaaagaggtgttttgtgtcta

SEQ ID NO: 264835 - DNA, 515 bp, Cannabis indica
ggatgtgccactgcggagaaactttttatgctcccatggttcgcacgaaatcagtgaaggattgactgtcaaattgttcgccattgtccgagactatcctgtatggtaatccgaaccgacaaattatgctatttacaatgaagtcttgcacttttttggacgtgatggttgccaatggctcaatttctgtccacttggtaaaataatcaactgtaaccactgcttactgcacaccgcctttgcttttgggtaactgtccgatcaggtcaattccccaaaattgcgaaaggccaaggactttgcatctgagttagttcgttgggcggtgcctgaggtatctttgaaaatctctggcatttatcacatttcttaacgtaggccttgttgtcttcaatcattgttggctagaaataacattgccttagaattttcttggataaactctacccagcagcgtggttgccacaaaatctgtcatgtacttctgaaaaaagtcgtgcagcttcttcttgcgt

SEQ ID NO: 264836 - DNA, 571 bp, Cannabis indica
agggtctcggatcccagttatttcagtgttaagggctagggatctactacacagtggatgtgtaggacttctagcggttgtgattgactccagaagacccaaaacatttaggcctgaggtggtcagggttgttaaagattttctcgatgtttttctcgaggagttgtcgggattacagccacaacgagaaatagactttgtgactgatttggcacctggagtcgaacctgtttcaaaagctctgtataggatggctccagcacaactcaaggagctaaagttacagcttcaagggatgcttgatataggctttacccgacccagtgtatcgccctggggagctctggttctgtttgtgaaaaagaaggatggttccgtcagaatgtgtattgattatcgagaactgaacaagctgacgattaagaacaagtatatgttacccaaaattggcaatttattcgatcaacttcaggggaagactgtattttcaaagattgatctgcaatccggttatcatcagctcagaattcgggaagaagataccaaagactgcatttcgcagcagatatgg

SEQ ID NO: 264837 - DNA, 686 bp, Cannabis indica
tcgccgttctcaatggcatacggttgtgaggccatggtcccggtggaaacgttactcccatcccataggaggacgacttacgatccagcaacaaacaaggctttattacaagaagcgctggatcaaattgatgaactccgggatgagtctcaaatacgaatggcagcttatcacaagaaggtggccaaacacttcaattcaaaggtcaaaaatagaaaattcactattggtgatctagtcctaagaagggtctttccaaccactcaggcacctagagtggaggtacttgggccaaattgggaaggaccatacgaaattgaggatgaaatcagctctgggacctacaagctaaaaagaatggacagaaccatactgcctagggcctgaaatgctgatcacctctaaaaatattaccaatagttgaaacaaatacaagtttatgttctgtaaagtaaatttgtaccagacaagtatatgcaacctttaaattaaaaatttgtaaaactgagtgacctaaaatcaattttcatgtcactcaggggggtagtaaagcataccacacggacaaatgtaaaacaggccaaaagtttaacaaagttaaaagctgaatatgtattacaaacatgaatataaagtgttcaaatcccaaagaaaagctcgtaataagataagggcctggggacggg

SEQ ID NO: 264838 - DNA, 1314 bp, Cannabis indica
gtaaaatatttccaacacccatacacctatttacaaggcttactagatgagtaagaacgttctactaaggatacgaccatgtaccatgtaccacatgcactctgtataccttcgtactagtgtaggtagggtatggaccgcaccttgagtactgttaagtgttgtaccacaaacaccttgtacctccccgtacaagtgctagtaacaccacgatgtactttcagacatcatacactttatcaatgcactctgtaccacaaccgtacaagtgttgataatgtatgaatcaaaacatataagcatgcatatacactaaacatatacacacattcaaatattcatattacacattatacacagttcttaccttgtttccaaattcaagtgtgctggccgacctaaacggaaagtctcgtgctagatggatgccctaatcacattatgaaaccgggtaagttatatgatcaaaaccctaatcccgagaaaccaaaacccacaaccctaggttctgttatactccctagaggttactcaaactttggaattagggaaacacccaaccacggcactgaaatggacaaaaattgaggaaatgaagtgtttgggggatcctgccaggtctagcaaaaccggctagccggtttgcactagttctccccaaacctttcacctcttgctcaatttttcaccaaatgccaccaaactttccagagtacctaaacaatgcatatacaacataatctagccagtaattcacataaaaactcaatgaaacaaattatgccattagagatcaaagctttgaactcaaagctccaacttgcataaatccaacacaacacactaaaactagctgtaagaacttgaaaccaactcaaaagaaccctaaaattcgaatcctaaacacctcaaaccctaacagccaccaattcttaaaatcacaacatgaaactaattaaaaccttgaaaaaacttagctaaagagggtctagggttaccttagcttcaagagtgcttgattccttagttgaatctcagaaaaacacaaagatgaaggatgtttccttctggtttgcttcagctgaaagagagaaggagaaaggaaattctctatttttgttttttttctttcaattcctctaatttccaaaaagaaaaggatttctaattaatccttaacttcactaattgccaaatgtcactaagctaggcagccacctcaacctacacttagcaaaagactaaattaccctttaggttaaaacttaaatatttctaaagctaggggtaaaatggtcaaattccataaccccg

SEQ ID NO: 264839 - DNA, 921 bp, Cannabis indica
cctattattcaaatctaggaacttgtgcaagccaaaggaactcttgcgacaatagagaccttttggttctcttcataaggctataaatactcccaaccacattcgaagagggggatcggaaaaaatagcataaaatattccttgtaaagaaacaccactatattaaatagtactgacttgtggactaagactgattaatgtcccaaccacgtaaaaatacttgcataaacccttctaatcattttgcacaactttcattaattagttgttgaaaatctcagctaacactttgtaatactttttttgttaaataattttttgtgccattattgttatgtgacaccttaaggtgttcaataccatactgattcacatacacaataattaattaacaattttttaaattaaaatttgtagaaacttatattgaaatgtaccaataataatatgctatattttgtggtgtttggcaccttaatgtgccatttaacattgtaatgattaatatgtacatatctttattagttctattatcattttctttttattttttctttatttattatgatcttcgtactatatttttagtaaatgatttgttgtattgtaaagtggtaccttaaggtgctcaataccatatctatgtgtaccagttttctaaataatttagtaaattaaaatttacaggagttgatataaaaatgcactaataacggtatgctaccttttgtggtgtttgacaccttaatgtgtccattaacattttcgtaattaaaatgtacatatatttattaatttcgattagaattttaatttttatattattatagcaagaacatctccaatgtaatgtgtaaaaattgtattgtatttggcaaaaaaaaaaaaaaaaagaattgtaatatatttacatcaattttt

SEQ ID NO: 264840 - DNA, 1933 bp, Cannabis indica
ccctgtactctgccacaagtgctttaccaggttttggttcttttcccagtttaataaatggtcatgcttcaacaccaggaagaggccaatctcttataaatcatggtcgagactatattctacttggggtaaaaaaatttcagtgctagctatgccataaacttggccatacagtcactcacagcttttacaaattcgataagtcttttataggacctgccactttttaaacctttcctggaagtgcacacttagctgagatgcctcccttgtatgctagccctgaaactgttgttgatgcatcttgttaccctgattctaaagcaactcaccacctcactcctcgttcccaaaacatgcaatacaacaaggattacaatggaaatcactaaatccacatgggagatggatcaggtttggctatcaacaatgttggtcagtcatttttcaattctcctttacattctcagcagcttgttttacacaacttatttcatgttcctcacataacaaatgatttgctaagtgtttctcaatttgcacaagacaataatgtgtattttgagttttacccttttcactattgtgtagaagtacacgactccatgaagaccttgttggttgggaagcttgacaggagcctatatcactttgattccattaattgccatctaaccaaaaatccagtgaagcctccatctgcaccatcctccccaaccctgtaaattcgaagacctatagtagaatgtaacaatcatcaaactcatgttcataattcccaattctctctttagcataatagactaggtcatcctagtactaattaatgtacagtatgccttaaaatcttgtaatatatatgtaagcaataaaactgagattagatgttcaaatttgtttcctgcttcttgtttagggaagcctcacaaacttcttttttcaaattctaataatgtctatactgaaccattataattgcttcattctgatttatggggtgttgcacctgttaattcctccagtggatacatgtactatattagctttgttgatgccttctcaaggcacacttggatctacatgcttagaaccaagtgtgaggcattaccaacctttattactttcaaaacattggttaagcttcaattaggtatcaaaattaaacaaatccaatcttactgggggagaataccaagctttcaccaatctcttacaagaacatggcataattcatagagcctcatgtcctaacacccatgaacaaaatagagaggaagcatatgcacatttttgaaagtggtttagcacttctagctcatgcttctttaccacttaaatattgggatgaagcctctagggttgctgcctttctcataaatagaatgcctactccagagttacatttcaagtctcctcttgagattttgtttaacatacaacctgactattctactcgtaaggcctttaattgcttatgctatccaaatcttagaccctataattgtgttaaactccaatatagagctataccatgtgtcttttttggttttagcatatcacatacgagatacaaatgctttttcaaagatggcagactctacatctcaagggattttccttttgatgagaatgtatttttgttgtaatttcagcggaaataaccttgaggattcaatcataaaatctgcaatgaactcaaaactttgacagtaaaatgaacataaaccaattaatctccacaatgaatcaaatctgaaatcaaacaaagaataacacacgattttatcctggttccggtcctagagatcaatatgatccctggccatactccagctgagaaacatcaccaatcttcattatatgtgaataagagagcaacagtacaattacaataaccagagcaaatcacagctcagatggtactcgatacaca

SEQ ID NO: 264841 - DNA, 2009 bp, Cannabis indica
tcacgaaggaagatagagaaaaacgtgaggtatcctcacgtcgatccattggtgataaccattcaactcgccaataagaggatcaagagagtagttaaaagacaatgggagattggtaaatatcctttataaagagactctaaagaaaatggggctcaaaaaagtcaaattaaggccttgtatggtaaacctttgtggattcatcgaagatagcatcggtagccttgacataatcgagctcacattaaccttagacgaggcacctttatctactactgttatgcaagacttcttagttgttgacctgccctcagcttataacatattgttgggtcatccagcactgatcggaccgggggcagtcagttcgatcaagcacctatccttgaaattccaaacaccagatgtcgtgggagtggtccgtggcgactagatgctagctcgcgattgctatcgcaaagagctacaacatagaaaagtcggtcatcagttgatggcgatcttggataaagaaattgagtagaaagacaaagatcttgacccccgagttcaagaagagagaaatctattgaaaccaatcgaggaattggaagaggtcattctcgacctaagaaatcccacaaagtgtgtgtacactgggaagaacctggacgagcagctcaaatagcagctaataagctttctaaaggcgaaccaagatcagttttcctggggccatggagatatgataaggatcgaccctaatattatctgccatctcttaaatgtagatccaaactatccagcaaagagatagaaaatgaggcccttggattctgagaggcaaggggcactaaaacaggaggttgacaagttattagccaacgactttatacgcgaggtgctttatccctcacagatagccaatcctgttctcgtcccgaagcccaacggaacttggagaacttgtattgacttctccgatctgaataagccgtgcccaaaagactattttccacttcccaggatcgaccagttagtggatgcaactgctgggcacgagcttatgtcatttatggacacatactctggatataaccagaaaaaaatgtatgtccttgatcaagaacatacaagcttcgtaaccaacatgggattctattgtgatgaagtcatgtcgttcgaactgaagaatgctagggcaacgtatcaacgattggtaaatgaaatgttcgcaaaccaaatcgggcaaaacatggaggtttacatcgatgatatgttggtaaaatcgataaagagtaaggatcatacctcagacctcgcagaatgctttgaaatattaaagaagtataacatgaagctaaacccaaaaaaatggtcctttggagtttcctcaggaaaatttttgagattcatagctaacgcgagaggtattgaggaaaatcttgaaaagatcaaggcattaatagacatgccatcatggacaaagccgaaggaagtacaagccttgacaggaagaatggctgcacttaacagattcatttcgaagtccactgataagtgtgtgccgttcttcaacatattacgaggcaacaaaatgtttgagtggacaaaagaaagcgaggaggcctttcagaacataaaaaggcatctcgcaatgcctctagttttggggaaaccaataactggagagacgttgtttctctatgtagccatctcggaagatgcaattagtgcagctatagtacaagaagagggcaagcatctgcaacctatttactacgtaagtataaggttactaggggaataatccaaaatatacccctctaagaaaaactcgcgttgtgcctagtccatgcatctcgtaagctacggccatctctaggctcaccccataaaagtgttaaccgatcagcccttgagcaaagttttatcaaaaccaaatgtttctagaagattgataaaaatggtcgattgaactgggatagttcgacataacataccatcatcgaacatccatcaaaggccaa

SEQ ID NO: 264842 - DNA, 752 bp, Cannabis indica
acttcttctccttggactctcagctttaattcacccttctgaacatcgatcaaggcttggccagttgccaagaatggtctcccaagaatgattgggacattgctatcttcttccatatcaagaacaatgaaatcagctggaaagatgaacttgtcaactttaactaacacatcctcaatgactcctctaggatgggctagtgatcggtccgccaattggagagttattgtggttggctttgcttcacccagctgtaattttttaaacactgatagaggcattaagttaatcctgactcccaagtcacatagtgcatttattccttcaattcttccgatagtacaaggaatagtgaaactccctggatctctgagtttgggagggagtttcttctgtagaatggcgctgcactcttcagttagagccactgtctcataatcctccatctttctcttctttgacagaatttccttcataaacttcacataacttggcatctgctctaaagcttcagcaaagggaatgttaatgtgaagtcttttgaagacttctaggaatttggtgaactgcttgtctagacttgattttctgagcctctgaggatagggtattttcacatggtgatcaatgctaattggtggagactgttgtggttgtgttgggctatcagtagccttctctgatgttggtgttggggttggcattggttgagcttcattctccttttctccatcagctggttgtggcagttc

SEQ ID NO: 264843 - DNA, 1316 bp, Cannabis indica
gggtccgagtctgtgtccgagtttgcatccaggtctggaccccaatctgggtccaagttcgggtctaggtccaagttcgggtcccgagtgcgggtgcaagtttgggtctgggtcagaatcacggttgagatctaggtccagcatttctatcctagtttgggtcttggtccggtccaggttcgtatccggatcaagggtttaacattaggacctcgcaacccaaaaatccgaccacccgccccgacccgatgttgaaaaagccgaaaaaaccaaaacccgtattgtcgggtctgctctgaactgaagaagcataattcaggtatcgggttcgggtttcaaaaagccattgaattttattcgggtctgcacccgagacccgaccaaaatgtattatatataagtatatatttagtaattattattttaattttaatattcttaactgaaaataaaagcaaaagtcaaaaaaaaaagtaaaaagtaaaaacataattaatgtatacgcatccccatgtcactatcccatcccattatacaactattacctgtataatcatattcattactaataacctttggtttctcctcccaagtcccaaacccaatcgtgatctgttcttctcccaagaaaaattaacatgtaaaattagtttatttcacaatttacgcagcccaaataatatattaaaaatagaaaaaattgatatttttaaaaaataaaatatcatttggacccaaaaaatctttcaatcggatctggcccattgtaacccgaacccgcataataataacccggtacaccagacccgaaacccgctacaacccgaaattcgaaaatcgggttcggttataagttttcaagacccgacatccgaaaacccgaacccgacaacccgaaaacccaaaaacccgacccgtgtgcagccctatctggatccctatcttggtccaagtttgtgtttgggatcgggtactagatttaggtccaggtccagatctcaattccggtctggttacacgaccgtgtctgggcccgagttctagtcttagtttgggtctgaggctaggtctgtgttcggttcttggtttgggtccgggtcctggtcacgttcctagtcttaaggtcatggtttggcgattcttgttcaggttctcattttgcgtcccaggtcttgctctgggttcgggtttggttcttcgtctgggttatggtcctagtctgagtcccagatctagagcaccaactactggactgttcctaggccccgttaccgatccgagtcagatctggatcactgtcacgggtctcggtctcg

SEQ ID NO: 264844 - DNA, 1870 bp, Cannabis indica
acataaggattccaggtaccatgaccctgatcaaaatgaaatggcatagcatgataattgaaagcagatcgagaatcaatcgaagaaggatatggcaatttgttatgtggattgcaatacatatcaatgtttacagaatcaagatcacgaccatgactatccattttatgttcctgagatagaagaagtggttcgatttcagcgactatgtatggttaattttgtgagttaataaagatgacaaaggtttcatactctaatggataaagaccattgaaaataactaacatatgttctttaacaataacatggtgaccaatagaactaagccgatccacaacaatgttcattcgtaaaagatacattggtaaagagagctcatttcttgatattctgcagttgattagtaaattgatcgatcttggcacaggtttgagtggagaagtatatctcaagagtttgcaagacctgagttgatgtgttttcgccaacgagtgagtactccttcaatcatggaagaaaggtgtcaggagtataaaagttagtcttgttgttcccactaagtgaacaagggattgatctagttcagagctagatcttgagcagagagaaattgttcaagcgaaggaacctgatatgagatatagtcttggagattgtgtcctctaaaggtggaaagcacttgacaccaaagaagaaagttgttatcaagcttcaccgagagcttgtaagaaaagaataccagatgaaacaaagtgccgtggagcgagtaggagcagctgcatttgccgatggatcgtcaagaacaagaagagcaaaagtagagaacgaaagagaaagagaagaacgatcttgaagagagagaaaaaagaaataaaaaattaaaatctaataacaagttttttactgcactcgacacatttgtacttcattccaccctttgtcgtgtaattttattttctcaaagggatgaaacctattttagttttcattttgtagttctaaatataatatatatgtacgtatcaattgattagaataaaatcatacaaaaaaggaaaaaattaaaaaattaaaaattattgatcattagttattgatcattatcagttgatcttgaatacgtattattaaaaaaatttgaaagttaataattgttattggttattgatcttggatatgttttattgaaaaattaaaagttattaattgtattgcttatggattttgaacatgtgttcgcaatcgatgttattgattattattggttattgattttactatgtatcgttaacaaagttagtacattatttactggttatattgatctcaaatatgtgttactaatacaatatacatatatgaaattgttggttactttcaagttgtctctaaaacatgtaatttgaagatatacagatgaaatgagaatttagatgtgatgtataaaccataaattctcatattctaatatttcgtactattcttgaacttagtaattaattatctaaacatttattttagaaggagtgaaagtttatttttcataaaataatagagttttatcgtatatattataactaatagttaaacaaatttaaaaaattaacaataaaaatttaaatatgatagtaaaatttattaatattaattggtaagaagagtcttattaaatatttaaatttaaaatttattttttttaaaaaaagaagtagttaattataattaatttaattctaaaaaaaaattatttattaacttaatattacatgtcaacaaaaataaaactatacataaaattaatttaatgggataagttgaaaaataaaaccttttttgtatttattaatcaaaaataccttcatattat

SEQ ID NO: 264845 - DNA, 859 bp, Cannabis indica
gagcctttggtgcttctactctaagttgagggcaatccctcttgtagtgtcctgacatgccacactggaatcacccctaccctctacactcacccagatggtgccttttacagatggggcactctgggtaggtatatcgggtctcagaactaccctgacgactgcttcgaccctagttgccccggaacctcttgttctgacccgagccaccggttgcagtggatgctttccttttatagtccatggtcgaaccactacctcccctgggaaagcctgatgcaggaggggtaggagcgctgccacccactggagtcctagctgactcagtcatacacccaattgcgccctgagctcgcagtgctttttccaccatttcagcataggtggttttgtcgtccgtaataatcatcaagtcatgccgaatcttcgcattaagtccatccaaatacttttcctttttactgaaatcggttggcacaattcctgaggccacccttgcaaactgatcaaactgcgttgtgtactcagtaatgctcatgttctctttctgggtcaggtgagtaaattcttttctcttggcacttctaacggcctcattatagtactttgcattgaaaagttcctggaacttttcccaggtcatcgtggtgacatcgtgtatcgtagacaccatgtcccaccataccaatgtgtcctcttgaaactgaaatgtggcacacgccacgctgtcattcccggtgacgcccatgaaattcaatatcttagtgatcacagttagccactgctcggctttcatgacgtccggacctttcatacagaggctccattctattcatcgctaacactggttcgacctgga

SEQ ID NO: 264846 - DNA, 1195 bp, Cannabis indica
ccataaaaattaggaccgagacccgacctcaaacccggaccctaacctaggacccagaccaggaccggggacccaaagtggaactagactaggaccctgacccctgactcattgcttggaactgaaccgtagtcagtgtttggatcagggacccatacccggactcaaacccagacccggactcggaccctgacaaaaacccacacccgtaccccagacttgggtccgagtccgacactgggtttgagtctaggaactagaatctgactaagacccagaactagacccctaccgggatgcagacccgaattaaaactcgaatcgggactcgggacacgagcccaaacccaaacatggacttggaccaagacccggacccaggacctggctcgggattggagactcagaccttgactcaagacccagaccaagattggggtcccaaactaaaaattagaaccagaatcgggacccaggactgggtatgttacccaagccccgaccccagtctcgatcccagacctggaccaggacacggactgggacccaagatccaaatcggaacgagaccgggatctaggattgggatacggatcttgacccacgacccagggcttggacccaacccctagtgggcgtctagatcttggaatcgtaccaagacccgaacttggaaccacttccaaactaggacccaaaccctaacttggatctgagaatcaaaataagaataagaactagaataaggatcgttgaacgggaattagatctggacccaaactagatctagacccagaactgaacaatgagcccgacccaaagtgggatcaataaccagacctagacccgaacccaaacccagacttgcgccaggacctgcgatccagatcccgtaactgaagacccgtgacccaggactaggtccagaaccgagacctgtaccagaactcagacgctgacccaaacctagacccagactaagacccggacccaaacacatactgaaacttggacccagacccagactcggactcgtacaagaactcggactcgtacaagaactcggactcgtacaaaactcggactcgtacaagaactcggactcgaacccgcgacgtggacctagaccgatatcaggtatgggacctagacccgaactaggaccaagacctgaaccaggactaggactagaacc

SEQ ID NO: 264847 - DNA, 2355 bp, Cannabis indica
atttgcaaatagttggaatatcatattgtttgctcaaatctcctatccgtatcaaatctcacagttcaaatatcaattcaaatattaatgggatttgtattattattattttattatatataaataatattttattattttattaaataaaaataaaaaatcacccataaatttctcataaaccaagaatttcagttatataggcacactttatatagaatagatatatatataatctgaaacttattttgtcacctcaaataatataagtcacatttaaattcttataatattaacatgaataatgataggataatagaatgttaaatatctcatttcggtggcaatcgaggtaagataaacatgattaccaaaattaaattattaattccttgattttaaacttaatatttattatttgataaatttttttgacaataaaaggatgaattcgaacacactttttctttgtgaacaaaatgtgtgtagtataactagattgtgttaatgactactattaaatattaattttttttttattaagtaaaaaataacttcattaatcacaagtaaaataaacaccaacttacaatcaagagtaacaaaccgctactaaaaaaaaaaaaagaagcagattgagtacttctttttttccaaattacattcaacaatctaagttggattatatttttaactttttcagcaatgatcctaacagtagagattttctctcaaaaacgtaagtgttcttgttcacccaaatgttgtacactggtgctgcagccgtagcaaccgaaatggcctcaatctaacttgttttcttcacatccaatcaatgcagccagcttgaaaacttagttggccaagctgtgaacccaaaccatttaaaaattttggcactaaccatttgagaaagagagcaatcaaaaaataagtgctcatgtgattcttggaccagctcacacacagggcataataaagaagaaatgtccacattgatccgagctaaaagatctcgggttagcaagttaaaattcactgattgtcatagaataaatctatgcttaggaaggttgagcttgtgccatatatttcgatagttcaagactctaacacaggcaagaaggctattataaagtctattggaatgaaacttaccatgggcacttgcagccaaaatgtctctttttttgaagacctttctcaagttgtaaagctttctccaatgccagcttaagttttgtttaatttgatagtcccaaaaacttgtatgttttaggtagatcacattaacccatttaacccacaacacatcctgcttgctagagatagtccataagtatctagcaagagttgcctgattccagtcagaaccattcctaaaaccaatacctccaaaagctttggaaagacacaccttatcccaactagcgaaatggagattagatctatttcctttgtaaccccaaagaaaatcccgacaaaggtgctcaacttcctttgtaatgctttaaggaagaataaatatattcatccagtaattcagaccaagtaacactgaatggaccaactgcactcttcctgcaaaagaaaagtgtctggtagcctaagtgtgcagtttgagcttaatttttgaaattatggtctcacaatcagttttcctccacttgataggtcttattggaactccaagatatttcaaagggaagcaaccctcctcaaaatgaatattcttcaacaggccttgctatctttagcaacaccaccaaagtagatctgagtctttcctatattagcacaaagacctgacatagaaatgaactcatccaaagcttttttcagaactgaagtagcttcaaaagtccctttgcaaaaaagaatcaagtcatcagcaaagcacaagttgataatttgaagatttttgcattgagggtggaatttgaactcaggattcctggctgcattcttgaggtgtctagtaaagaattccattactatcacaaacaacagagggaagataggatccccttgcctaagccctttcatccctttgaaggaactctgtaatctttcattcaatgataggggtaagaggtgtttctaagacacatcataattcaattgacaaatctagcaggaaaacaaagagctttcaataaatcctccaaaaaataccagtcagcagtgctgtaagctttgtttagatcgatcttcatggcacatcttggagaagcattcttacgaccatactattaattatattttaatacaaagaaagtcgaataagtctcattaggtaaagctacacaagaacaaacctatttggtaaagctatatataaaattaaaaaaaaaa

SEQ ID NO: 264848 - DNA, 608 bp, Cannabis indica
aaaccatccgcttcggcaagtccacagaagccggaagcgtccggaagactcctcaaatgggccatggagttaagccagttcgacatacactacataccgcgcacttctataaaaggacaagcactagctgacttcataatagagtgcaacgaagcagaagctagcgcaaacgtaccaatacaacaaacccaagtatggaaagtattcgtcgacggagcgtcaaacaaaaatggatctggagctgggatagctatgatatctcggaatggacttcgactccaggcggctctgcgtttcgaattcccagcttccaacaatgaagctgaatatgaagcctgattgtagggctgaaattagcgaaaactgtgggagccacgagagtagaagtcttcagcgattcgcaatcggtggtaaaccaagtgtcgggagaatatcaaacgcgcggagagaaaatggctgtgtatgtagcaattgttcgggagctactccatgagttcacagattataaagtggaaggaatctcaagagaaaagaatacccacgcacactgttgttggaaatattttaccaggatcaagatttactaacaagtatgtttcattaacatc

SEQ ID NO: 264849 - DNA, 688 bp, Cannabis indica
catgtttaggatgttaaaaacatacttgttagtaaatctagatcttagttaaatatattccaacaattacctctaaagtttcttgaattcccaaaagtcttgaaattttttgaaaaaatccttctccctttaccaatagatggccacgactacaacaagaaattttgggctttggtgaatttcatgagtaatgaagtggatacttccacaaatccatgtggcattctatgcgaacagtggcaccccaaaacacatgttttcaacacttatcaccaatatcatgaatttcaagccaagaggtgacatcccttgtcactctattttaaattggtgcgtccttagtcgaaaataaccattttcccaatgattgtgggatttcggcctagaaataaggaaatttttgtagatatttattttcttgtaatttttattcattagaaaagatgatatacgatttgttagtgagacaccccgagatgtgggggatcactaacaaaccctacaacctatataaggagagtaagagactgaagtgaagggaacttctttctgacttacttcacggttaccaagaataccatacctatcccttcatctttttccttgagtccaaaatacttagtcgacaccaagacctcaaacaccattgatatacatttattttatctactttattggtttattgttc

SEQ ID NO: 264850 - DNA, 496 bp, Cannabis indica
ttcattttttccatatttttgtaaatagccctttagaataacattttctgtgatgtaaaaatttgcatcactataaatgtactacttttttatttctatttatatcatttttatattgttatatttaattttagcattaaattataaatcttttacttttattatttatagttttacgtgataaaataataataaaattattataattttaatattttaaataaaaaaatattaattatatattaaattttgtatcaagttttataatggtttatttgtagcataaatattgatgcaaataaatcacaaattatattttgtttcatgatataatacaatttttgtatcttttattggagatagtcttacactaataaaaataagattcaaatattttattgtaaatgtgactgttttttcttaggtgcgggatataattattggaatttaatttagacattgtgaagacaaaataacaactgtccatgacagttat

SEQ ID NO: 264851 - DNA, 1234 bp, Cannabis indica
atattatatcatattacatcaaggaatagttgatgttgctgtacaatcagttttagcacagttagtctatgtatttttccttttgatttgcaacatagtcaaggccactaatatgaccctttaccaacatagtcaagaccaataatttttttggtcactattaggacaagttgggatctagatataccatgttaccgaaaatcctcttaatttcctctgtgatgtttgtctagacaagctcccatgcaacggttgagattgagatttcagaagacatgcaattggtccactttgactttaacaggtatgaatgtatttttgattcactaccaagagacactaatgtttaagtactaagataccaacatatcatcaaaaccatatttttgtccttggcacagtacacccttctccttgcacgacgatgcttacattctaaagttgctaagacgccaccaactgccagcagaaagcagagacatttcaagttcatcatcggctgtctcgtcttcaagctctgctcttgcatgtggaggcaccaagccattttattggaactctgaagcacacacacaaagatgaaaagcatacgcatcaacaatgtatgtatacgagagcataattttgatgtagtaataggatatataagaaaatatccatcattcatacatacatgtatagattgtgttccttaagtaacgatgtattcaatcatgtaatacatagttgattagtactactactattgatactcgttaattaatcaacaaggggacacacaacacagtgactgatacaacgactattgatttttgagactcatccactttagattattttcttgttttcaccttaattaagttttggtggtaacctgattagctttttgattaatatagtgaaagttcatttgtagttttgcgttggatttgacagcatcaatcatcaaacatggcccattatccctatttattttcattttctttgtgggcaaggagaattttcctagtgtgtgcatgcatggcgttaaaataaaaattgttctaaccataaattgaaaactatttctctctcaaacatctttttcgattgataaagaataccactctcatactatagcctgatggatagtttttggtatccacgtaacatcgcatttgcgcggtgtctttagtatgtaattaacagtcagttgtttgtttgaattgaaatatttgaactttatttatttttt

SEQ ID NO: 264852 - DNA, 1057 bp, Cannabis indica
atctggacctagatgggggacttggacccaaaactacgccccaaaactggggttcgagacccaaaactcgacgccaaactcgagacataggacccgaccttagacccgaaacccaagacctgactaccgggacacaaccccaaactcgaacccaaactcaaacttaggactcggcccaagacctgggacacgaacttgaataagactgggatccaagaccgagatctgaatttgaacctgaggctttgacctgacccgtaatcagtctttatatccaagacacggacctagattcgtacccagacctagactcgaactgggatcaagactcgatcttggacccacaatcagaatcgaaccaggattggaacgagaacccagacctgggactgtaacaggacccaaacctaaacccaaactcaacaagaacccataccacgacaaggactcggatcgggacctgtgacttaggacctaaactaagaccgagacctagacccagtctgggacccagacccaaacccagacccaaaaattagggccggaacccaggacccaagaaccaaactcggacttgggacccaaaacctggacctaaactgggactgggactagaactcagacctaaaccctaaccgagacctggactcgggccgagaacccgagacctttacccgaactagaacacaaacttggacctaaactaggacctaggactcgaacatagatgggggacccggacccgggaaacgggaccccaaactaggaccagaactggggccttaggtccaagtccagttacagttctaggtccaagtcctagttccggtcctaatcttgggtcctggtctacttccagtttcggttccaattttgggtcacaaggtatgggtttgggtctgggactgggttcaagtttgggtctgggactggattcaagtctaggtcttggtttgggtccggagctgtgtcctagatccagacactgactacaggttcagtccatgcctcgagtcatgatctggatcccatcttgagtcccggtcttgttccattt

SEQ ID NO: 264853 - DNA, 757 bp, Cannabis indica
attgtaactaaaaaattgtcactaaaggtaacagttttttgtagtgacgatttggagctgctctagcagcaatttgttgaggaaacctcacttgagctagagacaaattttgagattaatgttgatgtgtagcccaaaatttcgtattatataattatcaatttataatttgattaattatttaattgaatgtggaataataataataatggaactgaaatagttattctgtagctacagaacaaaactttgtaattgaagaatagaacaaaaaattaaaaatgtagaaaaataaaaacatatgaggttttaatacatgatatcaaaaatccatacagattgttactagtccactggactatgcagacccgaccctgggcataggcgggctaggcctatgcctagggcccacctaacctaggggccaaaaaaaatcctccttttaacattacacatttttttattgattttgaaaataccacattttactctaaataagggccaaaaatattttatttcctatgacccactaaatttcagaccggccttggggccatgcccagagataagattcattagatagatctcaaaaacgcaaagtaattgacttatgcgtaaatagactccatcttattatatgctgcaagcttaatgtattacacattctcaaatgaatattgttaaaacttcaagtgctcgaactcctttcgatttgcttaattgagagtcctttcttcatcccgaggcaagacttgag

SEQ ID NO: 264854 - DNA, 4683 bp, Cannabis indica
ttcacagaatgagtagtgaacttaggaccggtaccctatagctagtatacttccatcagtatttgtgtcacattaatgtcagaatatttaacaatttattttagaaattaaattggataactaaaatatttattaattaaatggtgaccataattagaatattcttaattaattacattttataaacaaataaagtaaattattaatttattaatgtaaataaaatattctaacattcactcatttagttagcatttaaattaatttactatttaaaactcaataattatcctttttatataacaaatatatgaatatgcaacatgttttcaatatatgactagtaaaattttttttatgtattaggatatttttattacataataatgtacttaatatgacaagatatttaaattaataaatcataaattttatatttattctggttataatgtgaagataatttacaagtaattttgccactaatatccctttaaataaatggttactaatcttctattcagcatttcaataagttttttttgctgaataaattcacaataagttatttcttaaaaaaccaatgagcctaggttattctaaaagatatttttagaactaaaagtgaaaatacattaaaaactcaaagttggtgctatacacaccattaattaatgtcctttagatcctcgaatgagtccaatatttattgttaaaataaatcatggcattgacaatcacacatttatgtggctagaatttaatgctacagtgtagcagatactaccacaaaatttttttatcagaatcatattgaaatcaaaagtaccaattctcactgatcttgatcacttttcatctataaatacaaggccattactcccatagctgatcattacccaactctcacaaacatttcttcttctaaaaatcaatccctcccctccttacaatggatgatcactcttttcctttcaaaacattattcttaacactcatgttggctctcttaactttcctactcataaattctgctttcaaaacatttctaaaacacccaaacaaaaaaaataccaataaaaaaagtagtacaatcactccctgaaccatcaggggtgttgccaattataggccaccttcatcttctgaatggtcaaaaaccagtggcccgaatactcggagccatggctgaccaatacggcccaatctactcactcaggctcggtcagtaccgagccttagtgttgagcaattgggagttagtaaaagaaagcttaacaaaaaacgataggcttttcgccaacagaccaaacattgcaattggaaaatacgtcttatacaacagtgctgctttcgctgtctcctcttacggccagtactggcgcgagcttcgtaagctcgcgacactacagctgctctcgattcacagaatcgagctgcttcaacacgtgagagtcgccgaaattaactcctttttaaaaaatttaaataccaaaaataatgtaattcttcctctaagtgagcttttagagcaacttacgtttaacataaacgtgaggctaatcgcgggcaagcgattttcgccggaaacctttgaagagaagacgaccgaggtgtttcgatttaaggaagctattaaagaagctttgcatttggctggggtttttgtgtggtcagatgtgattccttggcttgagtttttggatgttcatggacatgttagggcaatgaaaaggacttttaaggagcttgatttggtcatggggaattggctggaagaacatcgagaagctagagctaataatagtgataataacaatggtggtgatcttatggatgttatgttatcgaaccttactgaggatgatgcagtgttgtctggttatagccgtgatactgttatcaaagccacttcattggtaagtttttttttacattattatgattattgcatgttaattttcatctgatttttggtaactattaatactttgaccaatttattatttgattgatattgttaagtcttacactacacatgagattcataataattatatatacaaataagtcatagtcatcatgtggcaattatatataaatttttgaataaaataaataagcatgagttacacgccacaaactcacccaatcacacttgagttatatatggcttcaacttttccattaaattattttgagaagagaattactattactattaggtatttgaaagtttgcaatattatatatataattaaattatattttatacccattaaatgatgtctccgttagatcttttaaattatgtaaattatatgataaacttaagtagagaataaaactatagtagataatttactaaaaaaaatagatatattttaataaaaaaattatacgaagaaatttttaattaattaataaaaaaaatatatttttcaacttatttcatattatactgatgtgatgtagtgagttgtgggagcctatattatttaattaattaaacgtgtgatatttaatattaaattacattaatattagcctcagcttttatgatgttttgaagagaaaataagcactattataaggtactatagtgttatttagcacaattaaagtaacatctttgtgatagattggcaatattgtaaactaaaaaactttgacatgacatgtgtccctattttccgcaacataataaaacttcttctgcaatgaaaaatgtagaaacaaaaagaggagggtcccaaattgtacgattaatttgactatacatgtgtgaattgtctcgtaatttattattattttttttaattttcaaacttaaccaattatataagtaaagaagtgttatagttaatctcttaatcaatttttggtatttgagaataatattggaatatttttaaaattttttttacgggagtactcgttataattacaatattattctgtaaattttaaaaaaattcgaataattttaatgctgaaaatagatttgaagtttttttgaacacgaatgataaactcaaatatcactatgaaaaaaattcaaaaaaaatattttgtcacataatttcaaacgtaaaaattaactaagagattgtaatcactattattcatacatttattcacacattcaattgcataacatattttctttacagattctcatcctaactggaacagaaagcacagctgttacactaacatggacaatctcattactacttaaccacccaaatgttttgaaagctgcccaagaagaattagacactcatgtaggaagagaaagatgggtacaagaatctgatattcccaatctcaaatttcttcaatctattgtgaaagaaactttacgcttgtacccaccgggcccattaacaggcccacgtgaggccacacaagattgttatattggtggacactatgtcccagttggcactcgcttgattgtcaacctatggaaattacagcgggatccgtgcatgtggtcggatcctctggagtttcttcccgaaaggttcatgaccactcatgcggatttgaactttcgagggcagaattttgagtatattccttttagtgcgggaaggagatcgtgtcccggggtgtcacttggtttggctgtggttcaattggtgttagctcgaattgttcaaggatttgacttgaaaaacaaggatgattcgcctgtggatatgagtgaaggcttgggcattgctttgccaaagcttactcctcttgaagttcgtttggttcctcgtcttggtcctcaactttatgaatcactttaaagtatttattaaattgtgttaattttgtggatttagtgttagatataaataagataaatccatgtgtttataatgtggtatggtgtgtatgttttttcttgatttgaaaaatactagtaacaaaagtccttggcctatatttcccaatttcttctcatcatcttatttttcacatgttcttgccgatgtgagtgagatggccatcttaattttttatttttattttaatattttgagaaatagggtatggaatttctaatttgactctcttatattattaaaaatttacttctaccaatacactaatgactacaccatccaactaaaaatagatactatttcttttatatggaagcataatttgttagaaaataattgtataggccccctaactttttttttttggattattttagaaatacaacaaaaataaaaaaaaaattacaaaaatatagttgtatgaaattttaaatatttttttttattgtttttaaaattttatttacaaaaaatacaatttttttatgttttcatgttattgtatgttgtattcttgtgattttattgtttttttttttttgttattaagtgtcacatttacacttgaaaagctactcacctgacccaaaactcgaaaaaaaataagtttaaaaaatagggggttgggttcgggtgtaacccaatttgataccgaactaggttaaggtttaagaattttgaaaacacgaataccgaactgggttaaggtttaagaatattttagggtttgattggtttgtgattcaaaaattgtgttttttaatttgtttttaaatatgtgattggttatagtgtgatttaatgtttttgagttttaaaaaattgaatatgtgattggttg

SEQ ID NO: 264855 - DNA, 653 bp, Cannabis indica
tttctctctcttcaaaaccaagaaagaaaacccacaaactaccatcaccaccacactccggtgacccacctacggccactgcccggccccacgcgccgaacaaatcagaagcccaagtgccggcgacctcacccccaagcggcgccgcttctctcgccgccgttagcttgggatcgcaagtcaaagtttgggagttcaaactttgaacggattttccagtcacctccggtgtccgtttgacgagctgtcttcgccactagactcagctcgttaaggagaacaacttacactaaaccattttgcccagttcgctactttttccggtgacatttttgtagctgcggccctttccgacgacattgtgtaccgttttgacaaacggttggcatgggtgtgatctactggtcgaggtggtcgttttgatatacactaccctattttcgacgacgtttccagtacaccgatttttaccgccactgattattaatgtgcatcgcttacgtgaggcttcggaatcccaaattttaaatatagtcatattatatgtcgttggactcagttttgaatgtagaatgcgatgatgataattatttaaccatttgatggtataggtgagagtaatatataagattagtgataactctatggtatag

SEQ ID NO: 264856 - DNA, 1616 bp, Cannabis indica
ttactttctctcactagaatttaactcttgaaaaagctcctcctcctctctaagtggcctaaattctaggctccaatctcctagggatttttgcattatttcaatgatccaagctccccgtccccatcttcatcggaatctagttctaggtaagctttctattccatccctttcacttgattttaatgattttgccatgaattcatgaatattatttcttgattttaacatgctttaattcttacgttagattgtaatccattcggtattttgatccgcatgatagccttatggtgaacaatgtgtgatttatagatgaaaaagaactaaatctgacattcgttgtgattcttggccctttgagtaacaaagaaaatgaagagcacaaagaacatgtttgagttattgaaaaatcacgtgttttgatctatgcacatgttgaccggccaatgagactttgtttgaagcctgtccggccatcggtggctttcatggggtctggccagccatggggattgtgtccttaggctggtcggcctatacctggaactagggttcctggttggcctctaagatgggtcttggggtctaccggcctataggacctgaagccctggccagccaaggccaaggctccaagtaggcagtgagtttttccctctttagaccacgggtagagtcttgtggcggccttagaggcatatacaaatgtggccttgtccgtggtttctcttggaaactttgtatatggctagataatgagtccattatagttaatggtgcaacgtaggacttacagtgtgtcttggtaattgcacctaagatgatacttggtcgtttgtcgacctcatacccttcgttttttctagagatgcgtttgagttgcgtttgacttgaatatattttgagtttcatcaggttgctcacctcccctatttctccatgaaggtagggatcgagtgtcaaaaatgaaggaggtggcaactatgtaggtctcctgctctccttgtactgatggcaaggacaaagtgactttgcgtagggctccaccatacaatccacatgtggccattgtggccataaggggccaaatcatagtgtaggaagagactgcccaaccttctgtcaaggctgagcctaaaatagactccgatactgggagctctgatgcaaaatccaagttggaggaggctggtccagtgggggggaggagatataggacatgttctatcctccctaaccgtcccttgggcctttataatgcttgaggaaatctgctgaatggtcttggcatgccttcagtaataggactagatcatgtcctagaatagtctctcgtgccgaagatattggattcaaagccacctaagacaaggtgggtttagccagcttctgctctttcttgtgaggcctttcacaaggtcattactagtggccttgttaagggtgttcgttgcgagattccttgcaagaattatagggcacacaggccccttgaaggattgctgacatggttagggcgcgacatagaaaatggggttgtgttgctgctttatcaatactttctggacgtcgcagcttactttgagatgtgcccaatgttggatatattttac

SEQ ID NO: 264857 - DNA, 845 bp, Cannabis indica
acaacgttgcataaaaatccaagcaatgacttcacgttaaaagacccaaggttaaaacatcattgggcgtgtgacagacttcaagcaaaccttctcttccgagaaggagggttgaagtcgtgtcatacccccagtgatctttcatgcacaaaaaagtgtcgtccatgcaagagttatgttgaatttttaaatggtagacttcgtcttccacgatgaaagcctaaagttgcataaaaactcaagcgatgacttcgctttaaaagaccaaatggcaaaacatcactgggcttgtgacagacttcaagtagtccttctcttctgggaaggagtttgaagacgtatcataccctcagtgatctttcacgcacgaaaaaaccacgtgcatgggagagtcatcttgaatgataatgtagtagactttgactttcgcaaaaaatggctaaagttgcataaaattttaggcaatgacttcacttttaaagactgaaggctgaaacatcactaggcatgtgacagacttcaagcagtccttctcttttgagaaggagggttgaagacgtgtcatacctccactgaactttcacgcacgagaaactaaatgcatgcgagagtcatgttgaatatttatgtggcaaacttcagcttctgcgtggaaaggcttaaagggcataaaaattcaagcgatgactttgctttaaaagtccatagggtgaaacatcattgggcgtatgacagacttcaagcaggccttctcttttaagaaggaggattgaagacggttaataccccagtgatctttaggcaaaaattgaacgtgcaatgcgagagtcgtgttgaatttttat

SEQ ID NO: 264858 - DNA, 2252 bp, Cannabis indica
attgattcttgccctttttatctctcaccgaattgaatttttggctccgtcactgctgcgttctatgtaggtccgcctgtgtatacagtgaaatatattaaacaagttattaagaagatgttataaagtgttaaataataaaaaaaaaaaaaatgaatttttgtgagcaaattacttacacacctactgaatgttgtataatgttaaacaacctatcgataaaaatatatatttttatttatatatttgtaatatttgagcaaaggcatagtataatgggaaacaacacattcaaactcgttgttagttgttaccctctcggggtgttttgggataaggaaattgcaaatgatttggagtgtgcagtgttacgtggcataaaaattaacattcttctacaaacaaaaaaacaactatgttatataataagaacaacaacatgcggttgatttttgtttcttaagctcgtagaaatttacatcctcgtttaacacgtgggatatgattgttggtcacaaacaacaagaaaaaatcgacccatatgatgtggtgcttaattgtaagtgtaattgtaatatatatataattatttaattgatgtcaagctcagtgttaacatatttagttgaatatatatatgagaagccaactagtttctgccacctataaaaagagactctttctttttcgtgtgggatagtgataacttggctgctctcaccaactaatcacaccttcttagacggccaaaaatgataaatattagcttattggctaatttactgcgatttctttttcttatatattttaatattaattgatttttgattttgtttttagtgacactattttttaattttatttttgtttataaatttcaaacagtaattaaattttaattgaattattaatatgtatatatgtatagaatagataacatattttggagattttaataacacatgtgaactaaagataatttgtgataaaattcttttttatttaatttttataaacttaactcgtgatttctttttaataattttctttaattttatttttgtttttaaatttaaggcacttgttaaatcctccttcaaatatcaattgtaattggttaaatatcaattggaaatctctattctctagttcccatattttgttacttgaaaatttagatgacaaaaaaattaaatattttaaaattatttgcatctctatttaaatttggattctaatttctctagaaaagcaaaagaaaaagacaaatttttctttgaagggtgaagatattctgattgaatatcaatttataagctaatatatatagcaaagaatcgaaaaattgaaaattccaaaaggtttccataatatttaaatataaattgacttggttttttgattacctaatattttagtcttatatgtcttaattttgatgatcaaattgctatttactaaaactacagatagaatgggcctttctttttattcttcttggaagagaaatacgaaaatgactagtttggtgtcaggtttttatgacaagtaattaaaataatacagaaaaattgtatgacttgcattatttgaatatcttttgtttttgaagaaaaaatcattgatttattttgttcatattatcaaaaccttaacgtcttactcttattacatccagaaataattagaaaaactacaaggggcttaacgataacgttaacgcttttattttatatattgtaaataaatagtacaacataagttgtcaatttttaatctaaaaaattattgcatacaaaccctaataggttgacatattcgtgattaaaacaaacacctcatatacagcttgtacacagctacaaacccctaattgtgtattgttattcgactcaagaacataacttgtgcctttcaacaaacgaagcacatgtccaagcccacatgtcgtttgatcatggaaactaagctaaaaccatccaaaatgcctaaaggtaaaactaaatgggatggccaagtggaaacaccattttgtaataattgatagagattctaatataagtggcgtttggttagaggtaatgaaataaaatagaatagaaacgaaacaatttttattctatttttttgtttggttgcatattagagtattggaatgtcgaatgtcattccaatggaatggcctttccaccattttggtgaaatgactattccatttaaaatagaaagaaagaccattccaatgcatgatg

SEQ ID NO: 264859 - DNA, 993 bp, Cannabis indica
atgccacaaattactctacttgaaaatataacttgagtctgacgtcaagatctgggttgaggtttgggttcgggtccggggtctagggttcgggtccaggtctgcgactgggtctgggtcggggtccgggttcgagtcagggttagggttcaggtccaggtccaagttcggcttgtttcagtgtcgtaaatctaggtccggttcgggtcagggtttgtgccccaagtcaaagtcagggtcgagggtccgaaaatggggttaaggtccggagttgaagtctggggtctagggtctaggtccgaagggctggggtacgggtccaatttcggtcgaggtcggggtccgggttcggggtcgaggctggggtttgggtcagggttcggggtgcgagtccagtctggggtctaagtttaggtctaagttcggggccaaggtgcgggtgtagggtccggggtccggggtccaatttagggttggggttggggtccgagtccggggttcaagtttgggtccagggttcgaggtccagttcggtgtcagggtccgagtttgggtctggggtccgactttgggttaggattcgaattcaaggtttgggtcgtggtttgggttcgtggtcggggtcgaggtccagggtttggggtctagggttcgagatctcggtcgggttcggggtccgaggtccagggtttgaggtctgggtcagggtttagggtctgaggtctgggtcggggtccagggtctagggtctagggttcgaggtctaggttggagttggaggttcggtcggagttcggggtctagggtctgtggtccaagtcaaggttggggttaggttaggatcggggtcggggtccaggacgggtttgggatccaggtctgggttagggttcgcgggtccgtgtgggaatctggatctagggttcgggtcgaagtttgggtccgtggtcaggttcagggtctgagtcaggattcaggtgggtttgggtctag

SEQ ID NO: 264860 - DNA, 597 bp, Cannabis indica
tgaggaacagcgtaagagtttctaatatccactgttccatccgccaagatcgagccgagtagggttccaataacacgctcggcctgatcgggtcgcctcacataacaatcggatatgttgaagatgactagagggtgaaccttcgctgacaagcttgaagacgaagaagatgagaactgcaacactgtgtgctcgttcgccattatctctctttgaactcgatggatctgactcgctgagacgaagagagatagacaaagaacacagtgatggcgcaagagctagggttttggggggattggagtcgagaacatggggaagcagttgggtttgttcaatatgctgtaattgggcttcttgtggcaaacacactataataatgggctcaattgaagcccaaacataatgaccaatccctagttggactatctcgaacaagcactgagctacaatagagcaaattacactctataccctttttatattgtcctcttttatttttaccttcttttttaaaatctataatttttacctctttttttaaatattgtaccaattttgcccctgtcacttcaagatactctccatgtgattctc

SEQ ID NO: 264861 - DNA, 1179 bp, Cannabis indica
agatcctggtaaaataaattccaacaataacatcttagttgcttttgagttagtccattatttaaagcataagacttaaggaaagaaaggatattctgctctcaaattggatatgagcaaggcttttgatcgtgttgaatgggcatatctagcagctgtgatggaaaagatgggatttgcgaacagatagatttcacttatcatgaaatgtctttcatcaacatgtttttccttttctttgaatatagaaattgttggtaatgtcaaaccggggagaggcttaaggcaaggtgatccattgtcaccatatttattcttgatttgttctgaaggattgtcccgtttgttgaatcatgaagaagacattggtaaccttgccggactgcgcctaactagacatgcaccatctatctcccacctcttgtttgctgatgatagccttttgttctgtcatgctaccaagaattcggctttagctattaacatagtgcttcggacttatcacagagcttctggtcaactgctaaacacacaaaaatcagtcatgtctttctcgcccaacactgaccaagctattcaaatgtttttcaataaacattgaacatgcctattagtgattgccatgaacgatatttgggattacctgcttactcaggtagggacaaaaaagaaatgttcagcaacataaaggagcgaatatggaagttgctcaatgcttggaaagaaaaattattctcaattgggggcaaagaagtgcgattgaaagcagttgttcaatccattcctacatatgctatgagttgtttcaaacttccaaaaacattttgtagccaactagagtccatgatggctaacttttggtggggatcaaacaaaatggtaacaaaattcattgaagaattggaatctattatgcaagtccaaatttgaaggaggtatgggatttcgatcttttatccattttaaccaagctcttttggccaagcaagcttggcgaatttttgaaatgccaaactctttactaagcaaattgctcaagcacaaatatttttctcaatcctccttttgggatgccaatcttggtcactcgccgtctctaacttggcaaggaatttgttggggtcgtgagttactcatcaaaggtcttagatataaaattgggaatggttaccatgtctc

SEQ ID NO: 264862 - DNA, 3206 bp, Cannabis indica
gttcttgaatgcatagtaaatgtccacagattaataagatgcgtagctccacacaatactatgaaagcaccaaactgaacaaggacccatctgtatggaaaaactgcggatttcttgacaaagtatatcagctccaaagggattgaaaaataggcaagcgcaataaagaaatctgagatatactgatacttcatcaacaattcatcagcaggccactgtggttcaatgcagttgcaggactccatgatgaatgattgagccatagctagctcagctaaatttcctcttcacattcctaacgacctaatatatgttcacaaaaaagtcccgaaaacaaacaggttaggagtccacccaaccaaactcaacagaaaaaagacaaagcaataataataattataaaagcaggttaaggtggaaagctaaaacagataaacatattgaatactactccagtactaccaccaagatggaagaaaacaaaacccctaaaacaacaggaaaccaactcgatcctactaaaaacaaccactactccactgggttgtagggcgataatttctttgtagaaatccccaaactattataaattagaaaaagttgcaggtagtacaacaatctggagcgagaaacaaataacaaattttctcaaagaataggtatttattcaaacacaaaaagaccgaattccatccaatacatttggtaaagcagaaacatttaagacccaaatcatccctcttaacataaataggagaaggatccaaatcgtagattccaaattcttcttctttgtgtaagaaatttctaaaataaattgaaattacatgaagattaaagaaaaacatgacgttttcgattatgacagagaaaaagcttgaagctgtacctgagagtggagtcatggaggagagctagaaaataggttattgttgaggagggagaagggagagagagagagagagagagaggtgtgtggtgggtgcgtatggaggttatgcaatgtcaatccaattggtcaaccaatacgttttttttcagacaagagcacggaaggaagacatagaagagtggcgtcctattccttccttttgagtcggtaccttactttgtgggccttcttctgctttcctttctgggacaattggtccaattttcaacgaaaattaaaatatattattattattattattattattattggacaataagagtatttctaaacagatatttttattatggtgctctaattatactctttattttagttactatttaattattttaataatattttataattaaatttatcaaatataaattttttataaaacaatgaagaagaaattgtacttttgattaatatattattaaaaaaaattaacaaaaaaatagggagcttcctacatttagagaactctctattcgctctttaataggactgcacatgggttgggtttgacaatttttggacagtttggcgatttttttatttggcagttttttaaaatcacaacccataactacccaatcaaagtttggggtggacgattttttagaggcggttttatgcggttttttgagcagtctaggttgcttaaaaatcaaaagttccaaaatatattgtacaagaaaaaaaaaatatttaatcaaaaatgtatacctgttaataacaatacataaaagttcttaaaaatttcatatcaatctttataaactccataacaaggcataataatagtccataaaaatttcataacaattctaacgccatttcacaaatttttgccacctaattgtagattaataatttatgaattaaattatgaaaaataaaacacccaagaaatcagaacagcaaattaattgtgaaccatttcttacactctttatacctaattctccaacaaacaaacaaattaattaaataattaattttaaaaaatcatatctttaccgacatacacaaacgatcttctacccctaacttaaaaatatatcaatataatatatatatatataaaaataataccatacctaaattgtaggagattgactacgttgtggagtcgtggatcgtcgttatagctggatgaaggttcagtgaagtggaccagcgttgtggaccgacgttgtggcttcgtcgttcaggctggatgaaggtccgacaaaatagctctccacgacccatcgaagtggaaagggtcagattaagagagaagggagtcgaggtaggtggtgggttgagttgttgacggcctgaggctgggcggcgactggtcggtgatgggagaagagaagaaggggacgggtggagttgagcggctgtgagcggttcagaattcagacaattagttttagggttttgttttttctttttaatttagttataattttttttttaaaaaaaaaaaaagcaagtacgggttggacccgccccttttaggctaacccgtacctgcctgccaaatagcgagttaaaactcaacccaacccaatttttgcgggtttttaatgggcggtttctatgctggtagattctaatgggttgggtggttcccatggtttagcagtttttatgttttggcctattctctattttaaagagtcatttttagtatggttagagcttattttttaaagtctcactccctattttaactatgacgtgtgtttagaaaacgtggttgaagatactctaaggtgacgtttggtttactataatagtaattaataggttaattatattgtttgattttttttttctgtttttcatattaaaaaataaaataaataaataataaaacaaaataattaatttatagattaaatgactgaaggggtagtttattacttttttttaattgtaaatttcatttaactagactaactcggcctcaactatatcagcaacattaaaagagattaaactctgaaaaaaacgatcagcatataaacaaaatgctctagccataagatgaacaacccgattagtagatagttttacaaaacgtaaagaaacgtccttaaaagaagataaaaattgtttacaatcctcaacgacaccacaaaaagtagatgacaaaacattcaaatttctacctgcttgtaccaatactagacaatcagattcgataatattaacattctgaaaatcacgcttcaaccatgataacacttccttgagagtcacgacttcaacaatc

SEQ ID NO: 264863 - DNA, 1171 bp, Cannabis indica
caagatggtctctcgccaatacaagaattcatagtttgtgtatcattgtctcgcctaagactatttgatcagcgagttatgaatatactctattaattctatatttaatgagttattgtatttttcatttaatgatataattgttattatatctattgattcatattccacgagattgacacgtgtcactttctgaagtacagccaaattttgggtataataattgtcccttaaaaagtttttttttaaattaaaagtactttttaaatgattactgagggtatattcgtcataacccaatttaaaaaattgcatgcttttgaatttggcggttcatagtttcgaggcacatcattagcattaatgagccatcttttccaattctcccttatttcctatccgttggatctctattcttttaatctgacggatgtaaataccattttagaccttgtgttttgcaaaaattatagattggaccctctattttgttaaatgataaaataaaccttgtattttccaaaatgttaaaaataggactctgagcttaatttttgataactttttttttaatataaccaacttgaagacaattcctaatacgaagagatacaaaaaatatgaacagttttgtcataacacatttagatcaaattattattaaattttattttgacaaaaaattagtttagggtcctatttgtaccattttagaaaatacaaagtccattttatcatttaacaaaacacaggatcgaattagtaatttttgcaaaacacaaaattcaaaataatatttacctttttttataaataaaaaatatcaaaattttactaattaactctattttcaagcatgcaaataaagctaattatccttctttattagtatttgaccactcattgttaaaaattagaaaatcactcaaaaaaaaaaagcattgctattgctattgctattgagcatcaaatggtacttaacacctctaaacatattatcttacaattaattagtaatattcactaaaaattattatcattaaactatacgagacagaataattaaactaataacaatattaaaacacaaaacaatataggaatggatatacaaatattataatcattgcaaatattattaatagtcatacaattaattaaaaaaatatta

SEQ ID NO: 264864 - DNA, 621 bp, Cannabis indica
ctctgtccctctctctagcgtctcttttcacaagagcttcgggccgacgtcttctctgtcctcctctctcgatcgatatccctctgtcctcctcctcctcctcctcctcctctctctctcttcttttagtcttcctctctcagtttccttactagctcgacgccgttaatagcgagtctcccacaaccatgagatgagggtcatttttaacttcaacgaccgtgaaaactcaaggaagaaccggatctcccctcccctgagtttttcagctcatgtctctcctggccaggtccaatcctcccagatccgatcgagcaataagctaagctgaaggaggaggaaaaagaagatatggattcacatttttacgagctacaagcccaaattcgttcttttaattactgtcattgttgaatttttcttgaagtttgcttctttgaagctttaaaatttagggggtttaggaagggaagggatgttttatcaagtgtgttagttatgctaaaattttcaatttttgttatggtggtgtgaggtttaaatattgttgaaccaaagaatctttggtattctcttaagcttttagggttattactagggtattgaagaagaagaaaaaaa

SEQ ID NO: 264865 - DNA, 1388 bp, Cannabis indica
ctcgttgccgcctacgtccttgcggtgcatcaggtggaggctggccatagggatgtggctctttcagcctgttgacaaaggcgatgtccatcttgcgaagtggcaacaccgtgttgtcatactccaattggggaacttcatatgccccgcagagttctgttataactcccgccaaaccaaaaccacctcccgtggctccttgtacgatctgatcaatactatgcctgatgacttgtccaatgtttatgttgtaccccttcattatggcgtacacatatttcaggcgatccatttggacatcggagaagtgcttatttggcactaaccgagcacttacaaagtacagccatgttttcgccaccgggttcaattcacaccggtataggatgtttggcgacccctctgtgccatcgttgtcgtggaacctcaacccaggaaatcccaccgtctcagccacatccaccatatcaaactgctcttcctcctcaataattcggaggcgttgctcttccctagtgtaatcttggacagagaacatcacattaaaagcatcagcagtagcgggaaccttctttccacgcacctttacttccccatttcggcggtcgggccaatttgcaagaaattcacaggccaaccccgagcatccacaaagctcccccacttcatcctctcaatttgagctcgaattgtctcaaaccgtggttgtcgtctcaaaggattctcagggaattcaataccccgatcttcaatataagccctattcttaattctcatgaattgattttgggcctctatgttaccaaatcgagttctatcaaaacccgtagttggtgggtttgaagacgaaccctgctccacattcctagttctcttaggtgccattgtttttttagcaaaaataaaatactttttttttctctctttttttttctttttcagatttcttttcttttattttttttgatttttttcttctaactatgctaaaaaaatttgagcagcagccccccttaattttctatatcccaaaaattgaaaactcaccaattaatccacacaattacatccacaatcccaaatcacactatatacctaacaattcctatatcaatcaataattccaacaataatcacgaaaaatacgcaaaatcctcatgcaacttttcaaatttaatagagaataatacttacaaacccgaagacgccttactccacctccattgttgaatatctttgaatgtttgaggttgaagatgaagaaccaatgtattttcgaatttggggtgaaattgatgagtatttgggttttttttgatggaaagtgtaaattgatgagagaaattaggttttaggatggattgggattgagaaattggattgaagat

SEQ ID NO: 264866 - DNA, 1305 bp, Cannabis indica
ctggggatttatccggatgcatttggaacaaagctttccgaacttcttcatttgaaaccggtgatagcagctcaacattctgctggaatgatacatgagtttgcacgctgcttgtgacatctctccagtcggtttgggaagaggaaaaaagctcgtggaaataagaaaccataagagcatccaaaccactatcccagtcaacccatgcacccgaatgatctttaagtttcgcaacaaaattattccttcgtctcgtagttgcagaagcatgaaaatacttgctattattatctccctcttgcaaccacaattgcttcgatctttgacgccagaatacttctcgttgcacataacattcggccaagtgcttctttgcttgtttgtaattggctacatagacttcatcccaacccaatttccacttctgcactttatttttacacttgcttaacctttctttaaaattgccagtaacctccttacccaagcagccaacttgtcccacaacactgaattttaagcataacatcatcagactcacaaatctcccaactatcctttacaatttgataacaaagaggttccctcaaccacgcattttcaaaccgaaaccacttaacagaattgtagcctacaacaggaaccatgaccataagaatcggagcatggtctgaagttgaaatctcaagattatggagcttagcagaagtgaacatgttcaaccaagcaacattagctagcccctatccaaacgcacttctatccaatgattagtaccccgcccacgctcccaagtaaacggataaccacataactccatgtcttgaagtccactgtcaatcaaagactgtggaaaaccttagattaaaaagtcagggtacctattaccaccccttttgtcatcatgagataaaacattgttaagatcacccatcacacaccatggtagattagaccgattagcaagagaatgtaacagattccaagtagaagcgcctactcctatttggttctccatacacaccagtgaaccgccattcctgcacaccttcagaagcaactctcacatctatataagcatcaaaaaccccaagcaaagacacttcatcctcaattttccataataaacgcaatacctccaatcctaccattgacatctacgactatcatgccatcgaatccaacgtcatacgcactctctcctcctgagaacgattggatatagtctcacaaacgaaacacaatactgggcttcttttggatcacaagatccttaaggaattgtaaagtccatgggttcccaag

SEQ ID NO: 264867 - DNA, 513 bp, Cannabis indica
aatgggacaattacattgttgttctgtattgtgttccactgttgttttataaagatacagtatttttgaaaagattttcgtgtgacagtatttttgtaaaattaacccaaatttcaattatttttataagtttccctattaaatattttcaattttatacacttaaatatcatattttttattttaacagattaaatactcaaagtttaattttactcactctcattattacttttctcttaaatataactgagaataatttttatgccatgtgttactcaagtattagtccactgcataatttcttttaaaaaatttattaactaattataaaaataagaaaaataattatatataaatttaaaaacaaataattagtttttttcttttttcaatctctaatcccttctttttctagtctaaaaaggaacaaaagaaaaaggaaacaacaataaaagatcagccatggacacaagcaaaacatgcagatacgagcaagaaaaagtgatcttc

SEQ ID NO: 264868 - DNA, 5677 bp, Cannabis indica
tttgagaagtgagtgtcgattatgctatagtgaaatagaactaaatttgatataggacgaaagtacctatatggtttagataacttataggatttctgtgtttaatgcctgttacatgtttaatttatcatgagagtagaaaatttgcatgtgattgaagtttatatatatgagaagactataaattaccttggtaaacctgctattgcatagaaattggtaatagaatcatattaagccataattaatagacacaattgaaatcgaaagccttaacttttattcattgttaatttgcttattaatttacttgcttcttactttcaccgtgtttattgtttcctagttttaagttttctcttcaaattttatttagccaaatagaagtaagaatttaattttaacgtacttaactacaatcatcgtgggatcgacctcactttttgtgagtaatacttgttcaaacaatatgtatacttgcgtgttgcaaaataccacaacaatctagttacaacaaagagttctataatagtgcaagtgtgttttgttcacataatataaaactcatatttcatacatttaacacacagtttggatccattaaatgaaatagatgtttacaacttgtgaaatttataccatagtgttaaagatattctagaaattgtaattaaatttctatttagaatctaaaatttaaagtcaaagacataaatttataccaaatatttaatgagtaattatttaagcttggacaactactataatactaattcatctctatgttcaagtttccctaaaaaacctttgtaaagaagtacaaaatgaattatagaatctgaattaataattcaatcgaattatattctctataatacatgttcatagaacaaaataattggtgttaataccctatatttgtttgcatagtacttctaaatgctagatatcaatttcagatcattagcaaactagcgaatgtttaattgattttttagtagcatggtaagtaggagattttttctaaaatttgaggattgttatcattacaagatagaatatttagaatatattcattcgtgccactcatttttttataagaaaatagagcaagatcataagcagatgtttataaattgtcttatccaatgatgtactatcataagtaatttcttaatgaaaaatctaataggaaatataaagagcaatttcaattaaagtaagaatccaatgatatcccgtttagacgagagtcaaagttattcttattttatgagtttctattatttcaacattgtaaacactagtctaagctgtcatttattgaggacgaatcatttagattttgcacttataaaatacttattagttgagatctaacactttttgatcatctaacggatgatcatcctttggggatgatcccattaaaaacaatcaactaagtgttcaacaatagaattcaaaaaatgatattacataattaataacagaaataaaagctggttcaatataaattcatacacattttctagaaattgtaaacatttattaagtaatgaagatataaaaaatataaaacaaacatatctcaaatatttttcaaggtttttaactaaattctatatagtatctcggtaagcgagagtcaaagatacatcaatcaaatagagttgccggctcatctaaaataaatacactttagcaactatttattctatcaaaataagaatctaacgttgtcccagtaagcgagagtcaaggttattcttattttatgagcttctatcattgtttcataaatgcaacccaatttaagtagtcattaaaaggaatgaagctcttagaatttgaaattacaaattatttatctctcgagatcttacgtgttagattgcttaatggatgatcacccgttgggggacgatatctagcgcctcaaggtcccattaaaagcaacaatcatgtaagaccaacaatggagatcaaatgtcttataattaaagctcattatttaagaaaaaacaatgcatatttattgcaatctatttgttttaacatttatattcatttagatagaattactaatttagataaactaaatataaatttggttatcctattttttacaattttgacgtggtaatgagttggatgacacgtgtcttgcgttttcctatctggacggaaggaagtattcctagcagccctcaaaggtttatataaatgtttatcataacaggatgtccgagctgagtaattaaaagacaaagtataatctagtgatcaactcaaatgcaccgagcaggatatgtgagttgacaattttaaagataagtctcgtcacttccaagacacgaagataatccctatattcgtgggattaagttagagaataaaggaaatataccttggtttcccattccttgcattgtaattatagaattaatatagttttctattttatttattatagattaagggaaaccattcttcatgtaataaggtcctataaatagtggcataatctcactattgagggacaaaaattaatccagaagaatgctctagagagaaaagtgatctaagagagagaataactcagggatcaattgtaagagctttagagaagaagaacactttatttattttttctcaagtcaatacaacaaaaaggggagtaggctattaccattcttacggggtcaaacctttagaaaatctactgttctttttaccttattgttttttgctttctattatttgctttatttaattgctttatcttgactcactgtcgttggctagaagcgataagtcaacattttggtactttcattaagagcaaaaacacaagcttttgttttaaagtcttgacgggttaacatgatggttgtacaaactcgaaggggaggccttaatgatcaaggcgatccaatggtgaacgatgcgaacatgcaaactcctagaaacacgagaggaccaccagggataaaactcgaacaaactaatacgcaaccacctatgtaggccacgaagtgacttcccctctggctgggctcactccaggaatacaagagattgggaacactagtatgacggtcgatcaaactactcctaccaccaagctcctgtccaccaataacactcaaaggcatgttagagatgacactaaacttcaaaatctgcaaaaagcacttgggcttatgcaaggccataacaacactttgcatcatgatcaagaagatctctaagtagctattaacgttgccttcaacaagcaaagacgttaattgatagaatggagggatcaagagatggaagtcatgagagcttaacaagcagccattgacgatcgctctaggcaggccaccgtgctaattagaagggcctaccaggttaccagtcaacaaccagtaactgaatctagtatccccctgagtgggtcagaaaggtatgtagctagtcataccacacagaatcatagtggtcagccgtccaatccaaggccataagtccaaaaatgtgggccaaacagtagatggccagatcttgccagactgccccttggaaggatacatatttgaacaactatactcatacagaggtattaggccaacctctcagccaagcaggtcaaacaccaacgaccacctggcgcctcaggcttcgatcagctaggcatcgtgcatgacctcagaaacgatctaaatcgcagaaggggactggacggggaaaatatcacaccaaccgtccaaccagaaaaccatgcccaagatccaatttaaagagatccaaatgtgacacaggtcggtcacaaggctagccaagttcatccacttgggcaagcacaaatagatcaactaaaaaatatggtacaaggcctaaccggcccaaaactcacagatctcgaacttgacggggcatggggatcacccttctcacttgaaatcgaggcttttaacatacccttaaagttcaaattgccaatatagaaaatgtatacaagaaaagaagatcctttatcccattggaagtactttggaatgtagatgggcctacaaggggtaagaggaaatgtacaatgcagaatttttctggccatactcgtagaggctgcccatcaatggtatttaaaattgcatccaagaaagtttaatttgtggattgctttctcctctaaattccatgcacagttttctttctcccgtcagcttccctcacaccttgaagacttggtagaagtgataaaaatgccaggagaacctctaagggcctacattagcaggtttacaattaaagcaacaaaagttaaagggctaattaaggagggaagattagcaacaatactggggggcattgagcatctgggagaattatggaaagatatcaaaagattaactgtggcatcgatggctgagtttctgaatcgagcagatggattcattaagctcgaggaggcagtatggcgcgtggataccgtaggacaaaagaagaatcaacaacacaccagtgcagtcagtacttctgtccaaaattcaatatatcccaacagctcgaatccaaatggaaaaaggtctaacaatgacaatagacagggtaatggaaagaaagggaagttcactggcaacaccgaataacatcccagagaaaatgcttataaatttattgccttctcattcctaatagatgatatagaaacaatctatgcaaccacctagtctatggtgatgtacaagaaaccctctcccatgaagaaggacataagcaaaagagatacaattaagttctatcattttcatgcggactacaaccatgacacgaatgaatgtaacaatttaaagtgaaagattgaattcttgattaaaaaaaaacccttacaaaaatatgtcaaggttgaccaagaacaaagggttgcccaggtagataataaccaaaaccaactgatgcctccaccagtggatgggcatctgcaggtaatcattgggggcccgcacctcgctggagacttgggtaatgcaagagaaaatttactcgagccttgcagcatgaacaaaatgatacaattctggatgtggaggaaaggaaacctaaaataccacttgtatgggaaccaacaataacattcactgaggtagatgctagctaagttatctacccacataacgaccctttggtcattgaggtacagattgtaaacaagatggtggcacggactatggtggacaatggagcttcctcaaatattctattcaagataacttatgagaagatggggctccagtttaatgacttaattccttgcacccaacttgtatatggattcccttgagactggatccttcgtttgtaactgccgaaactactagtcattaagactactatgaaagaaaagtaaggaagtccttttcttgacttggcctcaaaccgaaataagatctcaaattgacatcttgatacactactggagtgtagcaccacttggacaaatttccctaccacttacagttggacaagctccgataagcataactgtaatggcacaattcctagtgatcgaagtctcgttagcttttaatgtcatgttaggcctgttgggttttgtgccctaaataaaacccatttcaatataatcagatttacttattaacaaagatcagaaataacattttatgtt

SEQ ID NO: 264869 - DNA, 777 bp, Cannabis indica
tcttcattctctaagaatctcctttctagtgtcgataaaataatagaccatttatcattagccagatcagaaatgtaaaaaacttgtactacttggctagccatgatgaatggatctttcttacttcctctcttactcaaatcaaccaaagtaaaaccaagatcgtcagttttttctccaacattgttgtcaagccaagaacatttaaaaagtggaaatttggaatgcaaaataattgagctcccatatttcttcaataaccccataatacgccatggtacctaagacatggtttttatcttttgtacttgcaaaatacatggtttctgcaacgataagtatggtactattttgaacctctcgagcatcatctcttaactttgtatgaaaaaatttacccttcacaatgtatgcttcatgctttgttatcgtaaattttggtctaagggaagtacgactcaactgatcagatactccatgattcggttcgttcaactttgctagaatggtattccttaaccacccaatgaaagtttgacgtgctcgtctacaacccattcttttttatttttatgatttcttagagccattgattgtaatatctccatatggtcactgcaaaacatgtaatgttaataaagttattgttcatcgtgactaattaaaggttaatcaaagataaagctacttataacttacgttatatatagctaaacttctgcattattgttcatcacgactatttgagcttaatctagttcaaaacttggacatggt

SEQ ID NO: 264870 - DNA, 566 bp, Cannabis indica
gaagctgaaatagcatttaactgattccacagcgatgaccttactctgaagagtatggggaacagactttggcaaggatgcagtctagtgaaggttacacaccttggtagagaaaaatatcacatcaaaattagttttaatgtaattattccaaacttttgaaatgttgtattatattcatataatttttagagctctacatgtgaaggctggattgttggtcaaccacatgaatgttactataagctgtacttagatgcaggaattgaaaattagaacaattcatcattacattgcatatgcctgcttcgtcgtgaaggtcatgaaataattgttatgctgctagatagtgttctttgaacaaacagttcgttgttatatctggaattcggtgttccatattcctttttaggcagacaacaatggatgttaaattaatttttggacattctaataatttattttccattttttccctcttcaggagacatctttgcacaatttcaggttatcatgatcggacaatcttttcagtgcattggtccaggtattggttgtatactaat

SEQ ID NO: 264871 - DNA, 500 bp, Cannabis indica
gaatcgtcgaaccaggaccctagaacaagactaggaccgtgagcaggacccggacccagacctagaaccgaacacagacctagcctcagacccaaaagtagactggaactctgtcccggacacggtcgtgtacccagaccggaactgagacccggacctggacctaaatctgggacccgatgccaaacacagacttggacctagatagggatccggatacgaacctggactcggaccaagacccagactgggatcgaaatgctggacctaaatctggaccgagatccagacccagacccaaacttggacacacactcaggaccctaacttggacctggacccgaacctagacccagatcggggtccaaacctggacacaaacccagacatagactcggacctaaactcaaacccacatctagaatcagacccaaagctagacccggactcggacccaaactcgaacccagactaggatcagaaccaaggacttagaccca

SEQ ID NO: 264872 - DNA, 1344 bp, Cannabis indica
ctattcatcaattgatgacaccttagactagtatttttacaataaccaacaaagagtatctattttcaaactcaacaagagtatctatggtcttaaataagcatctagacaatggtacgaaaaactaagtaccacccttaaatctgctggatttcaccaatttctatctgataattctctttttatcaagaacacccccacactcttacttattgtcctcatttacattgatgatatcatagttgctaccaataaccaactagctatcacccacttcaaacaattcctggacaaaaaatttacacttaaagatataagatctttaagttcttcctcggattagaagtagggagaacaaagaatggaatatccatctcccaaagaccattcactttacaactccttgcagaaataggttaccatggagccaaaccagcttccactccaagggaacctaaccttaaactcagcaaggacaaaggaaagattcttcctgatcctactacctatagaagcttaattggaaagctcatatatctcacgattacacggccagatatttcttatgctgtcaatcatctcagtcaattcttaacatgtttaagagtgcctcatctccaatctactcatcgaatcctacaatatcttaaacgcactcctggacaaggcctcttttttccatccaacaccaccccacatgtttcagcctttgcaaaaactagtttgtctccttcaaatgtacaactttctttttttgcagattggggcacatgccaagacacacgtcgatccatatccagctatagtgtgtttcttagccaggcccttgtatcttggaattcaaaaacaacaagttgtttctccatcttctgccgaagccgaataccgtgcaaatggccaatgcaacgtctgaagtaacttggttcatagctctactgaaggatttcggcatctccctcaacaggcctgcgactctatactgtgacaacaccgcagctattcacataagtgaaaaccccgtttaccatgaacgcacaaagcatgttaaattgattgccacttcattcgagaaaaaattcagcaagggacactcaagttacttcacgttcaatctcaacaaaacttattggacattttcaccaaggctttacttccttctccttttcaaaacattttatccaagatgaatgtatttaatatatacactccatcttgaagggggctgtcaagattaggaagttaggatgtttgttagttgttagttatgacagttgtctactgttacaactgcctaatcctcttttacaccttggttaaatatcagttatgttgggttttatgccc

SEQ ID NO: 264873 - DNA, 1021 bp, Cannabis indica
aaatttttaaaatctaatcataaatttaaaaataaaataatcaatttttaaatttaaacctcaaaatatcataaaattaataataatctattaaaaattaaatattattaatttaaaaatgatatttaagtttaaatatattaaaataatattttattttgattttagggtttgaaatttgggaaaaatcgaaattgggaaaaaaatcccataaaaatcggatttaggggtgttggctgcccaggttggacatgcgcaggaaagcaagttgcagggtgtatggccgagatttctcggtcacttgcagcctcaggacatgcgacacagcagggtcacgtgggcgagttgggggggacaacgaggcttcagacaaaggttgtccctagtaatccgcgcgcgtatgctttcttgtccgagcgcctggtgcactcggtgtacccacttgaccccattcaaccccaaagcttcaaactttcataactttttcaacttttatcggaatcgagttccgtaaaaaccaaagttgcttaatttttcacaaggaatcaaatggaaaaatttcgtaaatcacatacattcatcaaataacacataaaccaatatgaacacatccaaatcaacatacaaacaatattcatcgttttaaatccatattcatgaaagtaaatcattaccatggctctgagtccagttgttgggaatattttacccgcatccaactttactaacaagtatgttgattaacatcttaaatatgaattctctaagacaatgaaataaacacataagggtttcagaaaaccttacattggttgcagcggaatataatgactccttccgatcaagatctctagcccttgattcctttctatagcaaagcattatcaagatctgaacttggatctctttctctccttcgagtttggttaccattgtctcactcactatgattgagtacttgacttgctatgtgtgggcatggcactcactcactataggctgaagtaagaagaacaatgaa

SEQ ID NO: 264874 - DNA, 537 bp, Cannabis indica
ataagatataatcaaaattcaaaaataagataaaaaaaaagtaaaagatagatatttacttgttttcaaattcaaattacactaatatcatgaattaattaaaaaaaattaattaatttaattatgatatttagaattgaaataggaatagtaaatatctaaatacaaaactacataaaaaataggaagttaaatccatgaaatagcatgaaaaatcgaagaaaaacgaaaaaattgcgagctgtacggacagtatgctgtgcatactgcccacacgcgcaggagggagtgcactgtcgagaaaactcggcgcaggggaggagctgcagcatttacgcacgcggagaaggggttttagacacccttgtgtgtgttgctcggacaagatcttgtccgaacacgcgtatgaccgaggataactcggttccgcgcgcgcgtgggtgagcgcttcatcccgatatttttttaaaacttcaaataatcataactaattcaaattaaatcgaaattgagttctgtaaaaaagtaaattgctta

SEQ ID NO: 264875 - DNA, 2150 bp, Cannabis indica
aaaaacatgagaattttaatacaatttcctattgtcgttttttcttgtagttactaagtgtttatgagaaattggattattgaaagtgtttctttacagcagtacagaggtgcacttttcttgacatgcggaatccatgcatggggtccacgtattatatatgttaaattattttggtattaatttctctttcgagaggagtgtgttacaggtatatttaatcgttatcatattcccaaatagtttcttgggttttgctttacgctaagtttagattcgacattagtcgttatgattttaaccaaactcttacgaatcattagttgtgaattaatgtctattactatttatacaaaaagaaagaaagaaattatattgtcaaaaacgaaccaaaagacctttatatatattaattaatatttattttacaatagggcattacgtacgtaagctctcacatctcacctacacctgttatctatatgaagtagttgtccaaaaccatatcattgagaggaggttggaccaagaagagtaaagaggttaaaacgacaatgaagagactaaaccacaagagggatttccaaggatcagattgtcgtttcacaagagctattcctttttcttgtccactactacttgaagcagaagctgtaatatcatctagttcaagtgttggacatgcaacaaatccatacgctacaccactaaacgctgctccaaaatgtgccctgcaaacacaaagaaaactattgtttattttcttcatagctttttcatccaatttgttttgcattacataagtactttaagcttaccattcatcaattggaacaaaatggcttaatatgaagcccagacctgtgatgatgattgccttttggaacaagttttctgaaacttgtttggaaatgacatctttgttttggatctgataaaccatccaagctccaattatggcatatattggtgcctgtgtaagcatcataataaaatgagaaaacttgagtaagtatacactaggtgtcttcaggtcctatataatttaatttagaactaaatcctacttacgttttaagtgggatatagtagcaatgctctttaagaatgttaagatttatgtaagttgcttactgtgccaccaatagttggttttggtgtatgaagaaagctaatcaaattgccagagattccaccaaggatgtaaatcaagagaaatgtaaacgacccataacctctgcagactttaggcccaaatgtaaaaagtgcccaacaaccaagaccaatgtcaaaaacaccacagttctgcaatatataccaattatcatgtatctcataattcaaggaaattttaagcaaaagaagtcataacattattacaaactactacttctaacctatccattagttttgaaaattagtttatttttattttttggagatgtgaaacaatatatctataaaatgtgactatatacagaatggaataaacacgaacccaatcaatcttgtaccagaaacattggggtaataagcctccaccattctccaacaaggattaaatgattcactttagctccatatagtaatggcagagaagacagttccatgtcagagctcctaattggacttgcaatttcaaacagaacaactgcaatgtttatggaagccaatgtacttctgcatatccaatattttatcatcagaggagataatcacaacaaattaatctaaaaaataaaaattcacttaggtaaaaagctgagttgttttacaataagtacagatcagagggttcatcttcatcatcatcatcatcaccatcatcttgttgtagcctatgatactcctttggaccatgggaaccaattctagttcctttgttcatgtaagtcctcattttcatatcttctttcctttcatagtcttctttgtattgtatgctgacattcgaaagaagacagtgttggctcagcaactgttgaacaatccttgccagtagagctttcatctgtcattatgattgtgtttggaaacataaataatgtgtaaaatttaatactaaataacctcgtatttttcacaccctaaaataccatgtttttttacttagaaaagtagtgtgtttaccttatcaagtctgtcaagat

SEQ ID NO: 264876 - DNA, 691 bp, Cannabis indica
ccttatacgactttggccaacatcaagcaagaacccggtgagtctttacaagactattttaaacggtttaatgtagaggtaacaaaagtcgagaaggctcccgagtcttcgcttgtttgtatgctgataacaggttttttgccgaggaccgacttctggaaggagttacaagctcgaagaccagaatccctagtcgaattcttcgccatggccgaaccccacaagagaatcgagaattctctggcagagttggagaagggcaaggacaagcacaaatcaccaatcccgcgttcacgatctccaatccccgagggaagaactccaggggccgaagcccaaggagacacagctcgcggagacagtgacgtccgaagttggccaagtctcctcccaagaaggaatcctcgccgaagaggaagggcggacctcgttttgtcaattatactgaactcgtagtaccccgagaccatatctatgcaatcgaagagagaaatggagtcttcaaaaagccaccccccatcaggggaaatcgcgacacaagagaccccaaaaaattctgtaagtaccacaaagacattggtcatactaccttagaatgttgggtcttgcaggatgaaatcgaggaactgattcggagaggaaagttctgttagaaattttttttaccaggatctatttactatcatgtatg

SEQ ID NO: 264877 - DNA, 666 bp, Cannabis indica
ttaaggtagtttatcatttctttcctaggggtgagtttgaggatggatgtactgaagcaaattcggtcttaatcccaaagaaaaaaaattcgtgagtgtatgacgaatcttaggccaatttcttaatgtaacatcctctacaaaattgttacaaaagcatggattctgttatccgtgtttttagagtgatgacgtgtacaattctaaaatttaatataagttaaggcacgcccaagcctaggcccaattttgatagcaattcaacccacttgcaaagtcacactacagttccagacgtgagcccaactcaccaaccttacaaggtcagaccgcttcagtctgggagatgtcgttcgacctagaagacgaagagtccatcaggaccaatccaaatactctcacggggctattcggagataggaaattgaagaggaactcagaaagctctgctctttcgggatgacccagatctttgggaagacttatttgcagcaacaaattcatgttcagcaacctaagaaaacccatgtcaccaacacatttattatctatgatcataacataaaagcaaacaataatacataaattaaagaagaagagaaattttctattacatccctttggcactctaattcctctgcatctctattctctcttttgttattg

SEQ ID NO: 264878 - DNA, 820 bp, Cannabis indica
gaattaaccgccaacctgattgaattacaattgtctaattttgatacaatcctaggaatggttttcttgtctaagtatggggcaacaattgactgcaagcgaaagatggtggtgtttgagcctgacagtgctaatcgagcggtgtttgtgggtaaggttcaaggatggcgcacacctagaatcacaatccttaaagctaaggatctgatgcatagaggttctctaagattcctagttactgcagtggatactagtcaacctatgtcatctagacaataaaatacgagactggtgtgtaagtttctagatgtatttccagaagacttacctggattacaaccttcacgaggaattgagttcataatagaattagtttcgagagcagaaccaatatcaaaggaaccatatagaatggcttcagtagaattgaaagaattgaagatccaactctagcaattacttaactttggatttatcaaaccaagttattctccctagggtgctctagtattattcgtgaaaaagaaagacgggttactttgaatgtgtatagactatcaagaactcaataaactcactgtcaagaataaatatcctctagcccgaatttgattacctgtttgattagctgaagggtaaaatggtcttttcaaagatcgacatttgctcaggttaccataaactgagaattcgtaaagacggcatattgaagactgtgttttgtacttggtatggacattatgagtttctggtgatggcttttggactcactaatgccctgactatatttatggatcttatgaaccgagtattcaaagat

SEQ ID NO: 264879 - DNA, 1585 bp, Cannabis indica
tttatattatttcataacaataaaatatatttttgggaaatattttttacttttctaattaaaaaaaacgataaaaaatgtgttatcaatatagcattgttaattatttaatgatttgtcaattaatattccaccaataaaggaaacataaaagagagaaaaagatacccatccaccaccacatgatatatattcaacattcttcatcaaacacattgagattatagactgaaaaatcaatgcctgctatcgtgcgtcacattgttgtcatccatcaaaacctacagaggaagcaacaattagaattcatcatccataaacccaatgagtattaaaaaatataataagttgtttcaaagaatgttagagatatttattagcgacatataaattaattagagaggttataactatttattaggtatatgcatattagtaagtatatatatatatatatatatttattattattattaatgagttttcgataaacataaattaaaataaatatctagtacatcaaatattacaacaaactacaataaaaaaattagaaaaaaaaagagtattttttgaacttttttaaaaccttatggccttatatctagattagattttcattaatgatcaataatgaaaaaaaaaattattagagttaatctcacattgttcatgtaaaaataaattgtcatatataagataaatgggttactctttccattatcaattggttttaagatagaacttcattcatcttatcccaaattctaacatggtatcagagccacttgtgatccgttgtgagtccaaatgccaccggtccaaaaagtcttttgtgatccggtgttgccgctccgaaaagatacttatattgtctcccttttaacttctattttggatctttcggccaatatgtgccagtttctagtgttgggtctttaacctatttcaaaatccacaaatttctcgacgtgtacacccataaattttccgatatttgaccttgtgggattctttcaaatatcacgttccttgaaggtcgtttgttatacccacacttttcaagcccaaacgtgaggagagtgtattagagttagtcccacattgctcatatgtagaaataaattgtcatatataagactaatgagctactcctcccattactaattggctttgagatgaaacttcattttatctataattctaacaacatatgagttttatgattaatttaactagttaattttttattagaaaaatatatatctaagtccaactcaacttattttatctctttcaatgaatgaaataacctagtcatgtaatagattatttaatgtaaaaataagagatattttttaattagattgcaaaatttagtataaaaacctaaattttataataataatttattcatgataatacccattaaagatacattcagttttcattagactacattcaatatttgtaagtctatccagatccgatccaattatatattggatgttagattttaccatccgatccgatccaattaatttcagtcatccaatatatcgatccaacatccatttgatgttgg

SEQ ID NO: 264880 - DNA, 605 bp, Cannabis indica
atagcagaatttgtagcgaaatgccttacctgccgggctgttgcaatctcttgatgttcttgagtggaagtgggaagacattgctatggatttcgtgacggggttaccgaagaatagcaaacaacaggattttgtctgggtaattattgacaggctcattaaattaacaaattttctgcctgtgcgcactaactacaacgcaaaacaatatgttgaactgcatgtaaaataaattgtaaggctacatggagtcccaaagaccattgtatctgatagaggttcagttcttacctctaagttttgggaaagtgtgcaaagcactttgggcacaaaactgaagttgagtacaacattccatcctcaaactgatggacaatcagaatgaagtattcaaatagtagaggacatgctacgagcttgtacgttggatttcccaggtaattggagtaactatttgccactgatggagttctcgtacaacaatagttatcaatctacaataaggatggcaccctatcaaatgttgtatggaaggaaatgtcgatcaccactacactgggatggggttggaaaaaaagcgatacttaggcccagacctagtaaga

SEQ ID NO: 264881 - DNA, 943 bp, Cannabis indica
gttcggtagctttgccacaaatggcaaagctatttttgttcataccgtcatcttcttcggcgtcttcaccattctcatcttggctcttggtatccacattgtcacgggctaaccttttttttagttatatttttgtgatcatcattattttcttttgttgatgattattttctaatcttcttgtgtatgtgtataggagagtttattatttatgtgttgatcaattaatttgtatttgtctaattctactacattaaaacttgacctttgagaaaatcttgtgaattatatattattggttattatgtgttgtgaagtatgaattcttggtcgtcctagtaagagtcaacagcttttgtataaggatgtattctcaggggagtgattaatattttcaaaaaaaaaaaagagtgattaagaaatttataattggtttgtttttgtttgaatttttaaattgaataaagaattatttatttgaaggcctaatgtcaacgaaaataatagtggcaattgttgtggacattgtcccacatagaataaatagtagagaattgagccatatataagaacatgggctactccactcattgtcaattggttttgaaatgggactccataattctcaacaaaaataaattgtgctaagagatcatgatatgattttttttttttaacgatgaacaaactttcattgaaaaaaatcagcgttaattacttcaaatagaaaagatataaaattttccatccaaactagaataccatccacactgagtgcatgcatagctaattcataagcagctcttttgatagatcgatgaacatgaattaggaatgcttcaagaaaattagacagtaaactagaaatattatctaaaagagaaccaagatcattacaatctctaagcaaaagcaaagataacaactagacaattagattcaa

SEQ ID NO: 264882 - DNA, 670 bp, Cannabis indica
ttttgtatcgagccaatatcactggcttttttaatcttccttatctccttttaacattcagcaatccgaagcttgaagttaccagtaaagtcttttccccaatgtaataaattttccccacagattgaaattttttcctaccacagaattgttcatgcctaactcccagctgtctttgaccacctaaagacacattgtctctctaagccacgcattttcaaaccaaaaatgatgtataggctgagtaaaattcagcaccacaggttgaagaagaagaggacaatgattaggcatagaaacttcaaggttaaataactgtgctgatgtaaacatttaagaccaatccgcattaaccaacaccctgtcaagccgaacctcaacccacctttggtgcctcgacctctttctcatgtgtatggataacccgataaatccatatcatgaagatagtagtcgttcaatgcttcttgaaaaccatccagcaacgcctgagggtacgggttgcctcctcttttatcagagtgtgagagagtgttatttaagtcaccaataacacactaaggcaaagcatacttagatgatagagaccttaaaagatcccaggtcttataatgaatcgatctattaggttcaccgtataggcctgttaaacgccaagcattaacatcct

SEQ ID NO: 264883 - DNA, 907 bp, Cannabis indica
aaaaaatagtaacataccctgacactcatctaatgtaccctgagacccatctaatgtaccacggaatacattctgtgaaagtacatcacgggacaaaatcgtgtccctactaatatatatgtttaagctatactaatcaaattaaataccatagacaataaaattagaaatttttacatcaaaaatataaaatgataattttattacctaaataccactacacggtaaactaaacatttatatccttcatctttattttattactattttaccacatgcacactcttcccatgcatcaatcatgtgagtgaccactatcaatcaatcccactatcaatcaatcaaccatccatcatgtccctttctttttttcttctttttccttttattttccatttcttttctaagtttttttttttttttttttttatttttttttaaaaaaaaaaattgtaacctccattgctgaacattccctcaccatgatcccacacaactcaataaaaattaaaaaattgacataactttcaaataaaaaagattttaacaaaactaatataagatataccatcatctttaagtaatttaatttggttctaattctaaaaaaataatgaaaaaataattattgattttttattatggcaaaagataatacaaataataaatagtctgaaaagattatttctctacaagttttaaaatgaaaatatttattaatatagttttatgattcggggtcatttgctataattttccttgtatttttattatttttttagtttgactaaaaaagttaaaaaaaaattaatttatacatatatataattttatcaaaataataataattgaaattatactattttaaagtaatcgattttacataaatcaggttatatgtagttac

SEQ ID NO: 264884 - DNA, 566 bp, Cannabis indica
cctagacctgggacccaaaattagaacctgaacaagaatcgtcgaacctggaccctagaacaagactaggaccgtgacgaggacccagacccagacgtggaacccaacacagacatgcctcagacccaaactgagactggaactcgggcccggacacggtcgtgtacctagaccggaacatagacccacactttgatcgaaatctgcgacgcgatctacaacacagacttggacctagatagcgatccggatacgaacctcgactcggaccaagacccagactgggatcaaaatggtggacctagatctggaccgagatcctgataaagacccaaacctggacccacactcgggacctgaacttggacctggactcgaaccttgacccagatcggggtctagacctagacacaaacaaggacacagactctgagccgaactcaaacccacacctagaatcagacccaaaccaagacccagactcagacccaaactcgaacccagaccaggatcagaacgaaggacttagacccagaactaaatccagactcagatcgggattggaa

SEQ ID NO: 264885 - DNA, 500 bp, Cannabis indica
aaacaatcatacatatcactttcaatataagcaccacagtgcatacgtacttaccactgtcttacctattgtctcgcaatggcagagattccgaatccccgagtgctcctgatcaggtgtcggtaatcctagtcacacaaatctaggattttcacaactagggttaacccctgatttcaaactcataaaataatttcatggcatttaaaactcagataatctcatagagctcggaacgagctttccaacgatataaagaactcccaaatcggagttcagaatcaaaagttatagaattacaaagtttgcactcaaattgccctgcaaatcgagggcgggtcgcgacatgcccaagccatgccgcgacacctaggacaaaatcccaggttccccaaaaggaggcgggtcgcggaatgctcagagcatgctgcagaatctgggttccaatcccagaaaagccaactgcaaacacgaattttcagcaaccaaatccaatcttt

SEQ ID NO: 264886 - DNA, 830 bp, Cannabis indica
aataaaaatagtttgttcttgcaaattcctactgattttccaaattaaatcaacagatacatataattcagaagaatatgttttagagtttctctctaacaatatgtgagtgattcatatacaacatctctttcttttatcaatggttctgctaataaaattcaaaattatatataaaaaaatatttttttttcaaattgagctcgataactttaatgattctcaaatattgcattcttttcactttagtgtctattcaaagtaattttgttattttaaatatttttttaaaatgtatcttatattaccaaaaaaaatataactattagaaaaaaagaaaatagaattattaataagtggcatgtaatactaagtttgaaaatttatgaacttcatttttgtattatatttttaatagtagctaagatgggcaaagtattgagtgatccatttcttgatgattttgatctcaatctttctttgcttcactaaccaatctggatcacttgttctgatggacgaatatccaaacaatgagaccctgacaaaataataaataaaattaaaaaaattaactcttcttattagaattatatatattaaactaaatataactatatatatttatatataaaaacgagagatgatactgtcaacttctgtgctggaaacacacactagaatattttttttttcatagcggtatttgttatactcacaagtcataacatgtcaacccctgtaaattaaaatattatgaactttgtttccagtatggtaaattattcaaaaaaaaaaaaaatcaaaaatttacaagaataatattgtaa

SEQ ID NO: 264887 - DNA, 556 bp, Cannabis indica
gctcttcttatccctctcaccagttgctgcattgaattgcattgtgagccccattgcagccattgttttacttccaacaaacattgtgctgataccgagcatatgaagaataaatgctcaatgttttcttgctgttgattgcacaagacacaagtatcttcctgcactatgttatgagctttcaatcttgtttttgttctcaaccgattgtgcattgctaaccagaaaatatagcaatgtttgggaacatttagccttccccaaacctctctatcctaggtgatcttcggctgaactgggcaaagcaacttatataccctttggcaatggtattgggttccaacaaaccgctgaatatccatcttgctcttgatttggtcctttgcattcaccacttgtttccaataccagctgccattttgtgggaacttgctttctacacaagtaaagaatatattgttaaacaacaaacttaaaaatgcaagtaacatacagaattaatcacaacgtggagatttgatcataaaggttagtcacttggatggattctgagcaa

SEQ ID NO: 264888 - DNA, 1153 bp, Cannabis indica
ttatctaaacctatggcttgtggtatacccggtgatttaattactctagtgcgagcaacttactttagtaagatgatggggcatttttccaatggcaatctatagaagcttctcgacttctagacatagattttatttatctaaggaaaggttctaactattccagaaaagataaatgtcaaggaaagaattccttaggatcaacaatgagaggtcttagatatatatgctttgctatgcattagaccagacacgtgttgttgagtgggagtaatgagttggtatcagattaattcagaaaagaaacattggaaaataatcaagtaaatcttaagatcaagaagaggaactatatgatagttgataagagtggtatcttaatacttttagactacaccaaatcaagtttctagacttgcgttagtgctagaaagtctactgatgagatgatgattactctgggagtagagcagtgattttagagaagtgtaaaaactgatctggagtctctaactctaccagtgagactgaatgttaaagttacaagaacgatacttattctgcctttggaaagctctacacagtttttggcattgtaccaataattaattaactactagtgttacttcctaactaatattcaagtagttgtcaaaaagtaaagaatccagtattcttagaggagtagacaaatagagagaaattttacaatattaaggattttgggatttaggagatgtaatagtggagaaagtttgtattgtatacaacttttcaaatcctattacagagacaatactacataatacacttgatctggatattaaggtgttgtgattatttgaaatgcacttttgttttatattagtgcaagtgagagtttgttgggttttgtcccctaaataaaactcatttcaatataatcaaatttactaattaataaaagatcaaaaatcacttttataatattgcatggttcacatgatttatttcatgattatatttaatgtataaattctattaagtctaaaaatatatataaatctataacatatatataaatatgggtgatattttttggttttggttaagttattttgtctttttgttgcttaatattattttgttttttttttgtttgagttttttatta

SEQ ID NO: 264889 - DNA, 1558 bp, Cannabis indica
atgcatctcattcctttttaagagaaaaattcaaagccttcttcctatgccctagccgccaccttctctctctcttcctctcttctaaaccgagcctatagtgagtgagtgagtgcccacacacatcaagtggtatgtcaatcatagtgtgtaaggctgtgaagaatccaaaattaagagaaggacattcgggctcagatcttggtgatactctgctacagaaaggatgcaagggttagagatctgagtggaaggagacattatattctgatgcaaccactgtaaggtttcttatactttatatgtgtttatttcatatcgtcttagaagttcatatttaggatgttaaataacatacttggcagtaaatctaagatcctgttaaaataattccaacagatgagagagttcctttcatagtgatttcaaacctccttcattgttcatccaattcgaacccttgagtgatagagtgccatgcccacacatagcaagtctagtactcaatcatagtgagtaagacggtcgtaaccaaacccgaaggagagaaagagatccaagttcagatcttgataatgctctactacagattggaatcaagggctagagattttgaacggaagtagtcattatattctgctgcaactaatgtaagattttcttaaacccttatgtgtttaattttattgttttagagaattcatatttaggatgttaattcaacatacttgttagtaaatctagattcaggtaaaatattttcaactactggctcagagccatggtaataatttactttcatgtaatatggatttaaaacgatgaatattgttattgtgttgatatgaatgtgttcacgttggtttatgtgttatttgatgaatgtatgtgaatttcgaaaattttccatgaaaataattttactttcgttctgaaaatattttatttggatttcttgtgaaaaattaagaaattttggtttttacggaactcaattccgatgaaaaatagaaaagttatgaacgtttgaagttttaggtccatgtggtgtcgaggtggtgctcaattgcaccaggttccgcaaacaaggaggggagcatgcctcacccaggttgtagctcacccacgcaggaccttgtaggtgttgaggaaactcggggaggaccctacaaatccctctctcgcacgcgcaggagggctgtaggtgcaccttcaccaaaatttcaaattttttgggatttttccaatgtttttcgaattttttgcatttcaactctaaaaatctaaataaaatattatttttaatatatttgaatttaaatatcaatttacaaattaataatatttaatattctaatagattattattaaattaattattttatttttatttatggtcagattttaaaattttgttaattttttttaatatttatatattatttaattacaaggttaaataggtatattttaaattaaaagatagacttatccttttaatttgaattattatattaaaattatcttatagaattaaataattaataaatttgaaatt

SEQ ID NO: 264890 - DNA, 822 bp, Cannabis indica
tgtatttgtataaataggggttcaccccattagaataaacaactcataaattctcattcactttctatttctctcttcatcttcttcttctttcctctcatctactttatattattttataacaatatatatatatattatacacaaaagattaaagaaagttaaaaaagaagaaaaaattctggcaccttgataatgaaaatcttaaattaaaaaaaaaatcatttgaatatagataaatagaagtataatttggagcaggaataaactgaaactatgaccaacaaccaaatcataaactcaaatcaataaagactggaataatcaaaaagagatagaagaaacactccccttttccggcaaaggtactaaagacaaccggttgaccatgaaataataatctaaggtcacaccttcatttagtatcagtgcgtttcgtttgctgaacgatcgtagattgagagactctagtaacatcaagctctgtaatactatgttataatttatctctgaaataaccagccatggtggctctcacatcatacccattatttcattctcttcccaataataaactccttcactaccattccaactttaagtacacgatacccatttcatcatcaacatgatattcttcttaaatatgagattcatgcatgaaaaagaaaatgattaaaatattatgttcagacaaatttaaatcatccattaaacatgatattcattcttaaatgacattaaagtttaaaatcaattccactattagtattattattataacatatttatgttacattatgaaatagtataggggtttat

SEQ ID NO: 264891 - DNA, 1750 bp, Cannabis indica
agagaaatatacagatttttttttccgagtatgagtagtattggggccaagtgcgatcattagagcttcattcagtctttagtttttcaaaatcatgctattccagagaggcgaaactcagctcatcatcctgattccatggctaaatttccttcttctttctactctaaaatcttcatctcaaacagttaaccatggaactattggaagtcacccaagagtttgtgccatctactatttttttttcctcagaagacaaagaatctcttttttttttttgttaattaaaatttttgccccacatggaaaagtctgcccatgacatgagtgagatagttgaactttgaactttgtaaattaaaaaaataaaaagtcattagactgtaagtacataagtttaactttaactttaaggtggcgtttgatcggaagtattaaataaaaatgagaataaaatagaataaaatttaaaatacataaaaaaaaattgataaaaaaattattaaattttttctcttatgttaaaataatctttctttactttttaaaataaaataataatgtcattctaatattttaaaatgtaaccaaataaatgaatggaatgaaaattatttcttttccatttcatttcatattattatctctaaccaaacaccacctaattataaataaatatttaaatttaatttttaacagtaataatagttaaattatatttctaaaatctctatttttctctctttacaataaacaattacaagaccattacatgcctttaaatagacataaatagacttaactaattggtgcacttaaccaactaaaactgaatgttgtagcaattcatctaacttaacagaactaatgttgtagaatttaactaacttaacacattttgttagttaaatcagttatttccagttttgtttgttctatgaattaccaaacaataaatttcaccttaattcatagaaccaaacaagacaaacggcacgggagtattctagttatctttagatggagccaatgttcaacagttccacacaatgttggaacctgctgactcgaagaattttagttcctgcatctgaaaaattctcttcacttagtactttctcaagttctacttctccatcttcaatctcctttctgatctaaaacaacctaatgtcaatatgttttgatcgctcatgatagattggatttttacagagataaatggcaaattagctatcaaagtatagcgtagccttttttctcatcatttgtagcttacttaggattcctttgatccacacaactttgaaagcatttgtagttaccatgaactctgcctcaattaagcacatgttgcaactgagatttctaactaatacaatagctggttattgacttcatggtgtctttatttgatgcataatcgacatcaacataactctccaatataatcttggttctagacttgataattatgcaaaatacaaataaaatataccgtagtaagtatatttaattaggaaaaaaaaattgtttgacaacttggctcatgatattgattcacactaatgggctacatcaattgtgtggacctgccactaatgattgggggattccttatctgaatggaaaataagatgagacgactaattagaaacatttcttgtactgaaatgttaaataacatagggacgagaatgaaccgtgacattgacctgtttaatgtcttattaatttaatttttttttac

SEQ ID NO: 264892 - DNA, 891 bp, Cannabis indica
ctctgtttagccaagcttgaaggaaatcattatttcacttctatgtgctagatagaagctatagattctatatctatgttcccaaggtttacttaatcaatgccctggaaagaacatagcactcatccaaggtgcaagtaaactatgttgtagattatcatatcatttaaacactgcatattgataaatctaggaatatatatttaatcacataatcttgattatttttcactgtgctggagacacaataaaaaagaaatataaatgtgagaagggtgtggatgaatttataaatcaaatactttattgatatttaaaagataaagattacattgaaatggagttttatttagagcataaaatccaacagttttggttgggttttgatgcaaaaactcgatttcccatttctgcagttgagaaatcggttaaccggtgttacagctgctgtaaaatttgtcaactggtttgcctgcaggggaaccctagttttttggttcgaaaccagttttgctctaggtgctttttagagattggattagcgtgttttaaggatgtttaagctaactttgaaccagtgggagttagaatttttccggttgttgattagggtttttttcggggattggatcagttgatgattgagttttgttatcgggacataggactcgggatcgtcgagctttattccatttaggtcggcccgcatgcctaatttctggactaaggtaagaaaagctatatgcactgtacatgtttagtgagaaattattattatcgtttgtgactcgattatgatcgaggtagcgattattactgtttgtgactcgattatgatcgaggtagcgattattactgtttgtgacttgattatgatcgagatagtgatta

SEQ ID NO: 264893 - DNA, 2092 bp, Cannabis indica
cttggaccatttctcatacatatcttcaagttggtccttcctcagatagcttttcaggggatgacgacaccaacctttttaatatataccgtttttaaaggacggaattagatcatcatggtaggactagtttcactgtgttatacttgcatgcatggattttgatagtattgtgactcctttgtttatttttgaatagaaaaacccatggatgatctcttggaggcccttgcccaaacacacagtcctgagaccgacttgcccgagcaacacaacagtgctgtgactccaggggggccttttgatgaaaccctcgaaaattaaaaagttgtcttgattgacgaggaagaagaagaaggagagatcgttcttcccctcgactgcaagcgcaaagttaaaatggttgagccagagccttctaagaagccaaggagggcggacactcctggtcctagtgttgactcgagaattccttcggaagtggatgaatatcttgcacctccaggtattattttgacttccgttcaccctgacgaggaaaagggtcagctccgcatcgccaaacataactatgccttgggggagcttacaaagggggatgttgaggtgatagctctattgaaatggctcagggacactcaagatgggcctttttgaggtgagtatgccagtgatgtatgggatttgaatttagatcccttgacagactggttaagcgcttcgtggggcctaacctagctccttttgcctcagagatgatgagccactttgctgccgatctgacccaacttcccatcaagagatatgcagcttgtgcttctgccaatcccatgtaccaaattcaggacatgagtgtgccccttctgcagtaagtcctcacctttttaaattttttacatatctttttattttaggctctaacttttcctattggctgctagattgctatggaggccagtcgtctttccaagactttgattgaccatgagtttaccatgtctaagttcagtggtacggaggaggtgatgaagggtctccaggagttagatgagaagaagaaggcgatccaggacgaagcccaaaggaaggaggccctcatggagcaaaaccatcaggaggcgttgacggccaaggacgagattatagctgcggcccggagggatatttgtgattccaagtaagaggcccaagaactcaccaccaagttaaggtcttagaggaacttcaccaggctgatttagaaataacagctaatttaactattgaagtaaaagagctccgtgagttcaaggaacaggcccgtaaggaggcagctaaggctaagagagatgctcttttggccctcatcacttgccaacactgcacgaagcattttgacgacgccgtgttcatgtgctagaaagccaataatttcgaaccccgcctttctttctaccccaagcctgaggaagtcctagcccgattatgggagaaaaataagaagcttgaggttatattggatgaacgcatgggtcctcgtcttcctccccgagttgattaagtgttggttttatttttcctttatttcatccttccccctacctataagacaattatgctttctttaatttaaggggagactttttgtggcccagccccaggccttttactatttacattttagacaacttagatgactaagtttattttgcttcttgctttcttatattcgtcctattttttgtcccgtactgttatgtcttaataccccctaagtgacatgaaaagaaattttttggtcacttagcttaaaatttgcatgggatatcgcatatatttgttcggcacaggttactttatagaatataaactttctcccagctattgatagtatttgcgaagatggtcggcagtccaggccctatgtactgtggatccatccattctttttagcttgtaggtcttagagcctatttcatcctcaattttgtatggtccttcccaatttggcaagtacccccactcctggctcttgggtggttgggaagacccttcgtaggactaggtcgccaatggtgaattttctatctttaaccttggtgttgaagtattt

SEQ ID NO: 264894 - DNA, 537 bp, Cannabis indica
aaatcacttagccatccacccacacactcctccaccatcacaccatcacatctgcggaaggacgagagtccaacccacaaaagaattttcggaagaaaagactcaatgtggctagaatacacctgtgtgcgtggactaatcgaccctcaacgctgaaggtgacgtcactggaagcttgaccattgattaatagattcaggtaatctaacgatagagatcttagcgagtcttctaggttgttcatgatctcttgatcaataatatatagataaggctttataacagaaaaaaaaaaataaaggggttttgatgaggatcaagtgatgatggatatgatcaagattaatgggttcatatttttttgggttttttttgtttgaaaaatttatgtgagataaggaagaagaagaagatgaagaagaaagtgagcagtggtgtacctcaaccatttgattctcatgtggtggtgtgatggtggaggagtgtgtgagtgggtggctaggtcaggatagatttattgattttatgttttttttt

SEQ ID NO: 264895 - DNA, 1061 bp, Cannabis indica
aaaaagtaaatgtccatgataaggtgcaaaaaaggaatccttttctttgtatttcccctgggtggtgcgtctgctgcaaaggcagcggagaaaacgttggccaccttttcttggaatgcaaatttattcgacgattatggagatatgtgttgggagaatttgaattgtcttgggttatgccaaggtctgtatcatatttgatagcgtccaagctaaccggaagtaaacgcaaaacaaagctatggaaaacaacgatattagcaacaatttgggccgtatggctagaaagaaatgccagaatctttgaagggactactaaatcagaagcggatgtgtgggagcaagttaaattttggacagctacttgggtctttagaactaaacattttgaggacctatcccttttagatttgtgtagagaatggaaaacatttgtataggggcagtaggtggttgtatttatttctttatttcttctgaggcaaagtgggggagtactcttgccttagaattttgttttgttattatttgtaaccatggttttcttccaccacaagggaggcttttaatatatttcggggaggatcctgtcgaagacaaaaggatcttttctctttttcaaaaaaaaaaaaataccttcaactccccatcccagtcccctctcggatgtatataatttggagaagaaatcaactaattcagatactatttcttcctccttgtcaagtgtctagccatccattctttcaattcttgagatagcgttccttgccttccttgcatttaataaattatggaacattcttgtgtttgcatccccttcttttgccgatttacatttcgatttcagccatagacttctttcttcgtcaactatatattgctgccactcccttttaagatttctcctctcctctgcaagagattgattccacaagttactcccctcttttttatccagctccactattctcctttctacagcatttttggccaccttgttatttctataagccgatttgctccagtccttgatatttttttgcacttttttcagcttg

SEQ ID NO: 264896 - DNA, 515 bp, Cannabis indica
ggtggcaagccttttgtcatagaatcaacaatcatcgattcagtgctaatgtgttctatgactactttattttctccaacacgttctctaatagctaagtacttaacgtcgatgtgcttgctttgacttccacttttattgttattagccatgaaaataacagttgaattgtcacaaaatatttttaatggccttgctatggaatcaacaaatttaagacctgaaatgaaatattttagccatacaccatgtgatgtagcctcaaaataagaaacaaacttggcctcaatagaagttgtggtcaaggttagtttgttactcctccaggacacagctccaccaacaaacataaacacgtaactagatgttgatttacataaattagtacaactagcaaaatttgaatctgaatagccaactacttctagacttttggtttgtttgaacataggtttgtaatccttagaacccttaaggtacctcattaccttctttgcagctttctagtggtctat

SEQ ID NO: 264897 - DNA, 7016 bp, Cannabis indica
catatatatagagagagaaagacagtgtatgtttgtatgaaaacaaaaaaagaaaagtaaaaaattaagggaaaaaataaaaggcagagaaggggtggtgtcggcttcaaacaaacacgaccttatcatcgtcgtcctcctcatcggatcccaaaaccccatactctcataaatctaccaaatttttatcagacttaataattcttttatcagacttctgctcgggcgaaacagctcacaattttattttttggtaaatctaaatcatacacttatgtatatgtttttcttttctagaatttttgttttgttaatttttatgtatttctgtttgttgagggtttttgtattgtttttctttttttggggggggtctgtatcttgtgtgctgtactggtggaaaaatctgtgcgatctggtgcttgagcttgagtgaggatgggtttggtgaggaaatgaaatgttttatttttgaatgatgaaatgttctttttcttgaggaaggggaaatgggtattttatttattttattttatttttaaggatccggtgaaaatcgaagaatcgaaagcattttctttggtgcttttttttttaacctttgttttaatttgcttctttgtttcatgtttcactgaattgttgttgggagcgctgaaattttattaatgggtattaaacagagtgatacggatcgtacataaaatcgattgctatgttaaatgcgaaatggattataggtgtttatggttttctttttttctttttaacaagactacgtgtcttttgaaaatgagggagttttatttactttagaagagaaagagttgataattaaactgaaaaaggtacaaactttactgctcaaattttggcgtgagagcttcaaatgcaaacccttttttattttaattttttcttgctgcatttaagtcacaaagcagactgcactgacaacactacagcagctagagaaggcttttgctctcagattctgtaaccagttttgcattgattaagggctgtaattactggtttggtttagttggttggagaattaattggcactagttggtttcctagcctctttttatcaaacatttgttttttcatttttttaactacttactttatattgaacagatttgagagtttattaaagattctgtcattctttgtggtcgtttgctatggcgttcccagctttgaatccaacctccaatggaagccctccaggtttcagtttttccttcacaagttatttcattgtcgttaaaatagtgcaattattttgtttgctttaaatgcaaatgctatgtatgcttgcttttttttttttttacattttggaaaagtcaattttctgcagtatagcagatcttgtattttaggcttttggataaaaatcaaactagcagattacaataaaaggctccaatctctatctacaccccaattcctgtaaattctttctcattgaataatcaattagctacccaatgtctaaactttatccatccattttctataactcaataatgaaatttttattctttggacaatctttattttatttaaattctaatggttaattttctgaggtaaatagtgaatgagatggaaaagtcaactttgcctagtactttggtgggctgtttttctgctagtacttttgtaaatacttagctgtttgtttgttcattatattttcttgttggacttacatccagtaaatggtcataattgttcaataaagtacatcgtgctgcattttgctgtttctgttttaatctgaatatcttagtttaactctgtaattttttaatgttagtatcctcagatgaattgtacaaggaattatggcatgcatgtgcaggaccactcgtcacccttccccgtgaagggcagcgagtatattactttccacaaggtcatatggaacaggtatttttaagcttctactttctccctttgtctcatgctgagcatgtgaactttcaaaatgtgatcttctggttgttctgaatcttttgattttctggggttaacttttactttattgtaaagtagtttattaaaattttatctctttatagcattccattattgtagctaattacaagttacaaaacacttatttgtttattattatttactggaaccgaggaccatcattgataatataaataagtaggatcaattataagggacattgtgtacccaaataagagaaaaacaaacgaaatatgaactccactttctcaccaaaatcacaattcatctttagaatccttatcatcaccaagcaaacaaaatagaataatatttttggataatctagaagatattgtggaagggcgatgagtgacatgtgttcggatatgtaaaaccttgcacgccccagttaggagacttaaaaaaaagtgaggagttgtttgcagcaaaaatgtgttttacatttaggggcaaaaatttatttcaaaataattgtttatttactattattgtaatatttcttggaaagaaacacaactactttctaaatagaaatgtgacaagtcaaagagaaagcaggaaaccgtcccgtagtagaaagaaaggaaagaggctttttaaagtggggctaactattaccctcatacttttgcatatgctgaaccagtttttcccgttcaaatttttgcttttagttttagtggcataagacatctctttacaaaggacaatttcgaagccatttacccaaaagaaccatactaagagatcacaatttaactgtaaataagggccttattttgagaacacaaggtacccagtatgataatcaagtatccaataagatctaaattaatgtctcaaatgaaaaattgtacttaacatctaccagaaacacgcatcacgcatgtatatgtatttgaagtccagaatttgttttttcgttctgtattatttaacttttttgagtctctcatgtatgataatcaagtatccaataagatctaaattaatgtctcaaatgaaaaattgtacttaacatctatcagaaacacgcatggatatgtatttgaagtccagaatttgttttttttttctgtattatttaacttttttgagtctctcatgtatgattatccaatgcagttggaagcatcaatgcatcagggtctggagcagcaaatgccttcatttaatctaccgtctaaaattctttgtaaagttgttaatgttcaactgcgggtaaattatgtcattcacattttattgtctcataatgaatgttctcttctttcaagcactggttggtgatcattatttaatttttacttttaccttgtactctggtaggctgaagtagaaacagatgaagtttatgcgcaaattactctattaccagaacaggatgtgagctttcttttccttaaagtttttgtaattcttttgagtttgagtgttttggttatatttttgtgcctaacatgatttcagcagctttcaaagctattgcatgatattttttgtttgtccttttcacactctttaatcatattgttaaaaacttttgtatatttttgtgaattagcaaactgagttgacaagcccagaccctccacttcctgaacctccaaggtgtacggtgcattcattttgcaagacacttactgcatctgatactagcactcatggtggattctctgttcttcggaggcatgcagatgactgtttaccaccactggtagcctcgaaattttaattttattttcatgttggattatagattttttggcctacgtaattctgcacattttttcattcaaacacactcacacagaacacatgcgtattctttagcttggaatacactttatgttctcgctttcttgtgctgggagtttctattgtgtgtattttctttactaattgcatgtgctattattttgttatctttccaggatatgtctcaacaaccaccatggcaggaattggttgccactgatctgcatggaaatgaatggcattttcgtcatatatttcgaggttgactattcttctttggcttatggtagcaaatatcatttggctggtccatattatatcaattttttttagctggaatatcatttcagttgcatttaattctgtcctaagttatcttagtctgtggtgcatgctgcttattgttcctggtgtgttgccttttattgctggatgttcagatctaatttgctttgcacgggcattttttttcttaactgagttgctagaacacaaactggttgtggaaaagtgagcaactccagagaagtaactgtatttttcatgtggcttaaaatggtttctgttctctgtcttcttcttcttttttttttcctctaagagtttaatcgctctatatatttacgtgatggcacttttgctaatttttgttgtcatgctaagtggattcagtgagcttgcattgtttcaacatttttctgccttcctactgtgatgttaacaagttcctacattactgggattctgatattaaaagattgaccacagggcaacctagacgtcatttgctcactactgggtggagtgtcttcgttagttccaagaagttggtagctggtgatgcatttatttttttaaggcaagttctcttgcagaagttatgggaaaaaaactgtggatattctgttttcattataccgttagaagatttcagtttagctcatattttaatttatttttctccagaggtgaaaatggagagctgcgtgttggagttaggagactcatgagacaaccgagcaatatgccgtcttctgtgatttctagtcacagcatgcatcttggagttctagctacagcatctcatgccatctcaactggaaccctcttttctgtcttttacaaaccaaggtcttgtttcttttttgcttagttgaatgcacaaacatctggatagtttgttctgtattcatgtgttttactttctgtcatgtgtttattatttggataaaggcttcattgtaagttggacatgttacatgctgtactggattttctgatattggttcctatagaaataaatagaaaaaaaagaaaagaagaggaaagggtagtggtttattgtgtttagtgcagtttgtgtgttatacatttggttaactttcgaagtaagcttatacttctcacacctacgagacgaggagtaagatctcctttttctttctttgtttttcccaatattgtcgaggcattttcaaatcttcttctaagttataatggagaaaacagggaaaatgtaaagggtgtctagattgatgttgacaatggcatgaatatgattagtgtcaatgagttagattatgcccccgcttctttcctgttgttttttctcaaatttacattttcattgttcgtatattttctctgataaattaaaaaattaattgcctatttggtttttacatctacattttcttattgctccattaagtaatctttggctgaaattgctattgctcatttaagtaatcttggctgaaattgcttcatttgattaccaggacaagtcgatctgagtttcttgtaagtgtcaacaagtaccttgaagcgcacaatcaaaaactctctgttggaatgaggtttaagatgaggtttgagggggaggaagttcctgagagaaggtatattttctgactttagatttccaaggatgtgaattattgtgtgctcatatgttcactatattacaggttcagtggtacaattgttggtgtaggagataatacttcatctggatgggcacattctgaatggcggtcgcttaaggtgtgcctccttttccaatattttcttaattgataccccagctttgttcaacatattagaatagtttgaacttttgactttcatttgaagtatgccattttatccttgtttgaattgaattcctgacatcaatttgaatcttcttatgatcttaccaccagattttctgcataagctggaacagtttgttaaatttactagtataattttgggaaaatgtaaagattttaggaacttctttatctctcgttggagaataaaattgtttgtggagaagctgactagtaaagggattctagctgtaagatatctaatgaatcattactggaattgagatctcattaaatatattaaatttctgagagtttgtttttgtgtattatatggatgatccaattggcaaggaccatgagtggaaattgttgaccatctttctccatggtaacaatttttaaatacataaataaggttgtgtagcaagcttttaatagaattttcaactttctgttcgaagacacaggaaacagaaaacagagaacaaaattgaatgtaaacaagaccttgggccatttggctggagagaaatggtaggacttaataaaaataagcaaaatgggttggaatatatgatatatctaagaaaggaccattcttttggttgctatttggttaaagagtgcctaaaagttttcttcattcttatttcgtgatatcttcaatgatgggtgggtttgttgtaatgcaaagttattcatatctgtagttcttttggtttctctatggtttttagatatgtgtgtacctagctatatgtgtgaagcattagctatttaaaaagagattaggagtccgtattttcgactatactgattcagctctttttttaatttttttcaatacgagtttacgagcattttgtgtcttataaattaatttatttcccttgcatgccttattgtggagaaaaatggtaaggtctttgtattgttaatgagtttcaaatgtgtttctctaatgaaagcaaagacttgacttcctgtaaaattagttagtttcatcaaaagactaattaaatggctttacttttggctgattaatacttttaatcaagccttcttcttttagattaaagtatttgtgtaattattttcaggttcaatgggatgaaccatcatcaataatgcgacctgaaagag

SEQ ID NO: 264898 - DNA, 543 bp, Cannabis indica
aaaggtacgcatttttatccttacatttttcgtgctcaatcagagattttatttcatgatttggctcatatggttcatacatccctttcccaagaaagatgtagaactttttctgtgtattgcttggtttatttggtttaacaggaacaaagccctcaaaggtctcccttgtgaccaaacccatgccatcactagtctggctcagaccttcttggcagattacaatgcgtcctcatcagttccaagcttcatcggtcccactcgttcagctcctgccccttcaacttggattccccctgcccatggtctcctcaagctcaatgttgatgcagcggttcctaagaatggtggaaaagtgggttttggtggagttatcagaaatagtgatggtttggttgtggccgctctcgctcagccctaatacggcgggggcccggttgccacccttgaagcaaaggctctcctctccctgcttcgctggtgcattgacgaacactttttggttcaggtcatcgaaacagattgcaaatccatcactgatgc

SEQ ID NO: 264899 - DNA, 1035 bp, Cannabis indica
tcaatccaatctaatccgcgcaagtgcggatatccgcattttgcggatttgattggattggatcggatacttagtgaacacccctaaatttggctatgaattattgggtaaataccattttggaccctgtattttgtaaaaattatcaattggaccctctgttttgttaaatgacaaaatagtccttatattttctaaaatggtacaaataggaccatgaattgatttttttgtcaaaataaaacttaattataatccgatctaaaagtgttatgacaaaattatttacatttttgtatctgttcgtattaggaattgttttcaagttgattatattaaaaaaataaagttatcaaaaattaagctcagggtcctatttttactattttggaaaatatatagtcaattttatcatttaacaaaacacagagtccaatcggtaacttttgtaaaatacaaagtctaaaataatatttacccattcttattttggatgtgtgattagagagtgtcattccttgaaaatattttattatgttttgtttaaacgatatattaataaggtggtggtttatttttgagtaagtgcttcttattttcctccatatcatatttttactaagatgtctatttattttgagttaaattaataaagtcttcttttattttttttataactttgggaaaggaggattcgaacttagaccttctttttacgagaaaaaatatagcactattaaattatacttataaccataaaattttatttttattaaaaacaaacactcacataattaaaaaaaaaatcaatattaaaactatttttttcaaaaaaaaacaatattaaaactatctaaaaattaaaagtaggactaaagtgtgatatattcattcattttttgatgccactagaattttcttaacacagataatgattttttttctattaaaaataaaaataaaattagtaatagaataaaattggaatcggctccacccaaatatttccctcagtcatccacttcaaaagtctac

SEQ ID NO: 264900 - DNA, 896 bp, Cannabis indica
caaacagatcatcaattcgaggtaaaggatacttactcttgatggtaagcttgttaaactctcggtaatcaatacacattcgcagagacccgtccttctttttcacaaataatactggagcactcgaaggcgagtagctcggtctaatgaatcccaaattcaataattcttgcaattgtatcttcaattccttcaatttcgcaggagccatttgatacggtgctatagatactggatccgctcccggaaccaactcaagtacaaattcaatctctccagtaggtggcaatcccggtaaatcttctggaaagacgtcaaggaactcgcacacaaatcttgtattctcaggtcctgatgtcacaagttggttggtatccactgcagtgactatgaatcccagaaacctctgctcatcaggtccttagctttcaacagtgttattcttggtatgcgtgtcccctgaaccttacccacaaacaccgatgggttcacactatcaggctcaaacaccaccatcttccgcttatagtcgatcgttgccccatacttagatagaaaatccattcccaggattatgtcaaaataagacagttgcaattcaattagattggcagtcaatttacaactgttaatccagaaggacaaagaccgaatccacctagtggataggtctgccgagggtaacagggtaccaaactctgaagcataaatatcacatggcttatggaaactttctataactctactcgacacataagagtgagtagctctcgaatcaaacaacatagtataagaactaccatttatagacaactgacctgtcactactaacggactacggactagcatcagcgtcagcctgagtcatagtaaaaagtcgccccgggttctgagta

SEQ ID NO: 264901 - DNA, 1694 bp, Cannabis indica
aaattgttgaagaagaaaaagataacatttcacaacttaaataacagtgaatcatatctcctaagttaattagtgactttgttaatattgtcaaaaattattcatgttatgatatcccacattgatagttttgttaattcatggacaaaagtgtattataaatgtagagtttattaacaattaaactattctaaaaaattgttataataacatttatatattatatattatatatttttgtgaatttaattaataattttagttagggtaaacattcctgcttatattacttggttataaggtctattttgtcatttaacaaaatttttttattctgaaaattttatttaacatttttttaataactaatgacttttaccttttttatttaattaatattattattttatttatggcattaaataaaaaataacactatttgtataaaataatttattgtattaatattattataaattttaatatgatacaatctgtattaatacataaaacatgatctacggatatattataatatttaaaaataatctgagactgagatcgagtctaaatttggggtctggatcaaagtttagcttcgagatccaaagctagataaacataccaaacacagtaatttatttgcacaatttaataagcagcaaacataatattatattaactaatactataaaatacaataaaataaaatataattcaacacaattaaaaatacttaatttcataccccttgatattatacttcttaactagttagtgattttttatattataaagattgttaaattaatttggccctgcatattataagctttggtctctttgtgccacatatagtattcttgtatgccttatttgttaaagaaaaaaaaaactataagagaagcttaagaattcgaaactctttaatttcgatgaatacatttccatagtcgaggtgctattttgtacacgacaaaaggctaaataaattaagcaggaactgaactatatatataactagtttgcagcctcatataacattaactacaatggtaaaaaatgggctactactgacactttccaaacccgaaacgcttatctgaggcttaacgctttacattgtcagatcgggatcatcttcgtagtcataatcttgttcacttggcctgatcctctttgcatctctaggcgtaggtctaccctttttcggttttcccctatgacaccaaatgcaattatcagaaaacacttattgaggagttttgagcacaaatatagagctttccaaacactgatagtacttactgtccattggcgtatattcctccacccttagaccggcctggaccaaagtctgatctcccatctaagataaacatacagggaggaaacataaatatatagctttggaaaaccttttgtggtattcatattagtaggctcaccgtctcgtgcagctgctatttcttcggcctaacaaaaaggggaaaaatatgtaaaactcatagacaagatcataggaactctcaaagagaaagaaaaaaaaaacgatgaacaaagcatcaagaccctatggaaaaaaggggaaaacgaaaaggcaaggaataaagtgtatcaaaggaatcataaggggtatctaacaaagataagttcaacatctgaaatatgtaacttaacatgacaacttttca

SEQ ID NO: 264902 - DNA, 549 bp, Cannabis indica
gactcggaccaagacccagactgggatcgaaatactgaatctagatcttgaccgagatcctgaccctgacccaaacatggacccgcactctagaccaaaacttggacctagacccgaacctagacccaaatcggggtccagacatagacacaaacccggacacagactcggacccgaactcaaacacccacacctacaataagcccaaagctacacccggcgcctgacccaaacacgaaccaagacaaggatcagaaccaaggaattagaccaagaactgaatccagactcagatcgggattggaacttggaagacgaacccagcctagaccaagacccaggacgcgaacccaaacccggaactcaaacccaaactccaaaaatggagccaaaactggaagttgaccgagagtggaactaggacttggacttggaatcataactgaaatttgatctagatccagaacaataatcggaccaggaccaggacaccatatcagacctagacgtgaattgggagccggacccagatcccaacccaaacttgga

SEQ ID NO: 264903 - DNA, 1071 bp, Cannabis indica
aaaacagtattcttttctgaatgacagacaaatacgaaaatacataatttgtctcaaattagatggacataactgaaacacaataacaacattcaccaaccaagtatacatttatttggataccaaggaaaaatgcaactgttgactaaaagaatcaggaaattacaaaacacatacctttttggaacaacttaagaatgagcttagcttattagaaactactatcaaacagattgtgggcactgaataaagccacaaaccacaaaaagaaaccaagtgatacacaaaattttcatcatgtacagatcaatgataaaaataaaatgtctaaaaggcagcaaggagaacttaatgttagaactgaaaaagtcaagtagtaagcctatcctaaaacaaacatattggaagcgtggatctcccagaaaatcagttaaaacaactccagatagatcgtgacagacagatcgagatggcaagaaatgtatgatatatcatcgaattgtatattcaaaacatgtccatgaaaataaaatgaaaggacaaaggagacccaaataaagacactagaatttatatatcttcaataagaaagtcaacagcccaaccatctacttgtctgagttttgttggtcataaatcttgtcatttttgttaatattctttagaatgaagaagattgtctgtacacagggcagcctagccctttagcagtagtccaaaatagcaacctaatcaacttaaaacaacaccgatgagcaacaaaatatgactttgtcagtataaagaacttgcaaaaacaaatgtttactaatccctaatgggaaagaaaaatgggggccaaaatcataagaatgaactatatgatgttttatctattagggttcacaaaatttgttcataattatataaaacatgaaaacataaaaaggcaacaatttgactaatacccttttctcacacgtccaattttcgcatttagaatagtatacatgcaacaatattcaaataactaacaccaagagcaaacatttacaacacactaatcaacttacaacaacactagatagagac

SEQ ID NO: 264904 - DNA, 692 bp, Cannabis indica
gggcataaaacccaacaaacatagcatacattagacttccaactactgaagcataaggaacatttcgcatgtcttctatctcttggggatcagtgggacattgtttcttagatagatggataccaggctgagaaggcataactacccctctagtgttaatcattgagaattgctttagcaccttatcaatgtaagttgcttgcaagagagcaagtgatcttttcttccggtttctaatgatttgaataccaggaacataaccagcttcacccaaatctttcatttcgaattgagtgttaagccattccttaatgtcagtcattttcttgatattgttaccaataattaaaatattatcaacataaaggactaggaatactaccacttgattatcattgagttggtaaacacactggtcatcttcacactactacaatttacacctttagtgacacaatttagtgacacgcacaaaaaatgtgggtcactaaatgttttagtcaatttttagtgacacacattactagacagtgaaaatttcaaatatatgttccataatgcatgtcactatatatctgaagtgtcactaaaaacttatttattttaaaaaaaatatataaatatatagtgacacacacatcctaactctaaatgtattcagagtcacacaaggtgtgtcactaaagattcaa

SEQ ID NO: 264905 - DNA, 726 bp, Cannabis indica
gttattaccctagtgatataagcagagtaaatactatgccatgctaattatatgattatattgaaatttaaaggtgatgcgttcaaggcataatcaggtttgactcggtaatcataaccgagatgaaccattctaatgccttattgtatgtagacgtgtgagagcaacacgtagctctacgccacgtagacataaatagacgtgtgagagcaacacgtaggtctacaccacgtagacataaataggcatgtgaacaaaacatgcaggcctctgtcacgcagacagatttaaatggcattactatttatattatatgatgagcatattattgatatgttttatactgtcttgctaagcttggctcacgggtgctctattgtgcaagaatgggtaagactgttgatgatcagccatgagtgcaggtcctagatgaagaatgtacatgtctgggccatatcagaccaagcgggttggggtctaccagtgttgtgtttttgagactctattttgccgcttaggccggctgaaagaaaaggacttgtaataatattttgtaaatgttttttttggatcccaactactataacttttagtttataatgtttaaagtataacaagtttattttcattcctatcgttattaaagtttaaattctgcgctaattttattagtaatcccggttcggggattagggcttcataagtattttgggtatcgtgcctaat

SEQ ID NO: 264906 - DNA, 1070 bp, Cannabis indica
atttaggaaaaaaaatttaaaatcttgtaaggatggaatttcaagaactaggcttaaggctttaaagggttaccaaacatgaaaggtagccttggactgcctgcctagtggatcctgcaaaaaacatggacgcctgcctagtactgccttactctctttttctgagggcggtcacatggagcaatatagttttctttatacataaaataaaaatattttaattaacgcatacaccatggttgaaaaacaaagttaagaagagtaaatgttaaaaagagatagtgctttgaaaatatatatatatataataaaaatatatatatatatactagaaaaagcagaatatatcattattaaactcagtaactaagaaagaatgtgtcattgttatagaatatccaaaaaaacccatctcccaaaactttaccaatgtctacaattacagcaccaataattgaccaacaaccacagcagccacctcccatggctgtggtccaacaagcctacacagcccattcgggtcacggctcggtcggacccgttatagcggtccttgctgtcattactgtcctcggattcgttgccggaatgatcgggcggctatgctcaggtcgccgagtcatgggtcacggtcagtacttcgatttcgaagggtgggtcgagagaaaatgttcttcttgtctcgacggcaccgtcggccctcctcatcgaccacagccgccgccgtcgaatgcttccggcgttgaagtcccggtaacatcgaggtcggtggagacgcctgcagagatcaaggaagaggtcgcagaagagcaaactcaatatccacaacaaaactcacatgcaagtactagtcactagtgactgagtatctcattgtttcatggtaatgtgggttgttttgataattttttcatcgttaaatttttttatatgtatatatttgggtgagaaggaggaggacgaagttcggaaggaacgaaccagaagaacaaaggaaacgacgtcgttgtggaacagatcttcatggcagaatcagctgagtgtgtatggactgagtgctttggtggtga

SEQ ID NO: 264907 - DNA, 524 bp, Cannabis indica
ggtaaagttagcacaggagtggtaattaacctttgctttagttcctggaaactgctttcacacttatcattccaaacgaacttgcagttctttcaagtcaactctgttaagggtatagaaatctttgcaaaaccctcaacaaaccttctataataccttgccaaccccaaaaaacttctaacttcagttgctgacttaggtcgaggccagtctcgtaccgcttcaatctataccggatccataagaataccatctttacttaccacatgccctaagaaactcacctgaggcaaccagaatttgcatttcttgaacttggcatacaacttattctccctgagatgttgtaacagcatccgaagatgcctttcatgtgtctcttttgtgtcttaataaagtagaatatcatcaataaagataataacaaaatcatccaggaagtctttgaacactcagttcatcaagtccataactgttgccggagcatttgttaatccgaaagacattaccaggaattcatagtg

SEQ ID NO: 264908 - DNA, 561 bp, Cannabis indica
cttattgactttttcagtcaaaattaggagggttctaactgtattattagtaaaaagatttggaaatattattattagtaaaatttcgtagcttaatgttaaatccacaacacaataggaaggagagttggacaacaatcctatcaatgtgccctcacaattcacaaaccaactattttccttcacatctattgggaaatagtaaaaacaatttgggattttctattgaaagtttatcaaattagatgaataaatttacaccaccaaatatatagcaatataaacatactcttttcttttaaatggatataaatattttaaatatatatgtgctacttaatagttacatcaaatatgtaactgttaactcagaatttggttaactaacagaaccttatttattactcacaatcatcacgtataaataagaatgataaataatataaatgataattttatttgatgattagttataattattaaataaatagttttggcatttatagaattgaataagaaaatatggtattattgaaagaagaataagtggttgaaataaag

SEQ ID NO: 264909 - DNA, 607 bp, Cannabis indica
aaccgtatggagccgttgtatgagagattccgtaagcaagcacctccagtgtttctggaaggtcctgatgtgatgaaggctgagccgtagctcacagtgattgagcgtattctaaactttatgggagttgttggtaacgatcgggtgacctgcgccactttccagtttcaggaggacgctctcgtgtggtgggacttgataaccctcacttgggacgtcacggttatgacttgggaagaattaagggagttttttaacactaaatattataatgaagtcctccggagtgctaagcagaaagagttcaccgagttagtgcaaaccgaggggatgtcggttactgattatactaaaaagtttgaccgtctagccaagcttgtcgtgggtatcgtgccaacagatttcagtaagaaagaaaagtacctggccggtttgaatgtgaagattaggcatgatctgttaatcactaccactgaagcaaccacatatgctgagatggttgaaaaagctttgagagccgagggtggagtgaaattccttcaggagcgtcgagtgacttcgaatgttggtggaacccccacttttcctactcctgcctatggtaggg

SEQ ID NO: 264910 - DNA, 2338 bp, Cannabis indica
tattagagttgttttaaagcttgattagctgttctttggtagggaattctcaagcttgagctcccatggtagttttctaatttcagcgtttcggggataattgagttgtgggttatgcttagttatgatatttgaactgttctggaaagtttgatagggtttggttaggtttgtagtataaaacccatgttttatccgtttctgctaagaaaaacgctaagccgtttggggtgttttccagggtctagatgtctgtattttattaatatttaaagtattgtcatgttattaatcgatagaaaaacgtccagttttgagtttaagtcatagaacgagattaaatgagttatttatcagtttaccattattgcatattccttggtcaatcactcatttcatggaagtctaaaaagcagcaaacagtgtcactgtcgagatcttctgttgaactcaaacatagagcaatgaccaatactacatgtgagctaacttggttacattccatcttacacgattttaacatcaatatcaacatgccttcaactctcttttttgacaacattgaatcaatacacatatttgagaactctgtttatcatgagtgcaccaaacatgtcgaaattgactgtcttatagtacgagaaaaaatcaacaatgatagcctcaagatgaaccatgtctcctcacacaataaattagccaatatactcacaaaaccactcttcccttctcaatttaaaattataaccagatgggtgtaaaaaatcttcacactccatcttaaaagggtctattagagttattagagttagttaatcgcgattaagttagttcattagtcatgttgtccatacaatattttagtctatatataaggcgtgtaaccctttgtataattctgttagatttcaataacagaagtaattttctaattctctgttttaatattttcggtgttgtctatttttctccgataacagtattataagaaatagagtgtagttaaattttctcgattacctatgtaattacacgttcagataaatgtgctaaattgtataattactttctattaaaaaaaactttaataaacatgcttttagatcttaacataatataattgtgtagctaatgataaattttgcccacataccaaaaggaggagagatatacgaaattggtaagcatcaattatgttctgttcaaaaaattatgtattgtttaatatagaaaatatatcatcctcaaaatcaaatctctcattctactttatgtagggtttagccttctttgctttctcatatataaagcatttctttctacatatgaattattttatacaccgtttgaccaaaccagaaagggagaaaaaaaataataatagaagaaaatattttcaatagaacaaagatatttatttttatttttgctaaagagagcaaagttatttatttatatttttttctttggcaaagtagcaaagctgtttaaatccataaattcaaatattcaatgctctttatggaattgcaattccgtaggcaaaaaccatggtcgtcctaattgaatgaaatataatttaatgcacaccttcaaaactacgttaaaggtatcaataatatatatatatatatatatataaatcaaattacaactttgaaaaaaaataataaaaaagaaaaaacatttgatagtaaaagtgtgagttcgtgcgttccgtccgtatttatatgtacttttcaaaaaatcagatcgtgtcgtgctaaaaaaaaatataaacagtgttgtgtcgtgccgatatatttaaaagatagacccaacatgatcccaatatttttgtattgtgctttattcgtgccgactcgtatttattaaacaggctagtcaaatttgtattcagacttaaatttgtgctttacttttttatatatattttttttactattactaaattatatgtatattttaaaaattttaattatatttatataattttttaacaatattttacaaataatcatataaaaaaaactaatatcataaatttaaatgtttacatataaatgcttaaatttttatctcacaccctataaataaattaatacataatcttaatttttcatattttaataattttaattataatattacttgaatattatatttaagttttatgattattttaatttattcacaattgataaatttcatattttattattattattaataataaattatagtaacttttaatattctgtatttttcagtatttgtcgtgtgtcgtgttttttgggtctagtctattcgtatttatgtgtcatgtttttcgtacttc

SEQ ID NO: 264911 - DNA, 1650 bp, Cannabis indica
tataaattttgaatcttcattgttggtctaacttagggctcgtttagtacgtcgtataagggtcgtattgtattaaataataaataacactatgttttgattaaggaatctattatattaattattatgacgaaatttttaatacaatgtatgttgtattatttaatacataataaatggtccatattagcttgtattataatatttacaaaagaattggggtcaacaccaatctccaacccagacctgaacctggacccggacctagaccccaaaccccggacctggactcagacacggactcgagaccccggcctgggcccagacccagacccagaaccggactcaggacctggcccgaaccaagacccagacccggaccccggacctggatccggacctggacccagacccggacctcggacctggacccgaactcgggacgtggacccagactcgggacctaggacctgggacctggacccatagttggtgttaggattgagtgtattaaaaatattttataactttacacaatcaattaatacaagtcaataccaaacattgtattgtattaaataatactaatacaacacaatccaacacaatacaatacaatacattataatacgtcgtaccaaatgagcccttaatatttattttaatgggtccttgtggcacttgacgtccccctaaaggatgttcatcctttagcaaacttatagttttagatctcttaagaaatgtattttataaattcaaaatctagtcgacatattctcaatagtttacaacttagactagggtttataataccaaaataatgaagaagtttatcaaaataagaataaaactaactctcgccttaacgggacatcattagacttcttttaattgaatttatttttaagatttcatctaaaactttttaatttaaaaattactataatcatacatcattagacaagagagattataaacatcttcttgtgatattgttctattttattctaagaaaatgagtgacaagttcgagatattctatccaagaaatgttaattattcttaatttttaggaaatgaaattgaatctccttcttacagttctattaaacatcaattgaatataaacttaagattataattctaaaatttgatatcaaacattttgcatggttgacttaaaacttataatagcatttaatgtcagtccaaactagaataacatttcattttttagattacataaatattgtgtttaactttaattagttttaatttccatttcaatggacccaactatgtgttaatgtatgaaaactgagtttatattctgagacagagtattcacttaaactcttcagcaaaatcattattgtagctagacctaggaatcatatatattaaaagacaaattattataatagattatctatggcactatgacttgctcatagatgttttgacaagatccttctctgcaaggagaacatgtgccaaataacaacttggatggtatgttgaggtgtccttggacaaagggatgtacaatctaggggtagttatgagtaactcgtcagattcatagacggttactatagacatttatcttatgtaagaatatgaaatgtttgaaaaattttatgaatt

SEQ ID NO: 264912 - DNA, 422 bp, Cannabis indica
ggagacatattatttcgctgcaatcaatgtaaggttttcttaactttatatgtgttttccttttatcgttttagaagttcatatttaggttattaatcaacatacttgtgagtagatctaagatcctagtaaaataattccaacaactgaggtaaaaatcaattttgcttacctcttttcttattttctttaaaatttaattattttatctttttttttttaaatctaaggtcagatattaatttccttttatatataaaatatttctttttaagcaatttgaccttatttaaaataagattaccataatcatagtattttaaaaaagaaataagataattttgttaacttttaaattttgttattttttttaattaaattataaaatcagaaaatggcatgtatttatcattttctatttt

SEQ ID NO: 264913 - DNA, 515 bp, Cannabis indica
tatataaataatattttattaatgtatattgtatatatgttaaaaatttattattttaatagtgttgaaaataataataatattaattttatgatgtagagaaaaatataaagaaatgtgtgtaatgtaatgtaaaagtgtgctgtgaaatagagaaagtagagtttttgtgatgtactttaaaggataaaagtatagaagttgttaggagtgctctaactagctaacatttttgcttaaagtttgtcaaacactcactcagaattagaaaggaatgacgcctctccaaattacgaagggggagaaggtttacgggataaatttagtcagcaaaagcccctaaactcaatcagtatcaacatgtgatgactatttaagctttgttttgtctgaaaagaaagtaggtttggggtaatgagaaccactagtgaggacacaaagatagctaattactaagataaaatagttggacattgtgattgggataaatttcccctctctcgcaagaaggactt

SEQ ID NO: 264914 - DNA, 733 bp, Cannabis indica
gatagcaaagatgtggaatcaacctaagtgcccatcaatggtaggctggataaggaaaatgtggtacatatacaccatggaatactatgcagccataaaaaagaacaagatcatgtattttgcaggaacgtggatggagctggagtccattatccttagcaaattaatgcaggaacagaaaaccaaatgccacatgttctcacttataagtgggagctaaatgatgaaaacacatggatacaaagagaacagacactggggcctaattaagggtggaaggtgggacaagggagaagatcagaagaaataactataatatactctgttttctcttcagatcatattaaatctttcaccttttactaaagaaaaaataactattgggtattaggcttagtacctgggtgacaaaataatctgtacaacaaacccccataacatgagtttacctccatagcaaatccgcatatatacccctgaacctaaaataaaagtttaaaaattaactaattgattaaataattaaatgatttaaaaagcattattttgagaaggggtccatagatatcacagactgccaaaggagttactgcctaagaatgatcaaaaccctgcacaaaagcaactggggtcgtaagatgattcacactccccaggaagcactaaagtggagtgtttctgtgtcgttctaagaaaggcaaggtgcaaaagcaggggagagatggtgtctaat

SEQ ID NO: 264915 - DNA, 1184 bp, Cannabis indica
gtatcttaaccttatagttggtaagcaccatgtcatccattgccatggatgtaaatctaatttgaatatataaatattcctagctagagcatgatatatagtaatatatatatcatgtaatatgtatggaattgacattattataatatataatatatagtttataataattaggattgcataacaaaaattaattattcatcacgtgttaagcaacaaattaaattggaaaaagctagccaatctaatgtgtatatacatatatacatgtagggtttgtttggaagacaaaataagaggtgatatgaattaaagagagtaatttgtgaagtaaatatgtaagtttaactcttgattaaagataaataattattttaatttttaaaagtagtaataatatttaaattatatttttagaattttcttaaatacctaatcattaagtattaagtcaatatttgcatgttattttttttatttgtatacttaaatgaatttttaaataaaaaaataaacatttaatgacttgaactattgagttaggattgacatgtgactattgatttaatacttaatagtagtcaggtacttatagaagttctagaaatatataactttattataattactttcaaaaactaaacttaggtatttatctgtaagctagtaagttaaacataaatattttaataaaaaattactctataaaataaaatatgtatattaatatacattatgtgttttaatttatgtataggtattaggggttagttggatgtagagtttattttttgatcaagactaaaagaaaattaaaaatattaccaaatctaagtcttctataagaccttttgggttagttgatagagatgtacaaagtcattttacagccaaaccaccataaataattttgaacaaaacaaagaataattcaatataaatatatatatatatatatatatatatagacttactttttattagtgattatagtaatggtagtattgtcttattttatctttcatttttatttacttttgttaaatgatatataggtttagtctatgtctctcttatgtagtactaaaaattaataaaagtaatattaatattcatttctttcactatcactgtcactatcactactatctccatctctttgtcattatttttattaaaaatat

SEQ ID NO: 264916 - DNA, 971 bp, Cannabis indica
gcacttcagataggagtcgtgcagtttcttcttgagtaacacatctgagcaatggcattgagaatcctcttctgtacataattccctctactatgatatatcgtgcagctttctttctcatttttcgagcttcattccgactatctgggagattcccatagtcgaggtaggctgctattggtatcatccagtttggggaagtatcaatcattttgatttctttcgtgccagtgatgttaggctcttggaggaactagataggaaccaagttcgccttgtcacttacattgttgcttgccaatcgagctaacacctctacagttgtgttttcttcccttggaatttgtctgaggccgtagctttttaattgtgcaggcagatcatgtattttgctcagatatgctatcatcttttctccccgagcctcgtattctccggatacatgatttaccaccagctataaatcactgcagattttaatgtgttcagctttcatctcctggctagttttggtctagcaattagagcttcatacccgactttgttacatctgtagctgactcatctacatgtagcttccaagtcggcttatcttcattgttactgggttgaggtgtttgtaccagctcggtgttactttctggtatgctttctttcttgcttatgcattctaccacaaagtcagataaggcttggtctttgattgttgttcggggttggaaagtaattttgtattggcctaactccatcgcccacttgagtagccgtccagaggcatctggcttttgtagtatttggcatagtggttggtcagtatacactcgaacatgatgagcttgaaaataaggccttaactttcttgttgctaggataaggcagtaagcaagtttctctatcaatgggtatcggcctttcgccttaatgagccttttactcatgtaatagactgggtgttgtatgttgttctcttc

SEQ ID NO: 264917 - DNA, 645 bp, Cannabis indica
aatttttttttaaatgtgacactctaaaatattttaaaactactctatttatttagtttttttaatttttaattttttatattatcaatatttttaattttataattaatatcaaataaatatcaataatattaataataaattaagtaattaatttacccaccaaaattatggggaaaataattttaaaattggctagtttatataataataataataataaattgagtattaggaaggatattaatggtaattacaagtgatatacggtgataatatcaactttaaatgtattggtgacaagtaagaatggacgataacatctattttgaaatttttatagatttattatttttttttatatattttagaactatattttacgtgattattgtttaattttcaataattcgtcactataacatattttttaaaatattttttacttttttatattgtatatgaggaactatatggattttattttagaattcgttagaggtttttataaatttatttatattttaagtaaatctatcttttaaaattataccatattactattttttttttttagtactaaagtgattaaaatcactcatgatttacgtacgcccacgtccgccaccggcgctgacgtacctc

SEQ ID NO: 264918 - DNA, 4176 bp, Cannabis indica
tggaatagtcattttactaaaatggttcagtttttttataatgcaaccaaacaatagaatagaatgaaaatcgattcattttcattccattccatttcattacctccaactaaattcaacctataaatgtttaaaacatttgcttgagccttgaaaagcataggaggatattttttgttgaaaaagatgatttatttaaagttttatgtgaaccatttatctttactcttatcaggtcgatgcatggggcacagatggtgaggttcttcaaatcataatgcctccagagcaaaaagttgctgagctagtttctgccagtatggagcgatataaaattcaactaggtactaaaacaactgctttgaggatctcatctgagaattgcaaatggttttatttaattttacacttccaataggtatttattgattgagaccacctagatattttacttacgcacaccggcatttatttatttcataagaagaagattctctcaaagaagaaaacaatgttggaaccatggatagggaaacaaaattataaactgctgtgaattgttcagctgagaagaagcaactgtaatccttttcaatattgttttaaaatatataatataaatatttcaataaaacattaattcaattcgtgattagggtaaacgtgattaatttggaacttggtgtttttgtcttttatgccactcagattctaatatttggctatgcctcttcctttatccttaaaaagatttatttacactttgtttaccacaaaattagggattagagcatcattggctttagttagttgttgtttgtacattatatgcatcattctctattggagaaaataagatattgcgtagcttgtagtaatggaaggaaaacaagctcataaaaagagaaccctcaaagattatagaacccaagctccttcatctgcttaaccttgtcttaaggacataagaagtttaaattattgaattccttttttcttttctcttattagcattcccagttctacatgttaactgtgaaacagcttacttaatgttttaatgtttcagtgtcatttaccatgacgagtaaatctaatctggatacattaatattgtcttaagctcttcagggagttggtaatcaagatgagttttaatatgttttgtgcttgccttttggcctttcaaactcaaaagagtgcgagtttccttgttggtctgtcttgtaataaaatagagcttcttatgcaaatttataacctaagaaatggcttataattctagaaagcatttgattcttggaaggaagatttggcaagtgcaattagaaagtatatattggtgaaacagctacctcctttctaacaagactgttatgggttatatgcagaaaatgcaaagcaggttccggatgtggaaaatgttcctggacgcaaaggaatagaactctcaagtactcctattgaactgaaaggtggtgattgggttattcaagcagttccttggattggaggtagaataatatccatgatgaacattccctcaggtaacagattcggatattttgaaattcttgtttcttcttgttgtcttttatctgcactctgatggaggtactgtaacatggtgtcaatgaattattcaatggaaatgatcatgtatttaatcaatccaatttttcactctacacgagaacattatgcaagtgttaccaaaagcaagaattacctgtattagaatcgtgaaatattaacatgattgcttagtttataattttattatttcctttttggaaatattactatttagatttcattacctgaactccctatgttctccaaaattactgtatataccattacacaaaactatgaaaattatttatcatatgggtaaaccaaccagatcgcatgtatctttctttttctttttcattttttccctaattgaggggaaaacttactataatggaaggaaagaaaaattaggattttgaacatgataacatctaaattattcaaattgttagtcagcttaactaatacatgactgaacttaaaaagaatggtagtttgggagctcaaaagaacttgaagtttgatttgactaatgaaaggaaaagtgatgattgcatataatgtttcttcttaaaaaaaatgatgacctttcataatgtttcaattcaccaagcagctttcatataccaattttcttgcagtatgaaatcctgaactttacgttttgttgtgtttcattcattatcatgtgttgcaggaatacagtggcttcatagtagggtcgaggttaatggatatgaagagtatagtggtcctgaataccactctgctggatggtctgaggaatataaagttattgagtgagtctctcttatgcatttatcagcaaataattattcaaaatatcatgtttgagtagatggaccagtcacctgcttcaagttttcaattattgcgtactactgtatgttttatttaaaaaaaaaaccaaaagcacaagtaaaaccttctcagaatctttgtaaagtgggtgaataacttgtgctataaaagaatatattttttgttatattatgtagtattccttgaaaggctagataattttcagggaaagagtaaaggtcgttgatacaccattgattaggacctgtactaggattcctaagaaaagcaattgtaatgctgaggtggaattaaatgaaagtgagtgaattgctggtgtgacagttagtgtcagtgaatgcgtgtaagtgtttatttaatttcagttgtgagtttgtttagtataaatagagatgctaattcatttgtatagttttatgattgattttgtgaaaatgtagtattcatactcaggggagagaccaagctgctcgaagagcctggaaccattgtgactattcttttgttactgaaataaaattacagagctctaattcttcaagattcagattgttcctttgtgtattctgaccgtactctgaatctttctgcctgcagacgagatcttgagcatgctggagagcaagaatctcttttgttagaaggagacattggtggtggattggttatgaaacggaaaatatatattccaaaagatgaacccgaagtgtttcgaatagattctagcattgttgcacaaaatgttggtgcaggttctggtggattttcgaggtttgcatcataaaatccttatgttccaatttgttttttcttcaattttatcttattgtatttctttagtttttgttgtgctaaacacttttctttaagcaaacggagattatatattttagttaaaagtggttgggtatcttctgaattaaaatctaatgaggcccaaaaggctactcgtatagtatatatactagtctatgaaccaaagactcacattacattcccaaataccagtcacacagtagcatgtacaaagagtatacctttaaatttttgttagtgaatgtccacctttgaggacatcaattcactctatctgcttcgtaagtttgtaaccataataaaatattgtaaggataactaaatatgcaagtaaaaaatctccctagccatgacttataaagatctagatttttcccactacagaagaaaatgtggttatgctattatggaagaaattgcatgtgcattctttcttctacaaaacagccatctttcctttgggtttgttttgttttgttttgtttattgtaatataagcatattcatcacccgtattttaatttgtagattggtttgcataagagtacatccaatgtttaccctcctgcacccatcagaatcttacgtctcatttacctccattgatggatcaaagcatgaaatttggcctgagtctggggagcagttttatgaaggggatcttctacctaatggtaaagttgctcattttcagtgtttgcttttgaagcaaaaaactttttatttaaataaattactccttttagcaatagaggaaaacatgaacatgatggctactacatttatatgttctgtcaaatctttcctgcgaacttccataaaattcaccagcattaatagctcaaatatgctagaaatgattggatattccatttaatttttgctttagatgattgagcttagtcaaacaattatagagttaattaaaagaaaaattga

SEQ ID NO: 264919 - DNA, 1238 bp, Cannabis indica
aaaaaaaatactagatactaataatgatttttaataaacaaatgagtaaaaccaataacatgcctactaaggagagagattgtttggagggtattgattactattcaccaaagaccaccgaatctaagaagaagataataatacaaaaatatatatgaatacccatattacacacgttttatagctataaatagccatgcccacttattacatttttcaccaactatcttacaaaaccttcaaaagatggcatccttatcttctcccactatcctcctcttatccttctttctcatctccattctagtctctctcaccaatgctactacagccaaaacagtaccattgcccaaggcctttgtcctacgcgttacaaaggacactaaaactctccagtacataacacaaataacccaaagaacccctgcagtacaggccaaagttgtcttagatgttgggggtgagttcctttgggttgactgtgaaaagggctataaatcctcaaccaaaaagcctgtcccttgtggctcaccccagtgcgtcctgagcttgtctggggcttgcagttccaatgggaagtcaactgaaagcatttgtagcgtgactccaactaacccattttcagtaagtacaagtggtgatttattcacagacatcttctatatccaatccaccaatggatttaaccccggaaaatctgtttccgtacccaatctccctttcgtttgtgctccgaactctctattgaaaggtcttgcaagtggaactgtgggtatggttggccttggaaggaacaaagttgcccttccttctttgctctcatcagcttttaactttcccagaaagtttggcatttgtttgtctggtcattcaaacggtgtcgttttctttggcaaggagcctttggtgcttcacgatgttcacgtcactgatccaacttccttgatttacactccactaattcgtaacccaagaagccttgtaaccacttcacaaggaaatccatcaaccgaatacttcattggactcaagtccattaatatcgaagataagccagttaaattcaacactacactactaaccttcaagaatgaaaatggtcatggaggaaccaagataagcaccattgatccatacacaacattggaaacttccatatacaaagctgttgttgctgcatacattaaagctgtaaagattccaacagttaaagcggtggctccattcggtgcttgcta

SEQ ID NO: 264920 - DNA, 902 bp, Cannabis indica
ggacctcgacccgaacctagacacaaataagggtcagacctggacacaaacccggacacaaactcggacccaaactcaaacacccacacctagaatcagacccaaagctaaacccggacccggacccaaactcgaaccgagacaaggattaaaaccaaggacttagacccagaacttaatccagactcagatcgggattggaacttgggactcggacccaacctagatcaagacccaggacgcgaacccacatccggagcctgatttggacctagactgaaatccggacccaaacccaaactacgaccatgactcaaactccaacccgaactcaaacccaaactcgaacttagaatcgcaaatagaactagaaccgaactaggaccagggccagtacctaaacccaaacccgaacccagatcaaaacccagacagagacctaaacccgaacagagactaggactcgaacccgaaccttgaccgagacccaaacccacacaataactgggacctggacccagaatcaggatagggacctgggaaacagaactacgaccaggacgtagcacccgaccaagaccttaacttgaacctaggacccagctcgtgacccggcaccaaaaatggaatcagactgggacccgagatcgggatccagatctggaccaagggctttgacaaaactagaagtcggtgtcaggatttgggacccagccctggacccaaaccctgacaaggaccaaaccacacccggacctgaacccagtcccaaacccaaaagtggacccgaacccacacccggacctgaacccaatccaaaacctaaaagaggacccgaacccgtaccttgtgacccaaaattggaaccaaaatgagaatttgatcgtgattggaactaggat

SEQ ID NO: 264921 - DNA, 521 bp, Cannabis indica
aatatctttagtcatgggccttttagtaataatataagaattatgatttataattagtcacaatttttttacttttaatattagtgttgtactaaaaataagaatttttttgtaatgacaaattctggtaaatagttagttaccaatagttgtagtagctttctttaattgttgtaaaccgtttttaccaattaatcaatatagagagtattttgttttactcttccctctctcttctctcttctctcattcaacttgatataaaatggtattttgtttccatagattattttctattgaaattctcccactagatcagtaccaaataggaagatgtattttgtaaatgaggcaaggcattggtgactagctagtgaataacaaagcatatagagctagaaatttgtaacttattaaataataactgagatcaattaccatttgtattattataaatatatatatatatatatattgttatggcctatatatatattgaaaaggaaaagaaaaagagacaa

SEQ ID NO: 264922 - DNA, 306 bp, Cannabis indica
acaactttccatcttcagttaccctgagaccttggtcgcttccgtcatgaatctactaatgtatgctcagagaggcttgcgtggtctttccttgactttgaccaggtctgctaaatgcaacggaagttcgtgagaggaggaaaattatgcatggaattctgaggagaaagctttccatgagttgaactttctaggggccagcttgaaataccattgctgggtggctttcgagagggtagcaggaaaaaatctgcaacatacgtcacctcaaaccccctcgcagatccatttacatctcaaaatact

SEQ ID NO: 264923 - DNA, 636 bp, Cannabis indica
tttaactgagactgtttttaattagtttaagtgattaaattttaaaaaaaaatgacacatgaatatttaacacttagtcgagttctaaaaatataagttaagtattattacctttaaaaattaaatctaaatatttatttgtaatcgatatttaaatttaaatatttatatcagaaattactttttttgaagaaattaatcaactttattaattgcaatcaatcacgagattacatgaagcaattcagtagatacatcattgcttgtaagattacgatcagcaacaaaataggatgccctcgcaaaggagtgagcaacactattagcagaccgtctaataaaattaacagaaacatcaccaatttgttctaaaaacagtttgcaatccgaaataacacttccaaaataggataacaaaggaagattactacgaattgcttgaattacggagagacaatcggattccaccactacaccttgccacgcctttttcttcacccaacttaaagcctcccgcacccccatggcttcggccaaagctggttgaactgtccctgcccgacagcaagtgagagcctctatcaaacacccattttcatctcttgcaacacaaacaaaagagtacgttccattgct

SEQ ID NO: 264924 - DNA, 638 bp, Cannabis indica
aaaaaatgataaaaaatagaccaaaaatacacctagtggccggccatgtatgtgggccgaacactagttagatttttgccatttttctcaaccatttgtctatttttcacaaatactaatttttgcaacttcaaccctataaatgcaaaaactctttatttaataattaaaataatgtcatttataatatttattaattagactccacaaaatctcttaattaataacttaacactaaaataccatttcttcacaatcaagccatatcttagtgaaaattcataatctagacatattctaattttaattaaaattgattaactaaaatcaattaactaagttttacaagcagtttgtgacaactaatatggggaccatgtgcctatataactgagcttccaataagcagatctagaacttaccaagtaaattctctaacttattaattccttgttgaaccactatagaacttggaattgcactctcagttacatagaacgctctatatgttccacgatatagatacgctattaattatccattgttataatcccaataatcaatgatcctctatagatgatttacattggatagggacaaattaccgttacaccctttcaatgtactttatccttaaa

SEQ ID NO: 264925 - DNA, 633 bp, Cannabis indica
tattatcaagatctgagtgtggatctctttctctcctttgggtttggttaccaccgtcttactcactatgattgagtacttcacttgctatgtacgggcatggtactcgcactatagatttgaatatggcgaagaatgaaggaggtgaaatcagtattcagagagatattcaagttttactgagacaacgtatatagaaaatatgaaaaaaaaaacaatttacgacaaatatcgtagaaatactaatttttgacatatataaattcttattcagtaaaacttttcttcataagaattatggaaaatttaataagctttctataggcaccaagattgtgagaatcatataagtatttaaagagatatgacagttttactgaaacatatttcattctaaaaaaaataagaaaatgagacctacgaatattctactattgtgattaataaatgagtaaatttagagtttcgtacctcaaatacttcaagctacttggatcaataaacatgagatgatggtgataaaagatgagagtgaagagtgctataaatttggctaaggatgttatggaaagatgatttgaaaacttttatggttaatcttgctcacatgggtggaaaagaaatagaaatgat

SEQ ID NO: 264926 - DNA, 548 bp, Cannabis indica
caaccggcagaccggttcccaacccgaaccccagatcctgggtaccaaccggtcgaccggttgcacgagaattctcagaaccggttgaccggttctgagcaggggacaaaaattcaatccctttaattcaaatcaagcccaaacttttcaaaactttccggaacacctgtatgcactataataaagcatatccaagcaacaaaatacagcaattcaagaaaaatctcaattcaccattagagctccaacttgagctctaaaactcaaattccatctcaacttcaaaataactaactaattcagccctaaacactcaaaacaatcaatacctaactccagaatagaaaacaaaccaacaatacactcacagcccccttaaaatcccaaaactacaaaccataacttaaaataaaaccaaagaacatcaaagaaggtaagcaaaagggttttaccttgaattggagcttcaattactacagaaactagctgaattgggcagagaaaatcccagcttagtgctggttctaccaattcgagagaaagaggga

SEQ ID NO: 264927 - DNA, 1248 bp, Cannabis indica
taaaatacataatttatttttttattacataatttaaaatattttatatatcagccgcgaagcacagaatgtttactagttaaatataactacgtacgctaatagcaagtttttttttcttttattagttttacaatatttttccatcaaatcatggccaaccatcaagttttttagtgtcaataataaaattcaaatatttttcttataattgggatgattgtgattatttgttgtatacgtgtacttgactaagttgacttcatttgtttaaaggattttatgtgctatgaaaacactactaaaagttgtgctatctccgcagtactccagatctcgttaagattgattgattttgttaggtataaatttaaaggataagttgagaaatactttttttattttatctattaatcaaaaatactcttatattatattttattaaaatatatctatttttgtgagtgggctacccaatatactctccctatccaattaagtctagcacataatttacattaacctaaggggtataacgggggcattataaatgtgggtatatcttaaagaatatataagaataaaagtaaaaattaaaatgtataaagtaaagtagatttaatgcaatttcttctaaatttatgtaccaagatcgtgggccaagtccggaaagattagtgagtaattaattagggaaacttataaaaatattggattttgacccaatttttacagaaatactgtcacacagcaaaaataacttttatactgccttgagactttttttttcttttatactgtaaacaccgaaaataaaaacgaggtctccatcttctacacccacagacagaaccaccacaataacaccagaacaaccaaaaaaaactattaaatctggtgagatgaagcagaaacattaaaaccattaatattagggctgtcatgatttttctaatgttatttttgggttgttccactattgtttcgtatgtttaacaaatgttggttttaaattacacatgttaaaccaaccactaaatatttatatgaggtaaccagaatgaaagaatcatagacagtaatagacttacctaccattaaagtggtggaatctagaagaccaaaaaaaaaagaggatggaagctggctggaaaaaaaaacaacataacaaatgcagtaaatgtaggaaactgacacaacaatagaacatacaggaggagacatcaaaaataaaaagaaggagaacaa

SEQ ID NO: 264928 - DNA, 2141 bp, Cannabis indica
ttcaatccagtccgatcacaattagatatctaatatttctcggtcgattgtaattggatcggtcagttgtaattatattagatcaatttatacacaatcttaatttacatataaaataataatcacatatatatttccaaaattaatacaaaacaacataaaaaaaaattaaaattaaatcgtactctttatatcggtcttgagattttgtgggccattagattcttattctaaggataggatatgtcattgaaaattttcaatattttttgtatagtttttaaaaaggaatttttctaagggcccttagcatgtgcgaccctaagtacagggttgacccgtcttaactcagagccgactttaatcgtgttcttcatctttcttcactatccatcttactttccctccatatatttcgaaccctatttctatggtacgttaacaacgagcggtggaaaaaacttggcttgcaaaaccgaggtatcagtacgattatgacgaatccagggttcgcaacgatactgaaagttggaagcatcagaaaaacatggtccagaaggaatgatatgccacatacatttatgaggttcactacattgtttgggatctctagaagaatgaatataagcaatatgaaattcttttccaaaatcccattggaacccacaatagagaaggttataagcttttgttctttcctcatttataaaataagattttttgtatggaagaaacttgacaccaaagtcaaaatcagatttgaagcaatgaatactcaaatcttgttttccatccaaaacattttctatgataaattcaggaattccttctttgactactccatatgcataagaaataataaacaacaccataatacatgtttgtattattattttacttacaagtctcattttcttttttaataaaggaaaagaaaagaaaatgaaaaatattagattctatttattgctatgttatgtattttcttttcatctatgcttttatagggttttgatcataaataaattgagttttgaattaattaatggatatgagaagttgatggcatttgtttagaggatcgagtagttaattttattatatagtaagtactaactttagcttagtgtattattattattattaataataaaatgatcaacttctcattgaaagaatcaaacaacatccggtaactccggccacaaaaccttagctaaatctaaaaaaagagctaagttaactaaattatgagcaacaatatttttagtatgattacaatgccaaaaattaagcactctaatcagggcggatcctgagtataggcaagttaggcttgtgcctagggtactctacctaagtcagggacaaaaaaaaaattgtccccttttaaaattacacattttttaattaattttaaaaaatatattctttctaaataagggcttaaaaatatttttttatatgactcactaaatttcagtactaaccctgactctaacactatttttaataggataaatgtcttgtaaaatcgtacaaaacttgcctagaagtaccacttttttattcagggccggaataactctttgacaatcactctccacctcaacataaaaaaatctcgagcgttgacagagttggagaccatgaaggatagtcatagcttctgctataagaggagccaccataccttgtgccaacaatgcagcagaagctaggcaccaacctacatgatcatgaacgactgcccccatctcaaaccatctcgcaaccatatcgagcccaacgtccacattcagtttcagtcgtccaactaaagggaggatccaactggaagggctcaacattttgaaaatcatcatcaaatcttacccaatcaagcttcaaaattaaatttgacatgacgaccaacccacattctccatgtggattcgattgcttggtatcctcgaaatgaacagcagagctcaacttgaaagtctttttcctttcacacctaaccataaaaatgatgacatgcacactactacaactatcagaattcgtgacggtcctaaaaataatttttttcggggaccgtcgctaaaaaattaagtaactatttaaaactgtcacgaaaaatttagtattcccaacgg

SEQ ID NO: 264929 - DNA, 561 bp, Cannabis indica
gctttgaattacccattattttaatctaaattatcaaagatcttctatagttgatttacatctagtaaggataaatttaccgttctacccctcaatgtattttatccttaaatcacttagcttcctataaatgatatttcaataaactaatataattactgaaataagagttcttctatttatttctattaagctaagctcaaataaaattatcatttcacttttataaagttatattagtgctccaactcaattgtattatcatgttctcaagatgtaagtattgggaacaaccatttgttcaactttaacaaacaagccaaagaacacaaataataaaattaagctagaacctaactatcttaggattaagatctattgacctaagatcaactaagtgatattgacttagaaagatataacggtaagtttatgatatcttttccattatctatatcggtcaagtctgatgtatagtgttgtgaaaatttatattgatttataattgcgcaagtgtatacaatcacaaacaagtaatacaatgataagtaatcaaagttc

SEQ ID NO: 264930 - DNA, 1421 bp, Cannabis indica
ctagggtgggcccgacgaagcggttgaaccaatccgtcaaagggtccatgttcaggtcccaaggatttcggaaggtgccctcgtgcaaagtgttctgctgctcctcccgcagaatcttctttaaggccttcacctcagcgtgcccccaactgtactcgtccagggcatagttgtgcttggcgactcagagattttgcctctcctcatccgcgggaacaggggtcaacacaatgccgtgcggcacagtgtattcctctgcttcggaaggaatcccggagtcgttgctcaccgccggagtgtcccccctccaggtccgcttgggaggctcagtctcaaccatttttccattccgcttgcgctcaagggcggtcgcatcctccacctcgccttcctcgacttccccctcctcgtctatcaagacgatcgtgcctaaaggggcactggacgaggacctcccaggggtcaccagccgggagggagccggaggcagagaggcgtcagggctgtatgcctcagcgagagtaggcagaagatcttccataggcctggctgctgcaacaaagaaataagctaagtgttagaataatcgtgaggaaggcatgcgcccaacaaaaaagcaataaaactagtcctaccctgactctataattcggccctagcaaagtcttggatcacagtactggcttcatcatccccaagaaagctgtccgaggggagaaaccagttggaagataaatgggctgaatggtccaggggaataggcgctggaggtctggagcccatccgggatcgacccaaaaaatggcctaagagggaaaaataatattctaaacctacaaaggcgctcatcgaaccgtataggtctaagttgggtatactctcaaacgggaggaacataatgtattattaaaggagacttaccagaacctgaagtactggcgtcgggagcaccagtattgggaaccgggaccacaggcttgggcctggggggcctttgttccagaggagcttccagacgaagggtgctcccggctgccgcctaggccttgatgtaggccagcttctgttccctgttaaagaggtacttctggtaccggtcctctgccgaggcaattatcaccacccggagcgccctttccgcagtcggagtcctcacattcgggcagatgaccttggagagattgaagtcatccaccgactgattctctgatatcagattggccttctgacagttctccatcgtgaccaagtccccaacgttgagggccttcttgtcataagtggagaaagtcttggctcgctggaggaacactcgggtaggcgcggtccgcaggtaaggtgggatcctgacccactctgtaagaagctccggttggtccatggcctgaaagccagacgaaaaaaaaagcggtgacggtact

SEQ ID NO: 264931 - DNA, 2659 bp, Cannabis indica
ggatatggagatccttttggatcccaaatggttactggaggttcacgtccctttcctagacaataccaacatccttctcatccatacttttcaggacagtatatggagaataatccagatccttttgaaccatactcacacaatgcaacatttcaccaaccttcttgctcttgttttcgctgctatgaaaagcacaaaagggcttctgctcctgttccaccctctacattcagcaataaacggtttgctgatggccctagcaatccaatgttgtttcaccatgaaaacaatggagtaagtggtccatccgatcctaacaaatctaggacagttatgcattcaaatttgcatgctgtacaatcccatactaggtggccaagtgatcttaaccatgacatgggttgtgttcgtaatcgtgctcgaagggtgatgttagcatctggttgtcgtcgtttccatccccttggtgctggagctccatttctaacttgtaggaattgttttgaagttttgaaattgccaagtaagcttacggggaagactcaccacaaagtgaggtgtgagtcctgttctactgtaatgagtctagttatcatcgataagaaagttgttctttctactgatttagaaaaagttcaaaatgccacagaggataacagcttcaatgaggctgttaacaacagtactttatattcacatcgccatatgaaccggacttatgctaatttctcttcagatgattatgataattctggatatgattttcaatcaatggacagagaaccagtttcagttcccgtaggtcattgtgtgaactcaaccaaacctcaagagatgcaaagctttcattcatcatctccatgtacctctgaggatgaaaacagcccagaagctcctatgtgtacaagagaggtttccaattctgctcagcatccaatcaaaaccaattcgccgccaccacctgctggatctcctttgcaagaccattttgactactcagctaacagtcaattggtgaaccggcttgggaaaggaaccggagtaatcgttcagaccaagagaaggtgaaaccaagtaaaatcacctcccggcagaattctttgaaagaagcatcactggcaaccgaaatggaggtttcattcaatgagtactctaatactgtaatttctcaagattcaggggatggaagcagaggggatgatcagccgaaagcgaacaagggaggtgaatctttcttttctaacattaaaaagagctttagggatttgtcaagagctaatcaaaccgatgatcggggaaaatgcaatgtttgggtgaatggacaccccatatcagaccgtgtactaaagaaggctgaaaaacaagctggacatgtccatcctggacaatattggtaagtttctctcatttgataagtgcattgatttgaggcacatgctttacattatgccaacagttgtgaataatgtgctatatctctaaatataaatccgaacttgttggtgcagaaagaatcattttaaacttatctgccattgttatatttgtaattgtattgattgtttgattgtctttattggcttaaaccaggtacgattaccgggctggattctggggcattatgggtgggccatgtcttggcatagttcctgtaagttcaatcagcttactcggttttcaggccgtttgcaatttttgtttgctattctccttcttattaatgagtatgccatctccttgcagccatatattgaagaatttaattatcccctgccagagaactgtgctgctggtaacactggtgtttttgtgaacgggagagaacttcaccaaaaagatctggatttgcttgctagtagggggctgcctgctagtagagacagatcatacatcattgagatttcggggagagtcctggatgaggacacgggagaagaactagattgcctcggaaaactagcccccacgtaagaatcaatttcttgaatgcttttgttactagaatttttactgcggcttttgtgaaaacttgtattaatgtttgatcatttgcggttcagtcttgagtatagttcctatcatatgttatttgtgccaattattttggtatcaagcataagattaacgtttgggttggtagtgataggaccttatattgatatagctgctataaagcatattgtttcattacagagagttggggcatacatcatgattgatgatttgaggattatgtactcttgcctacaatggtagaaaatctattgaaactaccaagtaataaaatttgaaacatagtagttctgaggcaaaacatttgaaacattacaagataggccatgcatcatgattcatgatgaggggcagttacgattgtaattctgatgtaaaaacaggatacttaggtatatgatcttctataacttctaggatctttttcttagttctagatccctcacctataactacttatgttgaaaacttattataccatataataagtaaattgttaatactacaatgaattatttaaccatctcaagcataacttatcttgaaaatttgaacagggtcgaaaaggtaaaacacggattcggcatgaagcctccgaaagtagctgtttcatcaacttgacaggaccataagctagaagagtaaa

SEQ ID NO: 264932 - DNA, 2112 bp, Cannabis indica
atactctgaccagaaggaaaaaatggatcaaaataaaagagatttgacctaataacgaaacacctaagcaaatgttgattttagggtttttaaaacccagaagctcagaagagataaaacaaagaaaaagaggcaatttttctcacgaaaagtctcttgccaaatattttcaagtcaaggggcatggttcaagggtttatttcttttcttttcaaaaataaattcaaagaaaatcaaaaatcaagcaaacaataacaaaatgcatatatatcccaataataccaggcatgcgaaaatagggaaaagaaaatcaacaaatagggaaataacttactcactattgcgttgagagttgaatttcttttaagaaaatgtttggacgaaaaatgaagcccacgtggcctgaagaacaatttctccttttctatgctttgaagattgaagaactgttgaaagttctaaatgaattgaaaagttcttcttatagacccactaaggggcagcctcagtatgtaattgaaatcgagttttcctcccaaaaatgccaaaaagaacaatcattaaaggagtgggggtgtgcaaccgtcaaaacacatttccccatttcccaattttcaaataatcattaaatgatgatatttgaagagactaaagaagatacacacatgcctcaggtagggcaaatgtcacctctagtacggcatgtgaactttaacacgtgttacccatccaagcaatgtgcggacctttgaagtccccatgcgaccaacaactctcacgcagacttgggggcaaatgttatgcaagttttctcacaatgtgacatgtcattcagcagtgtaacatgtgtcaagtatgtacacagctggatggggtatattcactcaaacttctgtctagaatagtttagagctaaaccgagcaaattccatgccttgtatttctctaagcgaggtgaatatgctaagtcgatttccattccccgcgcagagggacacggtaactaagatatcataggatattttctttaaatatccctttaattgtagcttaattagtatccctatttttatgggatttagtttattaagagaatcatgagatttaacatttaactttgccgaattcttctcctatatgttttagatattaaccctatttttcttataaatagtggagtcattccactgtaaagggatcctttttctgactttctaagagctattacgttgttaaaatacttgtaagctttctcgggattataaaaaaactcacctgaccggaccttgtgatcttaataattctctaagtaatacaactaaaaagagagtaggtcattaccattatcacggagtcgaacctctataaaattcacgtgttcttatttgctttattttattagtaattgatcattcaattttatcgctttaaagactcaacgtcataagctaaaagcgaggtcaacactattaattcatcataaatagttatataatctaatagatttgagctcaataactaaattcactcctagaatcaatattggatcttttccgaaagcttggatttcacttattatacaacatgttcccaaccatccatgttattgaattctcaaaatagaagttgtaggtctcgtctctgagaaactttaatgagtgaatcaaagaacttaatgaataaaataggagttcatgaatactcaatatttagacaaatctactaatgatcatcttggtgatataaattatttttatgataaatgacgacacgttgataaaagatattaatttatattggtctattcatgcataatcaaattatacacatctttactaaatctcaacccacatatgtgatccaaatcaaaatcacatgccaatactatgtagtgtttaataaaccgtacttgtcaaatactatattaagtatttcgtactcgaatacattaccgacttattttatttgtaagttataatcttaattctcttatactcttacaagatcatacactcctatatgaataataattttttttgatatttttttaattatttctaataataaatatattcatttataatataattgttgttaattctatttttggca

SEQ ID NO: 264933 - DNA, 471 bp, Cannabis indica
aagttagaggaacaatttcagaagaaatccctaaccaataagatctatctgaaggagaggatctttggattcaagatgtcacactctaagactcttgaacagaatctagatgaattcttgagactacacattgaactagctaactctggtgaaaatgaggcccttagtgatgaaaaccaagaaaccctggcacaaaagggaagaagttctagtagggattccagcagtcatcactctggaaaatctaagtttcaacctagaaatcctaaggatccaaatggttgctatcattgtggaaaacctggacatcttaggagagattgctatttactggaagaaaaagcaacaagtacaaatctgatggaaatgacatcaattctcaaaaatcagacagctacaaacacagagaacatcaagaagctaatttcactgatggctatgacagtggggaagtgtatgtggctgctacta

SEQ ID NO: 264934 - DNA, 791 bp, Cannabis indica
agagccaaccataacattcaacgacgaagatgctgtccagataaggtttccgcacaacgacccgctggtcgtggaagtccagatagcaaacaaaatggtgtccagaaccatgattgataatggggcttcttcaaatattttgttcaagactgcctacgagaagatggggctccagctcaaggatttaactccatgccttcagcccgtctatggtttctccggtcaaggagttgcgcccctaggacaaatccgcctacccctcacagttggacaagctccaacgagcataactgtcatggcacagttcctggtattggatgttccttcagcctttaacgtaatgctaggccgaccagccttgtacgacttaaaagctgtcacatcaatattccgctcgtgcctgaaacggggtagggtgtcttagagggaaccagcaatctgcccgggaatgttacaaccttgcagtacgtggccaaggctaagaaggaagtatcctcctgccagagctcggacaagggaatgaatattgccaagtaggaaaccacccaaggcgaggatgaagatgtggatcctcgacttggggacccaagcagcaatgttggacctatggaagaattagaagagatcgagatcgatccagatatcccggccagaaagctgaaaatcagaaagggtttgttgctcgaagtaaaatcggtattgataaaattattgagagcaaacctagacgtttttgcctggtcacatgcggatatggtcggaatcgatccttctattatttcgcacgtcct

SEQ ID NO: 264935 - DNA, 877 bp, Cannabis indica
tcaataacgctagtgctggtgctaggttggggcttctcctctcgatactaagcgccctagggttgagaatggcggcaatggctttgattctccaagtggttggtcttctttctttgtttttgttgttgtttttgtattttagattggtcaagttgtgattttgtgagagttatatgcagattataagggacaacaaggttctttgtcttcgcaatcttcgataccagtttcgtatggatttcagggttcgagtaagaagattgagattccaaatggtagggttggtgtaattataggtgggagatgcgactgagaggaagagggtgcgaattaggtttccaaatttagggtttttttttttgtttttaatttaattatattttatatttttttatttcaaaatttatttattttcctaatttcaaattattttaattttatttttatttttttaaatatttatttacgtggacaaataaacttgtgccacgtgtacacgtagacattccaccatggcagttaacagttaaaaatggatgaaaatgttaaactgttaacagaacacgagtttaggaagttttaccaccaaaatagaattagaggttagttgcaataaactaaatacttatggaggttatgccgcaaattactcaagttgtgccaatctgtttgtatatttttttgggggattttttaccttagaagaaattacacttactatgggattttaaaagttcttatgataaatatgacacatttaagtttgacaaatttatatggtattttttgttttaggttttttatggtatttgatatgtcatatatatgtaaattatatttttaaattccatatttaatatttttatttgtttaggta

SEQ ID NO: 264936 - DNA, 506 bp, Cannabis indica
atagtgccaaggagatagagtctaaaaaagtcaagctggaggacactgttaagaatctcaacaaacttcttgataagaaggacaatgagatctacaagctttcagctgaactcaaaagagctaaataggctctagagtttatccctccaggaacggctgccatcaatcaaactcttcaacttcaaaaaccttatggtgatcgaacctctatcggatacacgatgttgtataagtaaggagataacttgggggtagaagagtccactacacctgtgatcaacctggacaaaaaggctgacaagcaatcgtcactctgcaaaatcacatttactttgttggatgcttctcttacaagagtttgatctagaaatttgtgataaaaatgggtctgacaatgttgttgctgatcacttatttaggctagttattgaaattagtaaagagcctacccctacccctatcaccaaaactttttctgatgaataatttgttggaatatattttac

SEQ ID NO: 264937 - DNA, 3129 bp, Cannabis indica
aagttggaatggtgccactatcagtgtactcagcctcaatcccacgatccttgcattcagcattaatcccacgatctttctgtttatccaaatcgtaacgagagtggaaattcttcctcttcaagtttccgagccttataaatagtgatacatgttcactaggcaaaaaggaccgagagattgaaagtcgatacgcagttaagctaagactattattatctaagaattatatatccagagatacttttgtaagagctataagaaaatgaatcttcttccttgttcttaattcaatacaaataacgaggattaggctattgcggaactgctcggagctgaacctctataaaattcctgtgtcttattattaatttattatatattcgttactacatatcgttttatcgcttataaaatagactcattgtcgttggctaaaagcgaagtcaacaacaagcacaaatgatacgaaggcaacaaagtttaaagcattcctgaacttcaaatttcagctaaaggaacttggccatttatagttttttcttggtctcgaaattgctcgatccaaagctgggatctctgtttctcagagacctttcactttccaacatttcaatgacacaggcttctttggttcaaaggctgtttccacaccaatggatgctaatctttctctcagtaaagttgttggccctcctgtcagcgatgctacttcttatcacagccttattggaaagcttttgtttttaaccatcacacggcctgatattatttattatgtcaatggactaagtaagtacattagtgaccctcgacaaccacacctcaaagcagcttatcgaattatccaataccttaaaggtactcaaggccagggacttatgttccactccaactctcagcatcaactcctgcagaccgtttattccaccttcgagccttctttgatgcaaactggggcacctatcctgatacatggcggtccattacttgtttctgcatattcctacgccagtccatcagatcttggaagtccaagaagcaatcaatgatttccaagtcatctgctgaaaataaataccgttcacttgccaatactacttgtgaaattctatggctgcataacatcctaactgattttggcatatcttcaccataaccaataactgttcactgtgacaatcaagctgcaatacatatatctgagaacgctgtcttccatgaacgtagcaaacacgtcgacatcgactgtcatatagtacgagaacaaatcaataaaaacaaaataaaattgtcctatgttccttctcggcacaatattgcaaatgtcatgagtaaggccctatttcctactcaattcagatcattattgtccaagatgagtgtatcccttttctacactcaatctttagggggagtcttaaatatagtcggttatttggttgttgttagtttagtcttgtcagttagtttcattccataacagttttttgttatgttacaacaactcattccctcttgtatatatacggttactttcattaataaaatcacttaactgcttttactaataagaagcggctcataccgaggacagattaattatattctttcctcgatttgttgaattagtatccattgcaaagaatcgtaatgtcaaaatcatagaactccataactgctctgaagatcatcatagccatacgattttgtctactgattctttgtggtcgttaatttttgtttgcaaatcgctctatgttttgtctatgaaatccttttaattatcgcttgagatagcattactattattctcttctgtgaagaagcttgtgttgagtgttataggaatggataacagtagccttaggtatctggtgtcttgtctcccattattagaaatactgactaaaatgatttcaaacctcactatctagcattcatttttcttgatcccaaaattttaacttttattttatgaatgagtatcaaaattcttaatagattatgttactgttacaggtggaattgggggaaaacatgagttatattacaagagaattgttggatgctatatattgaatttctataaacgcagagttgctctgttgctacgagcaatgtatatacatcatgattatcttcattaaatatacttcatgcctgctgtgtaactttctttggagcattcgtgcggttaattgaagtccacccatctttttactataaagtttgaacatattttttagagttatttgcggcataacctccttaagtggccaggtttttgcaactaacccctaattttaaaattttggtggtaaaaccccctaaactcgtgttttgttagcagtgtaacatttctatccatttttagcttttaactgccatggtggaatgtctatgtgaacacagtgtacacgtggcacaattttattagtccacgtaaataaatatttaaaaaaataacaattttctttttctttaaaaattaaaaaaacaattttaggaatataaaattaaaaaaaaagcctacttccctatcccattcttcttcttcttcttctatctttttctctgctaagacaaacaaaccttccgaaatcctaacaatggcgaaaacaacgataacatcagcaagccccatgcctcctcgccttttatctttgtcacgtccgtcttaagcccactcgacccgaagtagagcgacagcaacaaccccgacacgaaatcctctccctacaaactctccttctttcgaaattgtcagactgaaaacgaatgccccaaaaatcgaatggattcagatcaagtccatcaagaaacttgacgccatcactcctcccaatgtcagggacatatacactttgtccccagatacctgctagtggttggacgagcattgtttggacacccatctcatcatgggtcgaaccataagccttatgaaagccacgaaagctacgcctgatagcagatgccagatcgacacaaaggagctgctgctggtttgtggggttgattactttgggtagtgtttggttggatttttggtagtgtttggatgggtggctgtgcgaaaatgaacagagggagagagagatgcgttaggtttaggttagggttttt

SEQ ID NO: 264938 - DNA, 541 bp, Cannabis indica
atgaaaccttgggaccccaataccaatttcagaaaggaggacataagaactgttcctatttgggtgcacttggaggagttggaactcaaatattggggacaaagaagcttgttcaagatcattgggcaaataggcaaaccggttatgattgatgtcgtgaccaaagaaagagaacgattgaattacccccgaatactcattgaagttagtatgaaccaagaactccctgcaacggtggaatttgaagatgaaaatggctgcaatgttttagttggggtccattatgaatggaaaccagtcacttgtgggcattgttcaggtctcgggcacaccactgaagtttgcaggaaaaaaaatgagactaggaaggaatggattgttaaggaggataaaaggccagctagaactgaggagaaagttgataaagaaggatttcagcaggtgataaaaaaaggaaagccaaggagaactgttgaggtgcaacccactgtgacagccaacactttccaggtcttagaagaggatgagcaggtgccaagca

SEQ ID NO: 264939 - DNA, 1934 bp, Cannabis indica
tattttaattagtaatcccgattaggggattagggtttcataagcatttttttagtagcgtgcctaattatttaggggtgttacaagggaggtcattcagcatctccagcaagctccaaaacaccacagtaagtcgccaatccggcgcccttcgcgagcgtaaaccttgcaccagcagaagacagtctgagactatcttcacccgcctccaaccacgactttggcaccacttgatcgcatgaaacactacccacgcctcagcttccagcggctgagttgcctcaaatgtcacagtcatggcctccaagaaactaccctccgactccgacacaacaatcccagccgctgctctcaagtctttgaacgctgcatccacaaaaagaaccgttttgcccacataaagctcctcaaaaacatgctgagccgcctccgaattaggccgagagtcccaaacagacacaagacaagcagcagccctttgaactctagccaacacgcccatccaagacggatttatacgatcatgaaaagctcgattcctagcagtccacagctcatcaaacaagaaaatacccaaatctaatgaactctcctatatctcctacatctgcaccactcatgaaatcaggagataaaatccattcaaccatctttctcggggagtcaaagtgaaggttcccacttctaatggaccaatgactagcaagccacaccgccttagcaagagggcagttccagaagaggtgtagagccgaatctttcgatgcaccacagataacgtagctactattattaccaaagatcctccgtagacggctcccaaaggggaggatatctttgcaaagtttccagagaaacaatttcagcctctccgtgatcttgagcttccaaattcggttccaaaacaagtccggatcaccccaacgatgcttgataatcgacttataagcaacactcggagtaaacaatccattagtggcatctttccaaaccaacagatcttccctagagctaggcagccgcttaataagattcagagaactagcaacactagggacaaaccaacgattgatagagctcgttctccactcaccatctgcaccaatcaacgtcgataccttgaccgaattttgctctattaatggattaaaggcagctctaaacatattccaatcaagccaagggatccacggagaattccacacatccgcccttctcccattcgctagtaaccaacaggtttcattcctaatcaactccctcgtagccataatcccttttgcaccgaaggaggcctgtttagaaactttcgccgaccaaaaggacttgtccccattaccccaatacttagctttgaaaattttacaccataaggagtcctcatccgatgcaagtttccacccgagtttggacaagagggcaaggttaatatcctcaaactttttgaagtttagcccacccctatcaagaggcaagcatagagaattccaatcaatgagcgccaaaaatctatccttatccgcggaacctgtccaccaaaacttacgaaccgcttgatccatttcggcacaaagagttttaggaataaggaaagttgccatagaataaactggggagctttgggccaccgcctgaatcaaggtcgaccgacccgcttgggaaagaagtttacaccgccacccctcaatcctagagaagatcttctccttaatgaacttcaaatccttgactttgctatttgaccaaataatcgggtttccaagaaaccgatcctccttgtttaacttccgaaaccccagatactgagttaattcaacttgagtgtttgccagaacattactagaacaaatataagcagaattctgaacattcaaacgttgtccagaccaagtaccatacaaattaacacagtccataacagtttccacctcagc

SEQ ID NO: 264940 - DNA, 1061 bp, Cannabis indica
agtgataggagctacgcttaacccaactattcacttataaaataagtgatatgagccacgttcaacccaactattcacttacaaagtaagtaataggagccacgctcaacccaacttttcacttataaaataagtgatatgagctacgctcaacctaactatccacttataaaataagtaataggagctacgctcaacccaaatattaacttataaaataagtgatatgagccacgctcaacccaactattcacttataaaataagtgatatgagctacgctcaacctaactattcacttatgaaataagtgatatgagctacgctcaacccaactattctcttataaagtaagtgataggaattacactcaacccaagtattcacttacaaattaagtgataagggctacgcccaacccacctattcatctataaactcaagtctttagaattacgttcaatcgtaactaaatataaaatttactcaacaatgttacggtcagccaaactcgatgtactcagtcaagccgttccaaagtctaagttttagtgacactcactaagacttagactaggggatatagtacatggaccaatgctaaatttacatcaaccgaataacataaaacatcagcaaaatgaaaaatgaagaatattaataccaaattaagataataagtcataccaccgcaaaggcaacgttcatacatcaaagcgtcataaaattcaaaagggaaatcgctaagaggatgtccgcacatcaaaaggatcgttaagcatacatactcaatgccacaatggcgatgttcatgctttaaacaaaagagacttaaagtttaaatcaattgtcacttgtaaacaaaagggagaaacttaaaagacccactatggagcaatggtaccatcttcagcaatggagaacatcacatcgtcaatgccactcccgccagaaatagaagtatgagcatcgacacccataccagggacagaggtatgagcatcgacgctcacaccagacatagagatatgagcgtcaacatccatctcattctcttgctca

SEQ ID NO: 264941 - DNA, 716 bp, Cannabis indica
ttatcattctttatgctgctattgtaattcgttattcttcattgtttctaagaaaagtactttcacttaaaatataataactctctacaattctaatcctattttttaatgatctatatatggtttcaaagcttaatcgattttccataagtttcatgaaggaaccttttgttaattcagagtcatactatatcgaaaagttagtttccttctatatcatgtgattcgtttcttgaatattgtgctttgagaactgttttggtaaaattgcaatatctctctctcaatataattccaatatcaaagatttttgtgtcattggaaagagaattaaagttactaaaactttcatgaagatattatcctctttttctgaacttttcaatgtcaaaagtttgtattttcactgagccatgtaattcgttacaacatattccttctcagaaatagtttcagtaaaactatgataactctctcatttttagtccattagtgatctttatatcattggaaagataatgtaattgcctatattttttatgaagacaacttttactgaattagtgtagttgttggtcaaaaatagtaagttttctgctgtactataagagtacgaattttaatattaggaccttgacccaggtcttattataggtagtagtgttgagataacaagtcttaagcaatagggctttgaggtaaggaaattagatagt

SEQ ID NO: 264942 - DNA, 2454 bp, Cannabis indica
tattaaaaatatgtatatatttttctcaaatttatatatatatatatataaatttaataaagaaacttgataaagcttttcaaaaaaaaaaacacagaaaagaaacttgataaaaagttagtaactatattattatattgaaaaaaaaaaaaatatacccaaacccacatcatggtcttcatcatggtatctccagtcagagccaaacctcccaaccctccctctcaccaaccatcatcataaaatctagtaaaaagagtcaaacccacaccacgctcagatctgagctcaggacctcgccgacgtcgtcctgcaagcccatcgccgatgagccaatcagctctcaccagcaacactccgtccttcaaaccctcctagctcgttctctctcgatcgataccattaatggagcatctcgaccaaccggtcgcaggctagtcaccaacggttaattagccgaacgagaccatggaaggccatatcctctttcgtctctttttgtccgatctgagtttgggtatggtttgattttgatattgattccaatgtgcgaggtaagatttgaatttgggttttattgtgtatctttttatatgaatttgtaaatggttgatgagatctgatttaattttgggtatgttagtgtacgagagcattaccggatgaaaatgctctcgtacatatgtaattaattttaatttatctttattttttttaagaaaaaattatgaaaatagttttttaaaaaaaattattagtttgaccaatagaacattgacatgtggcatttaaccgagttattagattgggtattaatggatctgttaattttgaagatttaggtatttatgctgttattttttgaatttaaaaacttattagcaacaaatacaatgatatttatgtcaaatttttctcgtaatgcttagtaaattcgttctcaataaatttatgtcataaattttcagcttcaaaaattcgttatttcctatgacttaaactactttcaccaataattgatgggacctacctgacgattttttttatctttctaaataaaaaaaatggtactattagttgaataaatggtaaggtactaatgttctgattattttggtcaaatttcgtcagaaaaaaagaaaggacagcaaaacggaaatgattgaggggatgagaaagttatggcagccatgtacgactagatcatcacctcttttccttttctatcttcttccttttcactgccgctttaatattctccacgcgcttcttcgacaccaccgtaagtaataattaactaatatatatatatatgttcttactgttttccaaattgctgccatatattgtttgacaagcaatgattatatgaatctctttactagctgtttcttaattacatatgtagtgattttaaatctctttattccagatcggttggattttgaaattgaatattatcattttgaaaaaataaattggacaaagtcataattaatacctatcaatattgttgagtctcctgtttattatatttgttaatgttaatttgagcccttaaaactctaaccagctatctagaacagtatgattctatttattttgaataacttaaatacacgtgatagttttaatcctctattttcaaactaattatgatacgtctttgtgttgtgttttaatacatattttatatgcacgtatttgttaatgagctttcctaaggcaatattctaatttgtacttattatttcgttgtttgttatttgcctgaaattatgtgttaagtgaaaaataataaaaataccattttgatattgaatattatttattttgtgtgtttataactctagaatattaatgagatcatgagaatataaatatatgtctcatcaattatcattaattataaagataaaaagtacttattagtcaaacaattatcacatactaattacatcaaattctaattaattaaattacagttaacaattcgtgtcatgatcatttgacacgcttatggtgaaacatgaataaaatattatcagtaattgtgtcaatttactctaaacacaaatacaatttctcaactgatcacataagataacacaatatcacggtatataaccgttcataatcatgtgatgatataaaaatacatgattaataaattagttatgacacaatatacaaaattaatgcgactaacataattctatacatagaaacacaaacaatacttaaatgattagtagtagtatatatatattcatataatttagacgtgctataattgtgtcattttcggtaaacaatatataagaaatgaaaggaaatgaaatttcagttttctagatgtgctcatttagcattttgacctttcttcattttacaatatatatacttcacatatgcaagaaatgaaaaagattttgataggaaattcctagcaac

SEQ ID NO: 264943 - DNA, 544 bp, Cannabis indica
gatgattgtgtggaaattacaattttacgatgagaaatatttttagtttcattctgaaagtatttttctggaaagtagataaaaaattaataaatttaaacttttacagaatttaatttgaatttttattgaattagttatgatttttttaagtttgaatgaaaatatctcaaacatgttgcacacatgcgctcgaggacaagcatgactcggccttcacagagcttcagacaagcccatgacaaagttttctcggacaagggctgtcctaagccccagctgaccaagttttgtccctcaagaaggctgcgtgcagcctcatttcaccccatttgctcccacacgcgcgcatagggagtatgcaatgcatactctttaagccaaacttgtttttgtgatattttgagtttcaaaaatcatttttcaatgaaataaaattcaaattttagtagaattttgtgtagaatccaaattttcaaataaaaatctaattatcataattaaattaattttttaattaattaaaattagttttcgatattag

SEQ ID NO: 264944 - DNA, 527 bp, Cannabis indica
gcaccagaaatggaaccaaactaggacctgagattgggatccggacttggactcagggcttggataaaacctgtactcggtgtctggatttggaaaccatccctggacccgaaccctgacaacgaccataacccacacccggacctgaaccaagtcccaaacccaaaagtggacctgaacccgtaccatgtgacccaaaattggaaccaaaatgcgaatttgacagggactgcaactaggactttgacttagaatcataactgaaattggacatagatctagaaccgtaatacggacatggacctggattccaaatcaaacctagacccgaattgggagccggacccggatcaatacccaaacctggactcaggaactcaacccgaacataaactcagacccaaaaatggaaccagactagggacaaagaacgagggtagggacctagaaccgcaccccaatcttgatcccgaaccgaaactcagaaatgggacatgggaccccaaccagaactagaccgagacccg

SEQ ID NO: 264945 - DNA, 573 bp, Cannabis indica
tattattattaatattatttaatgtttacacatatactacataaatgacaattaataattattagtgatcactcaagatttactaatgagtgtaaacagccacggtagttaataccgttatgtgtgtctgttaagttgttagcttccttttctgtttgttttctgttatgttgtaacaactttgagtgcctatataataaagactttgtcatattgagagggtgtggttttactacatttttactctctttctctcaaaatctctcttctggttcttggtgctctgcaccagtaaggaattcttctgattttgttctggttcttggtgctctgcaccagcaaagtgttcttactcattacatggtatcaatcgctgctgtgacatttctcaatgtcgtcctctacctctgatcctggtgccaccattggtgctaccactgctactccaacaactccatggaatccgttctcgcactcacttacatccactctcacgatcaagctcgactgaaacaactatctttcatgcaaaatctcaagtcatacccaactgtgattggtcatgacttgatg

SEQ ID NO: 264946 - DNA, 590 bp, Cannabis indica
ctttttctttagggtgacctttaggattttgttgaaggcttctgcttgtccgtttgtttgcggtcttgccaccacggagaagctttttacgactccatgttggttgcagaagtcagtgaattcttcgcaatcaaattgctttccattgtcagagactattttgtgaggcaagccatatcgacacactatgtttttaataataatgtctagtgcttttctagtagttatggtcttcattggctcagcctccgtccatttggtgaagtagtctattgctaatattgcatactttacttctccctttcctgttgaaagggacccaataagatctatcccccagaccgcgaagggccaggggctagtcatgagggtaatctcattggaaggagctctcggtatgttcgcgaacctttggcatgaatcacatttctggacgtagtctatgcaatattttttcattgttggccagaagtaccattatctcaatattttctttgagagactcggtcctcctgtatgatctccacaaaacccttcatggacctctagcatgatctgcctagcttcagggtccgatacacaccttaaat

SEQ ID NO: 264947 - DNA, 1300 bp, Cannabis indica
ttatgtgttagtatcgttattggtccaactaagtatcggatctcatatagtttaatataatagattttagggagtatcgctagccaatcacaatgtgacatgtcgagaagatgctaggcaccactagtgattaatggcaatgctctttacaaaatacaggatttaaaatgttattaccttggtggagatttatatgatacgatattaatgtgattggccaactcgaccaaaaccatatatctcttatcaacttctaattccttttttctaaaattggtaaaagtaattataatgaagatcaatagtagctctaaaactaacaacaaaaagtaaaagataaacacacaagcacgttagttgatatgtacactacttagtgttccattcatatccattcaagattggaaataattagaagatcttacataaaatttatgataaaaactcataagtgtatgtgaacacttatagattatttgggacaaaattttgaaaaattggtattttatttgaaaaataaaatgaaattcaaataatatttttttgaagccttattaaaattagggaatttttcatttttacacttcaaaccaatttttttttttgtttgtatttttacttgaattttacatagaaatcccctacttgcaactagcgctgcaatctaaattgtaacaaaaaatacgtatagaaactccttttgcaactagtgttgcaactactttagaaactcaaaccgtaaatttgaagaaaaaaaaagttaaaaaaataagtatataagataattccccttaaaattattaacaaaaaaagtaagctgaaaggccttggtcaacagtacgtcaccctaaaaacggtcttgttgtgtatctaaaatttttacaccataatatcaaatttgagcacatattttgggtgcacatatatcgtaatttgattcaaaaatataaaagtctaatatttatatttcaaattttaaatattattgtttgaaataatgttaaaattttaaaaataaaacaaacattatcaaggaaaacagtatatattaaaataaaatattcatttctaaaatatatattaatatagtctttttttttttggtctaatatattctaaatttaagaaaacaatcaaaattaacaattataaattcaaattcaaatcaactcaaatacaaatataacttattaatgtacattcaaaaaaatggactttttcatttttacactttcaaaacagttttcttttacatttttcgaaaattctacataaaacaatctattgcatctagcgctgc

SEQ ID NO: 264948 - DNA, 3351 bp, Cannabis indica
tattataggtaaaaattacaatacctattgtattaactccctatatcattatacctatcaatatttaaaatgtacaatacctattgtattagctccctaatgtagggtcaaatagcatataatatgatgatcacaaatatatgtgtgtgggacctaattatatgaaaagctttaatcatttatatttactgagcaatgaatttcgtacaattaatataatgaaatatggttaaaatagcacttcattaattagatttgcaaaatacacaaaatttacatgttactacattatttttattattattattattttacaaatatccatgttactgttaacaccattaactaatcttaattagtttttttgttagttcaagttagttaaagggtgtttagttagttaaagtagttagtctttctattacaaacaacttaatattctgtttcttgtaacatcatgcttgtataaatataatgataatcaataatagattgagctttttgcaattatgttttctgtgttcgtcaacctccgatcctcagtctcctgccatggcacctgcaactgaagctcccaggcctgtaccatgcatcccgctgttactggatcttggaatcctatttctaattctttgtcttcctctcttacgatcaagctagatcatgtaaacttcctttcttaaaaatcacaagtaattcctactgtgataggacatgatcttgatgagaacttgttcaccgatgttcctcctcccacaactcttcttaatggtgcttcgaatcctgagtacattcaattgcgacgcaaggatcagttacttctttcttggctacaatcttcaatgtcagaaagcattcttgcatcggttgctaatttcaacacatctttctctatttggcgtgctcttatataaaaattttcctctcaaactaaagctcgtcgattcaactcaaagggcaattctcacatgttcataatggcagtttgtccatctctgaattcattgagaaggttcaaaccattgctgactccctggctatttctggttcccttgttgatgatcgagatttggtgcttcaagctctcaatggcctaggacccgagtttgattttgttatctcaaggattacttcaagaagtgatgccttatctttgaagaagttcaagctctacttctgtctcatgaaagtcgtattgaacatcatttagccatgagtgatcttacaatcaaaatgcaagccagtgtggcctttggtaaggccagatttggaggtgttcgacattttgccagcaataattcaaccaattctactaatccaccaacaggctgaggcaagggtttttaaggtttccaaatcaaaaagtagtgtgtcaagtgtgtatcaagagtggacacactgctgcaatgtactattatcgtttggatgaaaactggataactcctacaccaagtaaccctgctaatcgtgtctttcttattgagttggactttgattgtgatcctcatgcatatatcataactatggtgcaagactttggagaggacaattcttggtattttgactcaggagccacaacacatgtcacttttgatcacatcaatcttaatgattaaagccctacaatgaaacactagccattggtgatggtaagaaactgttcatatctcatacagggcctgtctctattccatcttacgctaaattttgtcttgtacatatgcaatatgttttgactgttctttctattaccaagaacctagttagtgtatctaaacttactcaagataatgatatttttcttgaatttcataaaaattgttgctttgtcaaggacaagacaacacggttcgtgctactcaaagggaaacctagagatggactctatcttcttggagatgcttctagtcactcaagctccacactgcaatgtcatcttgctacttctgacaacttttctaatgtttgtagttgtaacaaagattgtaattgtactaaaaagtgtgctctcacgcaaaactcttgtaacacaacttcaataaataaaagttatgtttcttattcctctgagcattccatgtttcatgtttcacaacaatctgatataaacttgtggcattgtaaattgggtcatcttgccttgtccacactacaaaaactattacctttcatacctcatattggtaccctaaaaaatattcaattttgcaatgcctgctaacaagggaaaattcatagactgccctttttaacattcccaaatcaagtcactcaacccttagaacttatacacacagacctctggggcccttctcatgaaccttcaaaaaatggttttagatactacattcatttcttggataattttagtagattcacttggatagaccctcttacattaaaatcacgggcctttgagatatttattcagtttaaaagtatggtggaaaagaaatttgaattgcttattaaaagtgttcaggctaatggtggtggtgattacgaaccatttgctagatttttagttgatcaaggtatcctattttcccatccacgtcctcatactcaccaacaaaatggtagagtagaaaggaagcatagacacatcacagagacaggtcttaccttgcttccacaagcaaaattgaatttgaaatactagtggcatgttttctaatgttccacattcactataaacaaactgccaacacttgtgcttgaaaatatcaacccttaggaatgcttgtttaatgacaaacttaactattctatcttaaaaccctttggttgtgcttgtttccctcatttaagaccttataactctcacaagctagatttcaagtctgaacaatccttatttttgggttacgttcatgttcacaagggctacttatgtgaaaattaaaatggcagaatgttcattgctaaaaatgttatcttcaatgaaaatcactaccttgggatcactccaggcagcccacagaataggtacatcctgcatttcattctcaatttgttcccacatttagtttttcaactaaaccatgtattaatacttagtttgttcatggtactcctaatgctactactgtgacaatggtgaccccaccaacatctaagattaacctaaccttacctatggcacaacctttactacctatacctggaaccccataaatatcctcactgaaccctgtacctaatactttaccaacatcacatattgaccaaccaagattttgtgtctgtatctcaaccaggtcctttatctaaaactaccaattgtcaaccatatgttgtgtttgactctcaaccaattccataaacaaataccatcatagctactattcc

SEQ ID NO: 264949 - DNA, 509 bp, Cannabis indica
ttttatcttctccattatttttggcaaattatccatctaattggagaaacttataaaaatactggattttgacccaatctttacaaaaatgctgtcctacatggtaaatataacttttatactaccttgggacttttttttttcttttatattgtaaacaccgaaaataaaaaatgagggctccatcttctacacccatagacatcaccaccacagcaacaccagaacagtcgaaaaacaaccattaaatccggtaagatgaagcagaaacattaataccattaatatttgggctatcatgatttttttttaatgttgtttttgggttgttccactattgtttcgtatgtttaacaaatgttgattttaaattatatgtgttaaaccaaccactaaatatttgtttgaggtaaccagaatgaaacaatcatggacagtaatagtcttaccttccattaaagtggtgaaatctagaagacaaaaaaaaaaagaggatggaagctgactgg

SEQ ID NO: 264950 - DNA, 1220 bp, Cannabis indica
tgaataaagattattgaaatgtttgaaagttattaatgttaccggttattaatcttgaatacgtgttattaaaaaagtttgaaagttaataattgttataattagttattgatcttgaatatgtattaatgaaaatttgaaagttattaattgttattagttatagatcttgaacgtgtattcttgataacttaattagaaggagtgaaagtttaatttttataaaataacaaaattttattataaatattataattaaatggcttaatcgttaaaaaaaatataatacagacttaaatataaagtaaaattattaatattaaattttgcaaagaattttattaaatatttaaattaaagattaattattaaatagttaaatctagctaatttaattcaaagaaaaaaatgaatttttacatgataataatatgctattagaaatcaacaaaaatataagtaactattaaatagtgactcatataatatttcatatattgacatcaagttgaagagattgcgtgtggctttaaagctagctactatatatgtgtactcacgttgatttttttccactatcttttattgaccaaattttaatattagaataaccattttaaaataaattaactattttatatagtttccatatggaatttgaattgatacgttcaaatggcagacaagatagcgttcaaaagtcctaatttcttcaaactatttcctttttttttttttatgggggttgctttgtctatatattgcttggctttctctctctgtctttgaaacatctaaatcctattattattatttcttttggccaaacttacccgtattagaaggcatcatttgtattttgtcttcttcccaactcattggaaagagatgtgtaacatataattaatggggttgagatgataactaaaatcaaaagcaggtatagtttttcactcctaatttatcagtacttttggtatgcttttcattttcatagtctaactataataaagcgatgtagagacatgatatgcaaaatgacacaacccacattcagtggcaattacaaaagtgcatgtttaaaacgaattacgtaataattatagacgtgatcttttagatcatatattgttagaaataattggggtcacaactgtatatataaaatgtgtgttgggtcatcaaataaataagtcaaatttatgtggtctattttggaa

SEQ ID NO: 264951 - DNA, 505 bp, Cannabis indica
ctagcaaatttttttttgagtctgccactgtgtagataaccgcattgtaaattaaattttgaacaagcctactaaattttttttatacaattatgctcaacatgaacataatacaagtaatttcataaaatataaatataggcgatacatgtttattattgccactaaaatcattaattaacgaacatcatattaatatttatttaataaaattgtttatttttgtagaccaaatttaaatgtaaattttttacataatagatcaaaaatttagaaaaattacaaaaataaattaatatggaaaatttttatttttaggtgttgaacttttttatttaaaaaagtacatcgttagtaaaaataataaattattttttagttgtttatagtttatttatagttgtattatatttgttataagattattttttttggttgttttgactgttttatagttaatttatagttgccatgaggctgttttctcattatttttttttaatta

SEQ ID NO: 264952 - DNA, 518 bp, Cannabis indica
aaaatcttcatgaattattgagattgttggatttaaaaatttttttccaatcttaataagaaaattcgagggcattatttgatagatatcaaagtctagagagcataatttagtatataaaaaatcactgaattagtaaaatttaataaaattagatagaaatccttaaattcaacaatctcaatagttcagggagaaattttaacagtcaaaaaagttgagagagcatgatttgatacttgtcaaaatttaaagagcaaaaatcctaatatttattatggtccctctatttaaaatatatatatttatatttagaatttttgtttctcaattatgactaatatactattgtaccctttgaattttttatactgttagaaatagttttctaattatttacagtgttgtaaagtgattcttttgtttaagttttgtcacatgacaaattaaatgatgacttgactgtttaaatgattgttattagtatcccgtacatatataaaaattaaaaaataatt

SEQ ID NO: 264953 - DNA, 467 bp, Cannabis indica
tccattatggacatgccagcgaggcatcttgctcggcatgttgatccaaccaggtgctttaagttgatgccatgtgtcaccaatcttgtgatgccacgtcagagtgccaattttgggataacactatttatctcaataattggagtatcatattatgaagatgagaactattaactcctagtttcttttgtaagtgcggtaataacatttgtgtccgacaaataaacaataaattaacaaaattagcatatagttgatatgttatagtaaattaaaattaatataataataataataaaaatcttaaacaagatgtgaagatgtagctttattactatgatgtatagcttgcacctacatatataaataaatttcatttagtaaggttaatatttaaaatgattgaagaaaaaaaaataagtagtttaactttagcctgaagtgaagatactgttggaaattatttt

SEQ ID NO: 264954 - DNA, 1760 bp, Cannabis indica
acaacctattagattctattacagagagaatactacacattacaattgctctagatatcaaggtctttagattatttgaaatgcacatttttttacattagtgcaagtgagagtttgttgagttttgtgccctaaataaaacccatttcaatataattagatttactaattaataatgatcagaaattgcattttatgttgtatggttcacatgatttttttcatgattatatttaatgtagcgattctattaagtccagaacatatataaatatgatatctttgttcatgattatagtgtcgtcagcacagtggaatataaccatgattatatgttcaaaagtttaattcccatgatttgtcagttcactggatttagactgacatgatgatcgacgataaggtatacttacagcttggataagtgttatgtcctttctagggcattgacaaagtttaccagtatcagatgtacagagtatatattagaagggaccgatattgattttgtataagatatcataaattttccgttatatctttctaagtccatatcatggttgatcttaggtctatggatcttaatcctgacatggttaagtttagcttagtggtattattcatgttcttcaagttgttcgtggaagctaaataaaggttctggcagatatttacatcttgggaacatggtagttcaattgagtgggatcgctaaacataaatatggaatatgtagcttctataactatttagtagtgaaacgatgatttccttcgagcttggctgaatagagataaatgattgagcccttatttcattaattatattaccttactgaaatatcatttataggttgctaagtattgtaatgataaaatacattgaagggtagaacggtaaattagtccctattcgatgtagatcatctatagaggatctttgacaattaggattgtaacaatggataatcataacgtatctatatcgtggtacatatagagtgttctatgtaattgagagtaatattcaattccaaatctatagtggcagaaagcgagattaataagttagagaatttacttggttaattctagatctactttttgaaagctcgattatataggcccatggtcccctcactagttaagataatactgcttgcagactcagttaattggttttaattaatcaattttaattctaaaattagactatgtcttacttaagaattttcactaagcaagggcttaattgtgaagaaaagaggttttggggtcaatttattaattgaaagactgtgtatggtcttattaataaataatataaatagcaattttatttgataattaattataattattaaatgaatatttttcgcatttataggattgaattggaaaatatggtattattgaaagaagaataagtggtggaaaaaagttgctaaattgttactagagattggtcctttatggtcggcccttagaagtgattgtttgccaatatattattcttttttagtctgtataattcagcacttagccttagtttaaacactataaaaagaacatgatgctctcactcatccatttgatgccttcaaccaaatcaaacctagttttctctgtcagacaactagtagatgagagagttccttctattgtgggttaacctccttcattattgttgaccatattcgaacctttcgtggaatagtgtcatgcccacacatagcaagttaagtactcaatcatagtgag

SEQ ID NO: 264955 - DNA, 2734 bp, Cannabis indica
aatagcaatgctcataataaaaatgccatacaacaatctgtcttaaaatttagttgagtgcagaattttcaaagttgatttctataatagtgtcaacatttgttctacatgaaatgtctatcttttataaatattttttttttgttaattgagatttttggcaactagattaaaaaaagagaataagtattttgagagagcataaataagataaacaaaatattttttttttgatgtgattgaagtattaataagtcttagtctacaagttactatactaagaaaaggaattttagcaccatttaagcttgataagggagtaactctgtttatagagagagtcatgtaatgtgatgggctgattagcagagcccttgattaagagtaaataatctaattgctaatagagagataatacaagattgggtggttagattctctacattcacccatggagcaagcccaccatgcctggtaggtagagcaaagctgatgtgtctaccgttgatgtgataggtgcctgtgtgagtcacctttggccgcatgaaaaaggtatatgtcagagtagtaagtgtgtaaatctcaatatttattgctttataggggactcattttgtcattggtacgaaaagaataaactataatgtttttcttatttacacattgacaggtaaggactacactggtaatttttgtctaggagcttgcatatttttttttttatttatttttacacattgacaggtagggatcacatagaaactcatataagagttaatggagcaatctaaattgcaaccaaaatccacatagtattagtaacctacatagaaattatcagaataaccatcgagacaacttaaactgtaaatttaaaaaaaaaaaagttaaaaaataatatagtggtaattccccatttattattccatgagacttatggggttaccctcttgggccaatgttgtgtcttggttcttaatgggtgttaggtgggtccaaactaattgaccatccctaaccacatctactattcatgcttcttgatagggatgttcattggatcacatccaatagatttagacccaactgatccaatctaattatttattggatattgatctgatccaatccaatcgaattgagtcatcagatccaatctaatagatgtattggattggattagttccaactatttgatgcattgactgattttctatcgaattagattggatctatctaatccatgtgttataccatttaagttgattttcattaaaatatataaatatatatatatatatatatatatataaacataaattacaacctaataatccaacaatcataataaatattagttaagtccaatctaattctcacgatctcattataaaactgccaaaaaaataaaacttattaaatatgcatgtgtgagtcgccctttggcggcatgaaaaaggtgtatataagaacagtgagtgtaaatctcaacgtttattttgctttataagggactcattttatcgttggtacgaaaagaataagctataatgttttttccatttacacattgacaggtacggaccacactggtaatttttatctaggagctttttgctttcgggagcttgcatatccattgatggatgctaattattatgaggattttttatttttacactttaaaatatttttttggtattttttccgtaagaaactcacataagagctaacggagcaacctaaattgcaactaaaatccacatagtaattcacatagaaattatcggagtaatcaccgaagccctaaaccgtaaatttttttaaaaaaaattaaaaaatgatataatggtaattccccatttattattccctgggacttatagggttaccctcttgggccaatgttgtgtcttggttcttagtgggtgttagctgggtccaaactaattgaccatcctggaccacatctactattcatgcttcttgataggggtgtttattggatcacatctaatagatttagatccaaccgattcaatccaattatttattaaatattgatctgatccaatccaatcgaattgagtcatccgattcgatccaatagatgtattgaattagattggttccaattattggatctattgactggttttctattggatccaatccatattagctaccatttaagttgatttcattaagaagaaaaatatacataaagaaatataatttaaaacttaataatccagcatacataataaacattagtttagtctaacctaattcttatgatctcagaataaaaccgccaaaaaataaaacttattcaatatgtattgacaactttattagcattaggaagataagaatttatattttatatctaagattatttttcttttaatctcatgtgttaaatgtatattaaatcaattaatatattttttaaataaaatatataaaattataaatgtattttaaaaatatgtaaatataattggatgataattggatcggtcggttatccattagattggatgtcccatccaacaaccgatccgatccgatccgattagatttttaaaatttacatctgatccgattagatttttaaaatttacatccgatccgatccaattattatgattagatatctaaattaaatatctaattcctttcttccacctgcacaacactcccaacaatatctttcaaaacaattatcaga

SEQ ID NO: 264956 - DNA, 530 bp, Cannabis indica
tatttttctgaaaatgaaaataaaaacacaactacgaatttagtttatattatcgttaatacccaaataaattacctcaagatttcgagttgcttagttcaaaagacacggaacaatgatcacatacgagtagttgattgctgactccgaagctcttaaggttagaactatcgatttggtgaaataaaaagggtgatacttttcagagaagatgaggatatgataaatatcactgcaagggtttgaaaaaatatatcgtatataaggtatatacatatatattaccaaccgtataataagtttaaatttaaaattaaaaatctgactaattttcaattcaaattatttttattattattttcaaaatattaaaatgataaatttaaataaatatctactctaatatatataatcctaactatacgtacatatataatcctaactaactatacatatatagggatatgattttgtcgcgtgatatacttttatggaatgtattccgtagtacattagatgtgtttcagggt

SEQ ID NO: 264957 - DNA, 705 bp, Cannabis indica
atgatcaacagctaaaacattttaagatcatcatattgatgacgatatatgtagtggtaataagtgtattatgcactctccaaaattattatagtttttttagttagaattttttatcattaatttataaaatatgtaatattatgatttaattttatagacatattacatataattataagtatataaacataaatttaaagaaaactcttgatgattcaaagaaaagagaaacttaaatataagggaagagtaccttaatttattgatatggatgacttggtgatgattttaaggtgataattttccaaaaatacaacacattgcgtttctctaattttctcagttgagaatagagtgactcttgtttcttgggaatcactactaatgtataacctaataattaagttattaattttagtattttaaatttagctgatcaataaattagaaatattacttaaagtatctaaacatttaactcataacactttaatatctaatgaccaacaattagtaaaataatcatttgcaaataaagaagcattataaagtatctatattgatttctttttctcaaaattttttaaagatttttttgttgaaaaaaaaaaaggaattatataatttgaaaggaggtatgagcatttaggaggatggctttcaacacgacatgtgatattattacctaaaagtcaggtaatg

SEQ ID NO: 264958 - DNA, 523 bp, Cannabis indica
ggctgggcttcacctagcccggtcgaaattttatatttttatgaacttgtgtctgtccccaagaagggggataaatttaaagacggtattttcacactccgagcccatcctaccaatgagggtcagatcccttataatttccaaaagaatgtcaacgagtaccgtcaccaatttttgttctcttccggttttcaagcagtggaacacccagagctgctcacggagtgggtcaggattccttcgatgcaccgcaccgctcctacccaactcttcctttagcacgctaaggccttctccacatatgacaaagacggtcttaatgtgggggacttagtcacaatggtgagctgtaggaagactaagcttatcacggagagaaaatcggtggatgacttcaacctcttcaaggtcctttgccctaacattcgcaccccagatgctgaaaaggcactccgagcggacattatcgcctcagcggaggaccagtaccagaagtacctctttaggagggaacaagagttag

SEQ ID NO: 264959 - DNA, 1327 bp, Cannabis indica
gcacattgaaattgattttcattatgtctgagatcaaaccattgccaaataacttttcagtgcgttatgtaccttccatcgacgaagttgctaatgtactcacgaaaccactcactactgattgcttcaaccacctacaaaggcaaactttatatggctaactcgtctattttgtttgagggagggataataaactaataaatcaattgtttagttagttagttatcgacaattaggtagttagataaagaatttagtttttgttatttgtttggtttagtaaaacttcttgtatcttgtgatagtataaattaatacatttagctaaccatttggttaaactttttctagttattcttctcttaactcttcttttttttttctctttaaatttttctttggtattgttaagcttctacaaagagtgtaaataaatttataaattatttgtcaggtttagctcacttaatccttgtgagcaagttcttttaactacccaatattaaggtagttaactcggttataaccaacatgtttcatggtaatatgaggttggagaatgtaaataaaattaggataaaacaacatgtttcatggaaatatatataagtttaaatatttatctatacaattgttatttagtgttcatatattgggattatactactttatttagtgtggtaagaaaaaaaaaggcatgagttcaaacccaagacaactaggttattaataactatgatattgctagagattctcaaggtagattgattgaaggcatttccaaaagccactcggccgagtttgtcccgagattgctgagatttttggtattaaggaggcccttagttggatcaaattcaacaattggcaagaagttacactggagacagattgcctggttgctgttcaggcaatcagtagtggcattcatatgccctcatcctttggcctactggttgaagagtgcagacaagttctaagtgatttggattttattaatgttcaatttgtaagacgttctgctaacaaggcagcgcatttccttgcgcgtagtgcttgtttattgtcagatcgtgttttttattccaacaactgcccttcgaagttgttaagtattgtattggctgattctttaagttaataaaactgccaatcttccattcaaaaaaaaaaatcatattagattttgattcatatctcaaagataaaaataaaaaaaattatatatatttattgaagggtaaatagcggcataagtacccaaagttttacgtttgtaagcggcataaactcaatgttatttttagcggcataagtacccaatatt

SEQ ID NO: 264960 - DNA, 655 bp, Cannabis indica
ttgggtgatttggaggagttttgggctgttagaaagactctcaaactttcaaaaatgtatgcaattgtatgctgaaaaaaaacagtaactagttaccattttttcagctttggccaattcttctccaaaatgttccaaattattcccacttgattttgaaccatttatacaccttataaatgaataaatcaagtctccaacaacaatatttttaatagctatcattcattcacaataataaaaaactagtaacatcttctactaatttaattgtgaaaagaggtgagagttagagattcaagtgatcatcaatttaaaagatttgcaactcctattttgtgatcattctacacacattatgtaactccataatgtatgtgacaatttgacaaaattaatactttgtcacacttaattatttataacttaattatttaatctaaatattatattatataaaataatataacaatctaacactagattaaataatatctcaattatagcaaataattttgtaacacaacattttatttaatcaatcattatattatggagtaataaaatattcccccacttgattaaataacttcactctcatagaaaccattgcatttgtgcagtgtaaaatatctttcgactgaattttatttta

SEQ ID NO: 264961 - DNA, 603 bp, Cannabis indica
atagattttgtatcaataataaaacacaaacacatagaaacattacaaacatataaatataattggtattggcatacacgagatgaggaaaatatgaagctcaattcataaatgcaattcattactaaaagagaaaactttattaatattctcaaaaaaaaaaaaatgaattgtctacaataatatgaataacagggaataaaatcccaaaccaataactgaaatcaaattgttcataaattaaaataattaattcaataattattaaaaaaaaacaattctgagcttcatcttcaatcttagacaatctccacccttctgtctaaccatccgactcaactcgctaggataacaatccaagtttaagcagctgcagctgaaacaagaaaaaaataaacatggttagtagatccaaaacaaataacccaaggggataataattctctaaaacacataagtttatagcatagaaagatataccttgtttctttgctagaaacttagggcattggggtttccagtggcccttttcattgcaatagaagcattttccttcaggctttccatcaggattagtagctttttttctttttaactgttttc

SEQ ID NO: 264962 - DNA, 1878 bp, Cannabis indica
ctaaacatgaaaattcattaaaccgaagcaaaccagcaagttcaaggttgcaacaagggtgcaacctcccctaaagaaataactcgacaaacattattactggcagctcacgctgctgagtaatgagccacaccattgtcactacgagagatccgaaaaaatagaaaacaattcaccaacattcaaattagaaaacagatagaggaacaattgagaaagtctctaatcggacacctaaaacctgcaaactgcaataacaaggacttggcagtttgtaaggaaagcaacattctccaatcaccctttagtgggttgttgttgagttgaagaatgcatttgcaaataaatagaatataaggaatcatacatgtgcatttatcatttttatcatgtaatataatttcaaaaaagtaaaattgatattaaaaaaaaactaatatcccgatcaagaatttattaatgatattattctttaagagttcgtttggttagtcatataaaggtcgtattgtattaattattacgaccataaattttaatataatgtgagttgtattatttaatacataacaaatgacttgtattagcttgtattataatctttacaaaaggttttgggtcaatccctacctcaacccagctccgaactcggacccataccttgactatggacttggacttggactctaaactccaacctcaaccctaaattccagacttagattcgaaccctaacccagactcggagcccagacctaaactaggatccaaatccagacccagacccagacctagacccagccctaaatctcgagttcgaatccgagttcgggtattgtacacaatgtattagtacaagtcaatatcaaatatagtattgtattaaataataataatacaatacaatacaacatataacaatatactaaacaaatcctaaattgtctgatcacaaattaaacagtgaattaggttaaatactgataaatatgataaacaaaaattaagtggtaaataaataatataaatgaaatattgttctcaccatccactatttacttttttagattttaagttgaatataatatttaagaaaactacacttcaccaactaaattttaccattacatttaaaatttgttaacttcgattaagatttggacacttgaccttaatattatgccactactcttcctctatttgaaattgctataaattgtttaggctccaattgttgattgtattccaaccaaacaaacatttatcaaaattcattttttgtgagaatagtaagaattaatcaccacaaatcattcagcaaaataataatgataatccccacaaatctaacaagctatgacttcaaaatttgatggcacacatatatttgaagtgtgagtagagtccatcacaatccccacaatttcatggaaatccaaaaacaatatcaacatgtcgccagtaagtaccatccaaagccctagtaaatatgggaaacgagtgctttaaaatattgttggtaaaccgatattagtttctaagagagtgcaaaaaagacatcgttttaccaacataaagatggttctgtaagttaagaaaaaaaaaaaaagaaaaaacaagatggttctgtagaataatttgttacatgacttggaattaggtgggggagtatgatattgaattgttttttttttttttaactttttaagttgaacaaggatttggatctgtttaaaaagggatttctctattttcttcatgagagagagagagagagaggggaatgatataaaagctacagccatagtcagtcatctattaaaaaaataataaaaaaataaagaaagacgaaaacttgtttgatttgttggtgtattt

SEQ ID NO: 264963 - DNA, 1377 bp, Cannabis indica
agttatccttaaaaattagccaagaacttcctttcaatcacatatacataccttgaaataaccatttcagtatttacataaagtatacatacttgaacatatatttagtgcctctcataacgattatatgtaatatattctagagatgaaattaaacacaattggaaaagactaattaagttcattaattctttctttcattcaatgcatatatatacagcaaatcctagctacaagacaagatcgttaatcatcatccagttctagtactaaaaaaatagaaatatacatatataattgtaattatattaaatttaaattaagttatagggttagggaatatggtataaaattatactcctagattgaaaagtttatatatgcacacatatatataaaagttaaaagtattagacatttcattcacaacatgccacaatgtatatatattaaaaaaaatattgtattcaccttcaactcctgtgatgaatatggtcttggggcatcgacgggagcagcaactttggggtctcatgccacaatgccataagtctcattataacacaacttgtcattttcttattattagaacataatagagaattatataatctgaagatacatttgaatcagatagaaaaaataaagcaaaaataatcatcagtatataagtatattgctctcaaataatctcaaaggagcacaaacacaaatgctaaattcagttataagaaaattaataacctataattgtgctcattgatctaacatatatcgatgcaccctccaagagcagctttcccattgccacttccttcacagatcccatggttgtgaagagcattgagctcaaactcatcctctatccatttcacagaaactcatcctcaacaatgtcttaacaattttcagctaaaaaagtaaatcttatttcctatatacattagtaatatcaagtcttagctaattgcattgtgttgagaaagaaagtagttaataaattaattcatctataaattaaaaagctgtaacaatcaataattttgatttacagtttttaagaataatgatgatggaagatctagtaaattaaagcaacttcagtagcaaaaatccaagaaaatggtggtaaaatatatgagatgatgggaatggccctttctggaaaatgttcaacaactgcaaatgttcaacatcccatagtcaaccagaggaagacagaaaccttggaggcaaatgtgtactaccgaaatacaatccaacaattttcataattcaatgattaaaatcatatttattctaacaataatataacatcataaacaacagaaattgagtctaaaaatgagtgctccatttcatcaaacaccttgcaaa

SEQ ID NO: 264964 - DNA, 504 bp, Cannabis indica
aatagccataactttgtgatccagactccgatttgggagttctatataccgttggaaagctcttttcgacctctatcagaatatctgaattttaaatgccatgtgaatattttatgaaagtgaaatcaggggttaaccctatttgtgaaatcccgaattgtgtgactaggattaccggcacctgatcaggagcacccggggatttggaatctctaatattgcgagacaacaggtaagacagtgattagcacgtagagaatgcgtattggcgcttatatggaaagtgatttgtataattgtttaataactgggattagggttattgtcctaataggaacggtatagttgcctagggttattaccctagtgatatatgtatgaaaatgccatgtcatgatatatgtaatgagattcaagggttatgcgcttaaggcataatcaggttggagtcggtaaccataaccgagatgaaccaatctaaggccttaatgtatttagatgtgt

SEQ ID NO: 264965 - DNA, 1409 bp, Cannabis indica
caatgcttaaggtgagcaaaattgtctgctattatcatcttgttttcatattcttcaggtaatgtcgtgatgtcttatcaggttacaaccattgcattttaatttcagttggcagtgtcacaaaagaacttgtcagcagtccaagagatatggaaggagtgtttcagaaactggtctcaacatttactctctcaatgatgggcttgcagaaccattattagcacaggtatagaattcttttgttttgagcttgtacaacattctttaatttcgtacaacatgaaaatgcaagaataataatactttattcagtcataagtctcacaaagtgtgatgatacaatcaaattctcttgtctgatttttttttcggttaaactttattcagagcttcagatattaggacgtatgagcttctgtttctttattttgcaatatcaatgccccatatgaaaagtgaaatatgttgtcatatttagatgttgctaaaagaagaaatatatatggcaaaaatgggtgaccagcatagtcatttattaatgaagaaattgataattctagattccatgtttaaataaatgctgaaaatcagtacctatttatagttgtatatcctttgtggttcctgctgtcattatttttaaatcaaacttttagctttatctagtgtatttttattcgttaatttcttgagcttattgaaggcatcatcacttggagcacagaagatgatgaaagaactttccattacttccatgcctaagcaaaatttattttggattatctttatcgaagctaaggaagtaggtactttaaaccatattttctcttccattttcctcattatgaagtcaaataattttatccagtagttcgctacaagctttcttccttgacattcagagtgacatggcaattgaacttttcaaacatatcaagtcttgcggtgtcttgcccagtgtgtgatttgtttgaaaagttcaattattgatttgactaggttacctcaatgctgaacttgtcatgtttggatctatttgtatttgcttctagaattaaattgttttctactcttgttggtgcatcagctgattcaaatttttctcctgataactgactgttcataataatttttttctactaaattcctctttttatcagctgtttctaaccatttgtgctgttatggaaattttattgtctatacactgccctcttggtcgcttaaggatacataagtaaaactagcactggtgcctttcacgcctatcgttggtgctgattttcatgtgttgctctactttgttccagattctattggagtaaaggtttagatcttttggaacaacccatctcagaaggaatttaagttgatgtcttgttgtttatgatagctcggcccaattgaaa

SEQ ID NO: 264966 - DNA, 548 bp, Cannabis indica
ggttaaaaagtagaaacgtatcctgacactcatttaatgtaccctgagacccatctaatataattctgtgaaattacaggacaaaatcatatccctatatatatatatatgtatgcttgtctttacgacatttgtagttaactttttctttttttccttccataatgctattatttgtcatgttgtttagagagagctaaaatatttagatcactctctcggccatatgtagctgtacgactagatagtgaagttgtatatatggaattgtattattccacactttcttgtttccacattcctatcttcgtgtatctttttggttatactcaatggaagatcttcttttagaaattaattaattaaataaaaaatattctccaagtatatagcagatgaaaaatcttcttataacgcaattctctcatttttacgccggcgtgagttgagatgagacaatacatacataaattaattatcctaattgagcaagtcaaattagtagtatatacttttgggattattatatataaaagtacggaagtaat

SEQ ID NO: 264967 - DNA, 544 bp, Cannabis indica
cataaatacataatttgaatataaatgtatgtatatatatgtgtttattttattttctattaattaaacatactaatttaataaacaaaataacaatattcacgtaagtttattatatcactctatgtgtttcatgtttattttttttagtaattttttagaaaataaataatatatataaaaaattatttatctttttctttgtttatagcgtcatgtttatttattttaattaaataatatttagagtttataaagttatatttgtttatttattttttgatgtaagaattgtatttcagtagaaaatgttttcactaactcattagaaaattatcaatatataaaaataatagaaagaaaatatatctattttagtatagtataaattgactttgtctatttttatgcttacaattataataaacatactaataatataaaatactttgtatctatatatatgtttattttattttctatttatcaaacatactattttaataaataaaataataacacgttaaaagcataattgacagag

SEQ ID NO: 264968 - DNA, 935 bp, Cannabis indica
acaattttttttaaaattaaaaaaaaaaactacacctgtacccaccctaaataacaatcatcaatgtaaaatttaaactctatataaaaagatcgtataacataaaacatttgatcttaaatatcaaaatagataagaaaaagaattgtactataaaattatcttataatttttattttattctatttgatctattcatatatgtactcagttatacaaatgaaacaaaactgtaaaatgtgtgcacacgacaataaatgtcagcagtagaattttttaatgtaaaagtactactgatactagatacggtttcaaaacataaataatctatgaacttttaaaggaattaatatattactcgctctgagacaattttataatggtactctttgggaccctttgagatatgattgagtttttaatctttggatgtgtggctttcattattagtggaaaaacaaagagaataagactaggtattttccacacacttcttttcttaatgctgttcaaggtcatagtcttccttttcttggagaagtatcatgtgagtagagaccttcttaagagagagcttctttggaaggttgggaatgggcaagatataattacacttgaagaccgttggttgcccaattttggccttacacgcaatgatttgatagccaatctcccttccccttcactatccttttttgtttctcctttaagtgcttgggatttagataagctaagatgttactttaatagcttcattgttgataatatattggatgtccccattgctggtaatacctgtcccgatgttcttatttggggtaaagagagtacagagatatttagtgtcaaatctgcctatcatcttgctgctagttctagagatatcccaacatcctcctcttttcaggaaagtaaacgtttttggtctaagctct

SEQ ID NO: 264969 - DNA, 503 bp, Cannabis indica
gacaaatattttgtattgagtagaaaaatttttgtaaagtgttttgtaaataggatcccaaagtattttgtatgctatattacaagtatttaattaaataagcaaaatttttaattaatcacgtttttcattaacctcgttgattagcaacgagttgcacagtatgttaaaaatcacgtcaacacgcctatgctagttagggtgttacaaaccagcattccagagtggtatggctcatgtccttgttatactttcagaacttttttggatctagtttgtcacgatttcctctaattggtggaggctttctgaagactccatttttctcctcgatcgcataaatgtgattgcgaggaactgtcaattcggtgtaattaacaaaatgcgagcctccttttctttttggagatgtttccttcttggagtgggacttggagagcttctgacttcattgcctctgcaggctgtgtcttcttcggtttcgacctctggaattctttcct

SEQ ID NO: 264970 - DNA, 1019 bp, Cannabis indica
tatatcaacaaagtgtatcttgtttttttggtagcccatcacgaaaaaactccacggttaagcgtgcttgacctggggtaatttcaagatggaagacctcctgagaagttttatcaggaagtgtgcgagtgaggacaaatcacactggaaacactcgtgttgatttgtagggtcagtcgttatttcaggaagcaaccagagtgacgtactcatgtataagagccatcattttatgggtgtaaaggtccaataaaggcttgaagcgaggacgttacaaacatcctgggagtatatctaacggttacattacagaaatttgacaaaaaattacaaatataaacaaccatgtctgctaatacagagaaagccactttattacacaatattttataaacaagtaacttcaaatctaattcaacaactgatatcagaaatctaatggcaacacactaatttagagcagtcttaagggctggtgctttagcataagttgagtctaaagcccttcgaactggaatagccaaaccagcaacaacattctcattctcatctttaactacaactcccaatcccagcgtgttatttttggagtccataattacatatgtacaaagcttgaatgaaccttgtgctatatatagggaaaaccaaggggttcttgtgcaacacacggtggttggcaagcagcaggaagaacattcttctgagcattcctgtaatcatccaaataagatctcattagcagtaaagggcgcaaacaaagagagaaaatgactattattgatcctcttatccacaactgaaaggatatcatgaacaacctccatactaatattctcttaagaaggaccatgaagtagaagctggtagtaggcgaatccaacctaaccttcaagcatttaagaaaaaatccatagttcataagcttaatatcatcacccttgtagtatagtgtgacagttagtagtcctgtgatccgtaaggggaaacattgggtaagctgtgcaatcccacaccgc

SEQ ID NO: 264971 - DNA, 925 bp, Cannabis indica
aaaaaatgtgaacacatcttttccatcatcatcactattattattatcatatacactaaatatgattagttactcatatattattatataccaataatatatataactctcatgcataaaattattatctcccaaattttatgctaattaatatattaggtatgttactatcatctcatataacatatactcatcataatatatattatctccacataatatatattatatatgtataacatacataaatattctcatcataaatatatattatcatatgttcaacatatatataatatatatataactcatatacatgttatatattatgtatatcttacatatacatattgtaaagtctttttttggcaagttagatgctaaaatattttttattttatggtgagatttatttgtgctttcaatccgattttctcacctttattatttaatttttattgttcttttctagtttaggaaagattaattttcagctggctttttcttgtatgaaaacttcttgaaagagaagaaattctcttatggaaagtttgtttttaaaggaaacatagactatttttattttccttaatgaatttgattgtgtcttgatacaatcagatcatacacactgtttttggaaggtatcaagacttaatacaagatcggactcgtttatggcaagtttccttttttggtctgatttgctgcgtcagaatccgtttctgatgctgcaaatcaagtttttcttaggaaagttttgtacagctgtagattcgactttgtggctgtctctagggcttctatgttctataaatagaacctagagagcagccattcggattaactcttctagttttcatttttttgcattttttcttatttgtgagaagagagttctctttgtgagaacctagttgttcat

SEQ ID NO: 264972 - DNA, 609 bp, Cannabis indica
tcccagcactttgggaggccgagttgggcagatcacctgaggttgggagttcgagaccagcctgaccaacatggagaaaccccgtctctactaaaaatacaaaattagccaggcgtggtggcgcatgcttgtaatcccagctactcaggaggctgaggcgggagaatcgcttgaacccgggaggcagaggttgcagtgagccgagatctcgccactgcacttcagcctgggcaacaagagcaaaactccatctacaaaaaaaaaaaaaaacgaatttaggagttgtaggaagctaatttagacaggaggctcagggaaagttttgctgaggaagtagaaacagaatcctcaagatttagctagcttcacaaagaaagcaggagatacacaggacaggaagtggcccgaggtaggcaggagctgactggatcaagaaactgaagcgtagtgagggcaagtgtgctggaaggctaaatagggtgatgttgctaaagcaagggcaagtgatgtgggtcacactagcgttcctcccagtacagcagccacagagctctctgtttgtcagagaacctggtggcagaagcgtatactgtgactgagtctgaggcc

SEQ ID NO: 264973 - DNA, 516 bp, Cannabis indica
ttgtccaaaagcttatttccccctaccacaagcacttagggaaaagaaaagaatggaaatagctttctggatttattaagcctataatttttctagcaatgtgctctcttgatagaaacttgttgtcttacaaaatgaactcaacacctctatttattctctttaccacatggctgttactttaattggtatttaatgggagaaaaacgttggacaagagagttggaaatattctcaatcaattcatgtacgtttatggacgttttcaaaaacttgctccaggtgttcataaaataaccataaaacaacataaaaataaccattaaacaactatttccagattactcaaaatttaatttttgtaactcctctccgagttaaatcttcctccaatgtcccaatactcatttaaatgatataattgagtattgtaacagtttcgaacaacaataaacttatcccatgattaccataacttccatatgtaataactcacttaattacatgtgatcctta

SEQ ID NO: 264974 - DNA, 634 bp, Cannabis indica
ataattaattaattagttaattagttgatgatgtgaataggaattattactcatcgattgtccatttatatattagtgtttattaatatttagcatatatattattattcccttaattctaatatataattaattaagcgcaatacaccattaatttattattgtgtctcatcatcgtgtctttaatcttaattaattcaaaagttgtgtccttttatttatttttattaagttatgtgtgtaaatatgattagtcaaatgaattattgtgaaaaacacccaatatataaaatatatatatatatatttatatgtataaaattaggtactataggaattgtttggatgcactactatactataaatacaatatatatgtgaaaacatgttacctaaatgttagaaaaagcaatgacataaatattattcaagaacaagaaaaaaagaaaaaaagaagaagaaaaataaataggatttaggagagttgttgggtcaatttttttatgagtatgtacatgtatctttatatattaaaagtgcttatctaacgacaattcttggtttaacgatttttggtttaacgaatctttttttatttaccccttacacgattaacttaacagactgttaacgt

SEQ ID NO: 264975 - DNA, 619 bp, Cannabis indica
tatgggtagggagcggcatagaccgaatgtagtatcactccttgatagtcgaagcaataaaagaaagtttcacaaccaagtgtaaaccatgcgtccaagacatgtgtgcacgtatggttcttgttcgaagcatctggtgcgtgcgagcaccatgctcgacacctatgggcacacagatttcaaactttcgtaactttctcatttatatcgaaattgaattccgtaaaaacgaaaattgcttaatttttcataaggagtccaaataaaatattttcagaacgaaaataaaattattttcatggaaaatttttgtaattaacatacattcataaaacaacacataaatcaacatgaacacatccaaatcaacataaaaataatattcactattttaaatccatattacatgaatgtcaatcattaatctgactctgataccagttattgggaatattttactaggatctagatttacttacaggtatgttaattaatatcctaaatatgaatatctctaaaacaatgaaattaaacacataatggtttaataaaaccttacattaattgcaacagaatacaatgactccttccgttcaatatctctagtccttgattcctt

SEQ ID NO: 264976 - DNA, 596 bp, Cannabis indica
tttttttatagaaacaataagaaaactaacctaaaagtaaacaaaaaaaataacataaatacaatgtacaaaaacaacaacaaacaaaaaaataacatacgtacagataaacaaaaaaaattaaacaacaaatttacaagagtacaacataaaaagagcgtattttctataaataaaatcataaaaatcgtacaaatctttaaaattatgtataaccgtgtttttataattttttttgttattttagtgtatttgtgaaataatctcaataaatattgtgtcaaggccacttacaaatataaaactttaagtatttatatcactatttatcgttatatttctttttagaaatattactattattttctcctttaatattctttacactttaggtagtggttttttctctttttcaaattttcaaaaacttataagtaattttcttttaatttagaaaattataatattattgttttacatattttgtgcttaacacttcccttcaaattttaaattgtattacacttaatattaacctatcatatatataaaaaataaggcgccttaatgaccaacagcaaattaacaaataaaaa

SEQ ID NO: 264977 - DNA, 539 bp, Cannabis indica
gatttattttaataataaaataaatcaaaaaaaattaacatgggtctttatatgtcaccctataagtgtgggccatattttaaagtccaaaattaatttctcaattttaccataagtaagatttattatttattttaccaataataataataattgattaatactcattaatctcttatttcacaagaattaaaataaatattattttcactaaaataatatatttctctttttaatattatttaaggataatattatatttaactagttaatatagttttatcaaataatactaagtagttaaatactatctaattatacaattcataattattataattattcaaaataatcattttcataaattactatttttctcttaagaatttaatgctcatagaaattaattctcactcaaatttactcatcgaataaaacttttccatgtacagtgttgtatagaggtaacttgaaaaccatgaacctatatttcgaagctccaataaatacttaattattatcgatctcatcaatagaat

SEQ ID NO: 264978 - DNA, 943 bp, Cannabis indica
ctaggtccaatttcagttatgattccaagtccaagtccttgttccagtcccggtcaactttcggttttgtttccaattttgggtcacagggtacgggttcgggtcgacttttaagttttggactgggttcaggttcgaatgtgcgttcgggtcaagggctgggtcccaaatccagacaccgactacaggttttgtccaagccctatgtctagatccggattgcaatctcgagtcctagtctggttccatttcttgtgtcggttcacgagctgggtcctaggttcaagttcaggtttgggtcgggtactaggtcccggtcctagtcctgtttcctaggtccctttcaatattctaggtccaggtctcggtgattggatggcttttggtcccggtctaggttcaggttcgagtcttattctcagttatggtttaggtctctgtctgggttttgatcagggttcgggtttgggtttaggtccttgtcctagtcctagtcctagttcagttctagtcccatttgcgattctgagttcgagtttgggtttgagttcgggtcggagttcgagtcctggtctgagttagggttcgggtccgaatttcagtctaggtccagatcaggctccgggtgtgggttcgcatcctgggtcttggtctaggttggatccgagtctcaagttccaatcccgatcagagtctggattcagttctgggtctaagtccttggttctgatcctggtctggggtcaagtttgggtttctgtccgggtctagcttttggtctgattctaggtgtgggtgtttgggtttgggtctgagtttgtgtcagggtttgtgtccaggtttggaccccgatctaggtctaggttctggtccaggtccaagttcgggtcccgcgtgcgggtccaagtttcggtcttggtcaggatctcggtccagatctagg

SEQ ID NO: 264979 - DNA, 4858 bp, Cannabis indica
aacacgatttataccctgctgaaattcatacaatgtgatataacaagtgatctttcactttataggctcaaagtatttaatcttcacttcttcaaccctatgaaagtttgattttggtgaggaaaaaaaaagctattgagaatgtaaagaatcaaaaagtaaaaaaaaaaaacccaatttttcatattttgtatggaaaattttgttgaatcaaatatttttctgtacaatactttttgttttctaagattaacttccaaatatagacttactttttgttatcttggatgaaaaagataatcaacctcagcatgatctattattatataagaaatttacagctgctggccctgcatcagagaaaaatattagttggtttaaatcagttttctgctgacttaaagattgaaattgcaagcccaaaattaaaaattgattagatggctccaaagaactatatttgggtgttctgttcaaattaacaaaaatctccattgccacagtctattcagaacaatttccattcatagttgaataatacactgattagtaaaatcacttgaaaattacataggatagagctttctaggtgtatagcaagtacctgaatatatatatgtatatgtatcacttagttcagaggattgaccatctttgtcttccttcttcaacttaagctgaagagagtgaagatatagcttcatcatcatcatcatctctaagggacaggtcaccaatatttacactgattttaaaccattagatcaatcaagatctgatggcttacattgattgattggtttttatatgaatttatacaaatcggtatctctctgaagaatttttttagttttcaaaatttcagtaggtgtaaataaatgcaccttcctcgatcgaggctccaactcaaaccccagatttggctcagtttgattgaattctcactttctctctcttcaaggcctgcatcggttcccatcacatgagagaaaatataaattatacaaggtaataatcatatgttaacagattcattgttagatttaagcataaaatctaattactgagcatgaaaatggatgtgtgggttgtctttttttggtagagggaccaccaccacataatagggctgtaaaaagattgtatttttattgtatatttatatatatatatttatacgtgtatatatataacatataatatatataaatatgtgtgtagtatgaatagtctgacttgttgagccggtaaaaggtgggtagatacaagagtgaattagggttttgttggtaagagcgagccaagaggaaaatatgttgagcttgagctccttcgacagtaacgaccctagacaacttttctctgagggaaccgaggttgaagttagtagtgacgaagaagggtttaggggggcttggttcaaagcctttgtggtggagaacttgggttcctctgctgccccgaagaagaggagaaaagttttggttgagtactggagtcttgtaaccgaagatggattccagccattgagggagcatgttgatttgtatcacttgaggcctttgccacctgatgctggttctcaagattttgaggttggggacgtggttgatgccgattacagagatggatggtggactggggttgtcaagaaagtcttggggttcgataggtatagagtcttttttgaaaatccgccagatttgattgaatttgagaggaaacacatgcggtttcatcaagattgggttaacggaaaatgggttcgccctaagaaagagcaggtatcatcattaactggtgttttttcctcttccaagcatatatgttgctttcctttgaattctgaaattgttgctttgatttggattgtgttggttgtcataacatcatctggtttttcttttctctttttctaatccatgatttatggttttgttgcagtttttgattgatgttttagattgtgatttgtacttgttttatgcagatgtaagagaacagttatagagggacatgaaaattagaaagaaaagaaggtcttattgaagttgccatgcctagtctgagagatttttagttgcatgaataggcctttgttgtgttctgatattttttaagctttgcaagttttaaattatcattttgaacatcaaaaatggtatcctccacttcaacttaggtggtgctattgatgtataatattttcctaaccccaaaattaacttgttttttgtttgtttttaatcttttttcctttcaaatttctaaagaaaatgacagggtctactttcagctcaggaactgatgtagaggtgcattttgacaatgaggatttaagtgatgcttggattcctgcaattgtgattaaggaaaatgatgataatacctttttggtgaagtatcacaactctaaggctaagaattggaaagatactgtagatttcactcatatccgtcctgcagttcctcgccatgtggatagagcttataacctttatgagaaagtagatgcatttttcgattattcttggcgggtaggtgaaatcaccaaaattctacctgggaagaggtacactgtctctttcaagcatgggatgaaatccaaggagtttagtcaaacagaattaaggccttttgtggaatggaaagatggaaaatggcatgtgtggacaaaggtatgggattatcctttcaattactatataatgcatacttagttatttagttttgagaatgcaacaaatgatactatataagttgctgagtgatgtaattctgactgggtgtggcccaggggtcatattgttaagtttccttgtcaccttggtttgtgttcagttgcatcatcatcttggtgtatttgaaacagacaatttggtaccatcagttttgtaaaatttttatgtttaatattatgtggggaatcggtagcgtaattaagtgaattctgttacaggaagcgtttcgtaaaggttttatggttaatattatgcagtatcggtagcttaattaagtgaattctgttacaggaaggattggttgatctgaatttagatttccaagaaaatttggagcacggtgcccatcgtgtaagcaatgctgatgttgtctctcaactgggaagtttgggcttacttgactgtaccgatgaagaatactcacctcagcctacaaactcaggcaagaatctgagaaagcggtctactgattacagtgaggaatcagtttctactacttctgtgtcatcccctaacaatggtggatctatgcatcaagaaaaaggatctccgtcatatgataaatcatataaagcacggaaatataaattggccacaacacctgcatcagcaagagaacaagtagtggcgaatacacgtttaagaaaacctgttgttccttttatagttgaatctaatgcaaaggtaacggggagacgtattttttaaacaaaatggaaaaaatctagaggcgaacttagtgatatgaaagctggtgcaactaatgtttactttcacatttcgtctcctatgaaagattgatcaattttccgtttcttctatttttgctgtccattataatttatacctgatatattttacaccaatttgtagaggagtaagcagcataaaggtggtggatgtgaaattaaaatttccgataatgtgcagcgtagaggaagaactaagaagagtgtcaaaagaacaacaataccagtagtaggtatgtatgtctggggagaacgaaaagaaaaaattatgaggcatgcatcagacagcttcatttcaattcaatttcgtttcatttctgagaaatttgatgcttaaagttttgcaggtaagactagaaatgttagtagtggtgcccctgaaaaagttgttgaaaaggaaggcatgaaaggagaaactgaagctgacatagcattaagcaagaccaagaatacaagtactggtgctgttgaaattgttgttaaaaaggaagggataaaagtagaatctgaactcccttcagcatcaggtaaggccaaaaaaattgaaggtcccagtactgctgagaaagctattgaaaaagaaggtacttctgtgaaagttgtcggaaaagaaggtacttctgtgaaagctgttggaaaagaaggcacttctgtgaaagttgaagttgttggaaaagaaggtactgctgagaaagctgttgagaaacaagttactgctgagaaagctgttgagaaacaagctgctgctagaaagaagttgctgctgagaaacaaggtgctgctaagaaagaagttgctgttgagaaagctgttgagaaacaagttgctgctaagaaagaagttgctgctgagaaggctgttgagaaacaagttgctgctgagaaagctgttgagaaagaagtcgctggtgtgaaagctgttgtgaaagaagttgtcgccgcgaaagctgttgtcaaagaagttgctgctgtgaaagctgttgagaaagaagttgcagttgggaaacctgctgagaaagatgttgcagctgggaaagcttttgagaaagtagttgctattgggaaagctgttgtgaaagaaattactgctgggaaagctgttgagaaagaagttgctgctgagaaagaagttgcagctgggaaagctgttgaaaaagaagttgcagctgggaaagctgttgagaaagaagttgctgtagggaaagccgttgaaaaagaagttgctactgggaaagctgttgaggaagcggttgctgctgggaaagctgttgagaaagcagttactgctgggaaagctgttgagaaagcagttgctgctgagaaagaagttactgctgtgaaagctattgagaaagaagttactactgag

SEQ ID NO: 264980 - DNA, 892 bp, Cannabis indica
ataataaataaaaactgacattaaaactgctaaagcagttatcaggggctgttccagattataaaactataattggaactggggggagtagtgtttggggggaaaaatcgaacttggaaataaacgacccaacaaaataaaggactacaaaaaggcccacattaaaaaggcccatcaaaataaatacatccaggcctaagaatataaaggtaggcccaactcggtatggccaaactatacatccaggcccaagaatataaaggtaggcccaactcggtatggccaaaccatcgatcgtggttggcagtctataagggggcactacggacaaaaaggaggaaaatgataaatgacaagaaacgagtaaagggagcgccaacggaaacagaaggaagaacatgaaggaatgggtaatcgacggattgaagattaactacaagtgaaatagtataccaggacccgaagaggcacccagataccctgccgacggaggaaatacctaaagcgccgacggaggaagtacctaaaacacaacaaaaaggggaccgaggtaacactactcacggaataaaagcctctggcggaagagaactcggatccccgcagacgagaaccccgacggaagtagggaggggactagagcataaactaagaaattgataaattcaagaatgtgatgccgacggacacaacaccgttgaaactagggagaataatagctttaaaacccgctaaaggcatagacacgtgtaacaaggaagttatctactagaatacaaacacgtggcagagggcaaaaagaataaaagaacggaaacacgtgtcaacaaaacaatgggtagatgatagacaacccatgcaatcaaaaaagacgtacgagatatatagagaa

SEQ ID NO: 264981 - DNA, 649 bp, Cannabis indica
taatcaagtttctactaaagtttggaataaataaaacattttgtaaaagtaaaaatctttttgtatgaaacttgatacgggtcgttcctcttgctttgaccgatactaactcgccatttccaactttaagctttaactcttctgggtgcagattttcccaagtttcaagcagctgcagtgaagaacaaacatggttagtagacccagaatcaacaatccatgtggatttgtcattctctaaaacacatgattcaaagacaaaagcattaccttcgtttgaattgtttagaagccggggacatcgttcttcttgatgtcccttttcattacaattcgaacatagaagagaatgtctaataattgtacttgaagaagcagctttgttagagccttcatgcttaatcctcttcctctgattaaagtttgcaaaaccaggaggtggcattgcaatcaaattccgttcatgagctcgtaattctgcttcgagcttatccatgtcggaggagttaaaattgttgatcatgtaagatacaacaaatccattatactccggaggaagactattaagaatgaatacccattgttcctttgataattcaattccaagtagatttgccttttggaacttcagattcatcatcaataggtg

SEQ ID NO: 264982 - DNA, 429 bp, Cannabis indica
aaggtgtaagtataccttatcgctgattatcatgcaagtctaaatctagggaactcacaaatcatggaaattaaactgttgaacatataatcatgattatattctactgtgatgacgaaactataattatgaataaatatatacatatttatatatgttatggacttaatagaatttatacattaaatataatcatgaaataaatcatgtgagcaatgcaacgtagaatgatttatgatcttttattaattagtaaatctgattatattaaaataagttttatttagggcacaaaacctaacaggttggtgctgttgctgttgttgctgctattattgtggttacttctgttgttgttgttgttgttgttgtggttgttgttgctgttgggttttgtgtcctaaataaaacccattacaatctgattag

SEQ ID NO: 264983 - DNA, 734 bp, Cannabis indica
gacacatctctgtttttctataaaaatgcatctgatattgtgtttgttctcatctatgtagatgatataattgttacaggtaacaactcaaacaaactcaagcaattcacaagcaaactcaacaaagtttttgctttaaaggaccttgggttgctgcattattttctgggaatagaagtatgcagagatgatacaggaatatttttatcacagggaaagtacatagctgagttgcttgataaaactgatatggcacacctcaaaccttgttcgactcccatgacagtagggaaagctttgtcgatacaagatggcacactaatgaagaatcctacagattatagaagcttaattggggcacttcagtacctcactcataccagaccagatataagcttctctgtgaacaaattaagccagtttcttaaggctccaactgatgttcactggtctgcagcaaagagaatcttgagatatctaaagggcacacaagaccatggcttgcacatcaagtacagtgacagattaactctcacaggctattctgatgctgactgggcatgttgccccgatgatcgaagatcagttgctggttactgtgtttattttggagactctttagtgtcttggtcatcgaaaaagcaagccgtgatctcaaggtctagtacagaatcagaatacagagcacttgctcaagttgctgcagaaatcacatggattcaatccctactcaa

SEQ ID NO: 264984 - DNA, 1642 bp, Cannabis indica
acattgtgtatgacagtttgtatgtcatcgtgccctggaaatgcgtcaggaacaaatctaaaaaggtctcccaggttgatattgatgcctcggataactggctaccagtcgtgggcattgtcttccaaagttgttgcgagtattcaacattttgccaattgtggtacctggactacttgccaattgtgagtgattctgagagcctaaagcctttagggagtctggcctatcaaacttcttctgtaaagggtgacatcccatgaagtttgtaagcgggcttcctctgctactcgattagcctcaacgctcacaagagactttcttgatcaactcctcctagcagtatggggtttgtctgagctattgtaggtatattagctactactgttatgttagctgtgattatcacttctccggttgcaaatggtgttgttggcgggttggctagattaaccgcattattttcattatgagtgccttgatcgatcacacggggatcatggggctcttcattgtcatcgcgtgtaaagaccgccttaattttaatttagaaattagcagatcaatagggtttaattatgaaacttgcatattagttatgaattatcattcagaatgcattttatatgtcatgtatgaaattttatatttttgcatgttttgtttcccgcaacattggaacgcggcgtttggctattagaatcatattttagtatttttagtatagcaaggcaatatagttagacatcgaaaatgttgggattagtaaggattttagaatttaccaaattaccccttgatggttttgtgacttttagttagtgtgggggcaaaatggtcttttttccctaaagctcttttgtcttttagtgagttttagttaactcatttaatctgatttttatgcttaatctaattagataaacacttgtttattttcattttattttacaaaagaaaagaaataggaaaatcaaaaagaaaaacacactctctctctccaaattctttctctctcctgagccccatagaacccagctagggtttggatcttttctgcataaactaaggaatcttggcaagcttttggtagatttaaactcaaggggcctgtaattcatcgagcagctgttccactcaggtaggttggcacacctgaattcagaaacaaggtaagattagtataacgatatgcatatgtgattacatgtttagcgtacatgttagttgccgtcagaataggcaaatctatagccatcaggttagtatatcagggcattggtgaggtgtacatagagttgcaccgagatgccaaaaaatatatgctaggctatcagatagtatgaactaactgctaccacatccttacgactagagtactgagtataggttggattcgtagttagtaataccttgtcgtatgaatgttctagactcaacatcgtgtgggacacggggatagggttaaggttgggtgtatgggcgcctgattataatccaggttattgctatgttattatttatgcttttcttacttggtctgttgactcacagctgctatttctatgtgtaggtaagggaaaggctaacgttgagcaggcgtgagagcgagcagatagagattgtgttgggttttatgccc

SEQ ID NO: 264985 - DNA, 1167 bp, Cannabis indica
aatttttagcacaaacaaatgtaaaaaaaaaatgtaatcattcttgtcataatgcctagttgatgttatttgatgaaaattaagcttagggtttattttgtactattataaaaaatttatagtctaaattgttatttaacaaaatagaaagttcaatcgataacttttgcaaaaaggatctgaaatataatttatttaaatttaaatgtaattattatatcaccaaatataaaatattttaaatttttttaaggatatttaagtaaattcattaaattctttttatcttttatttcattctcttattttttaaagattcaaaataaaggattaggagggagagctcatcctctcctctatacctttttcatatttttctttctcacaaacatagtgtaagacatatacacatgcatgtaataatatattgccctttttccctttttaatatttctttttcattttctttactaaaaaagtgagagggctacatcatctaagctctcactagggttggtttaaaaataccaagtcaatgttgttgataaggtttatcttttttttcttcttaaaaaaaaagaaagaaaagaaacaatgtaatattactatatataaaaatacaccacataaattaaatctcctttcatgtaagagaagaaaaaaaatccatcttttagttactcttcttttttgagcttttactatatagttcagctctccaaacttaggctttatgaagatggaaaaatatggttgttactataaaactatttaaaataattataattatattaataaatcaatattaatttaaaaaccaattatatatattcatgttttacttaaaattccacacaccacaaacaatatatatatatccttcatataagaaaaaaaaaatgtttcaattacttttcttttttaaaatttttcaagtccaaagtcaaaacataatttttttattgtactaaatattatatattacatatatattatgtgtatagtcacttcaattaatattctatgtatagacatacgtacatgtgctaccatattctatgtcattccatgatgttatatatatagtaatagtacctttataaaattatgtaaatataatgatgatgatgatgaagaaataactatataaaactatttaaaatagtt

SEQ ID NO: 264986 - DNA, 912 bp, Cannabis indica
agtgagaagacgattaaacgaaaagaccaggatgaagttcttgggcgatgcatctggaggcagcagaagaagaaagatgatatgcagactattcttcaatcgtcgactccaattgagagtgagaaaacgattcaacgaaaagaaaaggaaagttaacggcgttaaaaggaaagtttaaaaaaatggtggacgattctttttggggttaaatttaacagaatattcttttatttgtaaaacatattctcttaaacatggaattgccgttagatagacacttttaatatataaagatacattttggatactataataattaagtaacagtatcataaatagtagggtatgctcttaatgggtattacccatgtataggtattttatttttgaccattagatcaaatctaacggttgatatttataatcattaatgaatattaaaaaattaatatttcctattttgccacttctttctttgattttgttattatctatattcctaaaataaataaaactattaatagaaataaaaaatttatatatggaattgctgtttaaaaagtaaaatacactaaaaaaactaacaaattattttttttaataaaaattattttaaagattaaaaaaaaaaatgtatatttatcttcttataaaatttgttcaaactaaaattctaaattgcattactgagaacaaaaaaaaaatgtaagctttaagctgtaatacatataaaatgtataagattttttttaaacctagaatctttaatttcataataattaacaatcatttatatgttattatttttttaaaatacttgagcttaccaaaacctataagaacaaaaccaatgaagaaaactttaacaaaaaaaatgaacgaaaaaaaaagtgccattattgaataatgaca

SEQ ID NO: 264987 - DNA, 1125 bp, Cannabis indica
ttcagattactgatagctttctctgccttttttgtatgattttttgtcccctttttgattttacctcggactatttataattacatagtaggtagttaattacaaagttgactgtaatctttttacaacaattatcccctaaaatcatggggtttgattacgtatcacgtagtgtacatgcggttactatttaaaaatcatacagttgtgattttcccgcttttactgggtcaaaatgatcgtgtgttttaatacatctttaatttttacgtcagaaaatgtctcgacaagggtttggttccagtggctgtaatagcgagctggagccttttttctttatccttccgaggtcaacgaagtatgccttgtcgcttctttgtgacgatcgcggttcttataacaaagatttctttgaggctcgtttgaatgttagcttctgactcgtcaagattgtaagcctcactgagaagatgtctgaagttaattggggcaagttacaggaatgaaccttctcatagcgagatagacacctcgcttatcgggtctcgagccaacccgactgttatacttagtttgcacgttatgtactaagtgttttcgcggtcgatatgcgtcgctttcgtctcccaggatgtaacgtacttgatgcctcgctatatgcctttaatgacatatggtttctcgttaatatactaagcaacaatttgtatatcttttccttaaaactttacagtcaacgggttgtgaatatactctgctacttacacaattaatgagttattccataaaaagttacataatcgattcgcatttcctaatcttgacacgtgtcttccactgagatgttacccgaaattcggttataacaccaccctaaggtaatcggacatcgagggtacccaacctaagtaatcggacgtcggggtacccgaagtaattggatgtcaagatgctcctccccgaggtaatcagacgtcaggatacccgacctaagtaattggatgttgggataccccaccccgagccaaagtaatcagacgttttgataatcaaacctcaggttaccccacctcgacataaaaagatttttttagcatgccacgaaggtggttggggaccttgggg

SEQ ID NO: 264988 - DNA, 866 bp, Cannabis indica
atatccaaagaggtgatattatgttaggctttgtgagcaccgaattccaactagcggacatattgaccaaggctcttagtgatgagagatttagtttcattagaagtgagctaggcatgacatacttaaatgaaatataaagtttgctcgctatggaaatttcatttctctttactcacttatttatgcatattcgttccaaatatgatatttatatgacttatatgtgtagatgaaaaaatttcatgatacttgacctacatgaactatacttgctaaaaaatcaatattataggtcattgtatgaattttttgtgaactttagacttgttttcaaacaagtgaacatgtgaatttttatatattcgattagcttgtgtatttatatgtttgaacatgtcaaaataagtgtatttagtgtgcctataggtttgctttaactgaaatatgcatgaataaattttttgtacgctacttgttgattttataggtttttaagcctaaaagagtatttttcaccaaattttctcatttttttaatatttttcaattttgttagtttgtaaacctcacattttgcttccttgaactactggaaaaataatttttaatttcattgcataaaactcatttttggtaaggtttaagttttcttggcaatttttgaaagggtaatatatttttaagtttgttacggtttaaccctcatactgaaaaaattagggctaaactccccaaactctataatcgttttggtcagcacttcttctgttaatttttagctttaagtgtcaaatagacctatcactgtgtacacaagtatacacgtggtgaaattttattgggccacctaatattaataatta

SEQ ID NO: 264989 - DNA, 536 bp, Cannabis indica
tatatataaaaaaaaatatatatgtatattttttttttttgcataaagagacaacattttagttacttaaaagatcaataagataccaatgaattatcttttcatgaaaatatctacataaaaatgatttcatatacattttggttacttttttatttagttacttttagaattacatgtttatttttaaattatattatgttgtttaagaatctttcacattactttcttctttttagcaacatttgtgttactttcaaatttatttaagaaactaatgtgttacaataaaataaaataacttacataatttattagcgagatttgtaaatatctaaattagtaactgttaattaaaaattatattatgatttcataatattatttaagatatattttggtaactaagtttattgtagaagcttatagttgacatatagtataatataatatatattttttttattataaataatgcatatttttaagaccaattggttatgagatgtcgataaaatatcaattggttactattt

SEQ ID NO: 264990 - DNA, 230 bp, Cannabis indica
gatacgtacattttgggaacactctatatatagccgcccatctcttattcttctgtgtgaatcacaatacaagagagatacaatttcgaaatacttagtgaaagagtagtacccacacacagcaaacagtacctcaatcataggttggaagactgttaaggatcaaatccaagagaaggacattcggacacagatcttgtggaaggagacatattattctgatgcaccca

SEQ ID NO: 264991 - DNA, 2200 bp, Cannabis indica
aggataaagatttgagcccaataagtatgtatggctagtaaaactgagttaatcagtgttactctccccatataagataagttcctagtgctccacatccttatcctgcttgtcattttttccagaaggctttgacattctgctctaaaaatcttctttgaacatataaggataccaaggtatctaaatggtagtgtactccttgtaaatttagatgcctcaatgattctatttacttctgattcttgcattcatgcacagtatattgctattttttgctcatttggttgcaaactagatgaagctgaaaataatttcagccctttaagtaacagcagagcagatatgaaatctccatgacagaagactaactagtcatcagcaaagcacatatggttcaatcttaaagatgcacacctgtcatgaaatttaaaccctggccaatctcctaccttgataaagattctagataggtactccattcctaacacaaagaggaggggagacatcggatcaccttgtcttaaccctctctttgcattgaagaatccacacatagagccattcaataagagagagaatttcggggtgcaaatacattccataatgagcttaatgaacttaccaggaaatcctagtgcagtcatcatctcttccaagaactcccattctatagtgtcataggcctttcttaaatcaatttcgatcacacagcttggtctacagtttttcctcccatagaacctcaccaaatcttgacataccaacacattatgagcaatgaaccttccatgaacaaatcctccttggttctctgcaataagatcaggaaggactttcctcaatctattacaaattaccttggttgccactttatacaccacattgcaacatgatattggcctgaagtccaccacacttttaggacaagaagttttgggaattagtgtgatagtagtagtgttaatctttttcaaaatctttccagagtttaaaaaagatataacagcttctactaaattaggtctcactaagtcccaattatcttggaagaaagcagtcccatagccatctcgtccaggtgctttgtccttatcaatagagaatatagctaattccacttcctttgttgtgtactctgctagtaatagctgtttatgacactctgtaactttaggcccaagatctactactgattgaaaaaccttgcttctttctggtgcattcgatcccaatgcctctgataatactcaaggaaagcagattggactttatctggagaatcacaccagtttccatactcatcttcaatcgagaagatcttgttttggagtctcctcaatttcagagaatcatggaaaaggtgggaattgtcatccccaaacttagcccaattgattttagttttttgagtcatgaagctagcaaaagccttgctgatttctgcatatttcttccttaccatctgttcctgcttcatcaactcttcattccctagatcatgacttagtttcccctgtatctctgctagcattgtctttgtcctaatctctatctttcgtaattcaaaaaaacatgtcttgttaatctgcttcaaaactgccttcagtcttctcaacttgtgcactatgctaaacattttcgagcctctactttcttccttccaagattgtgtcaccagtttgtcataatccggagccatcttcaccgaaatggttttttcccatagcttttatcttcttagataattaccaagataggactatggtcaaaagccatctcaggtaggaaaacgacttcagaatagggaaaattatttagccattgagtgttgaccattgctcgatcaatcttagaaaaattctctcttctggcttttgtttattgttccatgtaaaaaaggaacctgaaaatttcagatcagccaacttgcatttctccatagtgtctcggaatctctgatatggtaggctttgagctctttttcaacctctttcattagcattcaaaatctcattgaaatcccccattattatccatggctcatctatttgtagtgccacttcctctaattcagcccataaatcctctctcttcttttcatcattaaaggcatatcctaatgacacaaaaaatttctccacttgctgctgttattgaacatagcaatgaatcagttggctagagcaatatctaatat

SEQ ID NO: 264992 - DNA, 503 bp, Cannabis indica
aagttatgaattttggaagtttcaggttgaatgggtgctcaacgcacgagacagcccctcagacaacccattcacgcacgcatcttcagacaattcttgtctgaaggcgctgatggtcggacacggagacatgcccagcacattgcacctgaccgagggtttctctgtcaaggaggctgcaaatgccaagatttatcggcgtctcctcctctccgtgcgcgtaaggaggttgcatgtagcctcctgctgggcagccaagtgttttcctaaaaaagtgcaatttttgtgattttttgcacaaatttcggatttttttaatttcaaaccaccaaaattaaaataaaatattatttttaatatatttgaactttaatatcattttttaaattcataatatttattttctaatagattattattaattttgatattttgagatttaaatttaaaaactgattatttttctttttaaattatggtcagatttaaaattcggtaatttc

SEQ ID NO: 264993 - DNA, 620 bp, Cannabis indica
tattattctttttactcattttcatatttttttgttttaattaataaaatatacgtaaaaatataatatttaaatggtatagagaaaaatatagagaaattgatgtatagtgtaatgtaaatgtgtgaggtaaaataaaaaaaaaaatagaattttggtgaattattttaaaaaatagagtagaaaaactgttataagtgttctaacttattggatagtaaaatattatgtcaaaattaatatagattttgaatactttactcttaaatagtaacaacaaacacaattagtatatgttctaaaggccataattgtttttctttgccattaagataaagtatgaataagaaataaaaataaaaataagtttacattacgcgtacatcaaatttgtcacttaatttcctatcaaaaatcatttttttttttaaaaaaatgtgcattcaaatgctcttcttacacattgtaaaatttaaaagtaaacttaaatacatttatacaagtttgttcatcaagtcggaggtgaaactatgtgtgccgtggcgattgcgagagaccataacgaatcagttttatgggtggcggcaaaaaggctacacttctctgacccactcactgga

SEQ ID NO: 264994 - DNA, 1192 bp, Cannabis indica
tagcaattgttgttatgtaggtatcaagaagagactcgaatcttagacctattgggagcaaactacatgcctgaccatttaaactacccttttcgggtgatacaatctatagtagttggctataaggaagatggtaatgcataaaaaatcattcatacactacacaaaaatcttcatcagataagtttaaaataaaagacaaccttcagaaaattcggcctcatttgaacgcgcttgctggaacataggaatttggaatttcggtgattgtgattctgcacgttgagctgaaaccggcattatggatgaaatatgtttagtatctgcaatgaaaatgtttagtcaagaaaccgaacagcgatgaagtgctcattatgattaagctatttgtttctacattcttaccaccacagaaaggagttgattttgcattgaagtagtaaatttgttcatagtttcgtagcagtgaattgtagtactttcgtagcacgaatgaagcgtttgtagctgtggagggaaagttgaaaaccgcagttacttctttccatcttctgtcattactaatctgtaaacattttttagagaaaataagtagcaatgtattgaattggtaatataatgaagcaatttccaaagttcaaaacagaaatcttccatattaaacagctgcaattcattaacaaacatagagtttttttcctttaaagaaaggtactaataaattagttaaaagaaaaagggaaagttaggagatggggattttagaaagaacaatgacatgtgacaaattacattttcggggtctcgtcttaatcagatgtgattgactgaaaaacactgtcactgaacaaactcaagtaatttcgtcgaggaaaataaggtacaatcaagtttggtctaaattgggaggaatctatattttgtttttaagtgcaaaattttttaatgtggctagaaatacttttatattattaaaaatgagcttaggacatagatcttgagagcaaaaattttgaaaatagtaatatagttgaaaagattaagaaaaaaaaaaggattatgatgatagagttatgagatatgaccattcttcaatctattctaggatagtaaggtttaaccttctagtagtagaaattaaatacttacatgagagaaagtttatgccatgtttgaatgtctaaatacattt

SEQ ID NO: 264995 - DNA, 638 bp, Cannabis indica
ttttgccccatatgcattttgtctttttgtggattttgtttatttagtaaattgttttatgtttgctgagattaatttagaaaatgtaagaaaggtttattttatttcattttacaaaaaacaaagaaaaggaaaaatcatctctctttcaaagctctctctctctctctctcaaatcctagaggctgctagggtttgatcttttgttcttcaaattctgcaagttttcatcagttctaagtgtaatctaagctaaggtaacctttgagcaactttctcttaatttccttaagttgtaagaactgaaattttgcatgctttgaagttttatttgctatggttgttgtagttggttgttgttgtgttctgaggtttaaatatggtttattatgttgatttatgcatgaattagaggttattatgtggtttgagcaacctttggagttttgaactcaagcttggctcattaatggcaagttttgtttctgtgagtgtgtggatgttttgttgccttgaaaatgttttctagggtgtatagaacaagtctggaaattttggattggattagggttgaattggtcgagttatgaatttttttgtcattcctgcactgaaccagaattccggttcagagaggc

SEQ ID NO: 264996 - DNA, 613 bp, Cannabis indica
aataatttccaacagaaagttctcttctttaacactcattaattacttcaaacatctctaattaacagttgttgaaacctcagtcaacattaatggtaaaaaaaacggaacctaacaaaaagaacataattatgtaactgttatattttaggaaaaattttaacaagctgtatattttagggggcatgatcagatagtgtcaaaagtttatggacaaaaatgctaattattttattattataaccaaaacataaaaatatgatattaaatgcaccaaaagatgggcaaatgttttggtatgttaaaggggtgttcatcaaatcgctcacatcgcacaaactgtccgcaccaccacacatcacataaaaatgcagcttgaaatcctttgtagtgccattgcagttagtattttttccaaatcgcgcggtgtgatgcggttttcagtcttgaattttattattgcaattcaaactgcaccgcaccgcaccgcactatatattataaagttactaattttacaatataattttaattttttttatttatataagaataaatatatgtaatatatatagagacaattcaatataataacttgattaatatatatgct

SEQ ID NO: 264997 - DNA, 1300 bp, Cannabis indica
ttatatgattttttttttaatttgtaaatgagaaattttatttctccaacataaaccaatatacaactaaattactctttacaagtttctacaagggcaccaaaccaaaaatgatctacactacttattttctcatgtttaatgtgagaaaatctatataattgtattctttatattaaaaacaattttcctattaaggggaaccttttgattccaaagaacatcatttctaactctatataatatatacaacagcattaagaattaaaagaattaaaatgtatacctcccttctttattagttgttcacattgtagaatgacatcagaaatattcaaatatatattactaattttagctacaatataaaatgcaatgtatgcttgtatatgacaatctttgatgtgccttttaaaatataattaagcttcagttttttttgttagtataataatatatatatgtgtgttaattatattgttctcctctctttaaatataaaatcacttaagcaaaaattagatgtgatgtagatactataaaatcatttgcagtttgaaaatgtgtatatatatatatggatatagttatataatatacctataaaatcagtggcaagtctaccatcgctgaacctgccagtagggcggccaccaaagaagtctttaccataaggagggaaattccctttcattgtggtggaaagaacgttattattgcctggatccacactcgaatctccgaaaactaacacgcaagtcacgttattacgtgctgccacttttcgtactcgaccgtagtcaattataacatcactctgtttctcagtgttattatgactatcatcatcaacattaacacccacttctaccactccagactctaccaaaactactagcattgtgctaacaaccactaccactaccaacaccctcatcctcataatcataaatctacaaatatagatagattttgcaaatttctttctcgatcgcctcgattgaggaaccaaagagctagagttttatatggaaaataaccataaaaaacgtctcaaaataatgattcttattgaataggcagcaggtttgatctgaatacgtaccattgccgtgtgtgtatagtatatatatttgtgtactgcccatctttctttaatggggcctagctagtgatcagaataattaatttggttgtttgttggcagtaatattgaagaaatatatttttatatatattatattatactaggaaactaaaccgcgctttgcgcggtcttttacaataattgtaatatttt

SEQ ID NO: 264998 - DNA, 1091 bp, Cannabis indica
ccttccgacagttctccgtcgtgaccaactccccaacgtcaagggccttcttgtcatacgtggagaaggtcttggcccgctggaggaatacttgggtaggcgcggttcggatgtaaggagggattatgacccactccgtgagaagctccaggcgatccatggcgtggaagccggaggaaaagaagaagcggtgacggtagtccttcacatgcttctgatggttgaaagggactgggccctcattcaaacggtgggcccgaaggccataaaaatcgtctttaaatttatcccccttcttggggataggaacaagttcataaaaatacaatatttcagccgaactgggtgaaccctagcttcgggcagcataaaaaataaataagtctaaaagcaggcggtaagcttgagggattagtcggtacggcataaggccaacaaaaacgagaaactttataaaatagtcttggagagggagcatagccccgcacatcaagtgggcctggctccaagctccgaagcccccataattgtggttgggtgtctcctcgtcccgaggcagctggtgttaggtcctgcagaccgaagttttgatgcctgccaccaccaaaatcttttcaagctggtgagcgcaggtcagtgtggagtggagctcagccacctcccatccgttggcgcgggacttgtaattttcctgggccacaggaccctgcatgacctcctccagggtggccagacgaacttctcctttcctggaagatttggaaccaaatgcagaagcagacattttggttctgaaaaaatcgagaaaatccagcagttaggccccaaagcaaaccctaatgttcaaaaaagggaatgtgggtcccctaatcgctggaaagaggccccctccggacacttgccaaataagaaagccccaagaggttttccttgacaagagtcgggtgcaagaatcccaaaggtagtgacattgcaaacaaaaaaaaagagagaggaaaaaagaaagggaaaaagggcaaagccgaaaaggcaaggtctactctaagccctaaagtggtcattacgtgggatgaggatgattcctcagcgaa

SEQ ID NO: 264999 - DNA, 8707 bp, Cannabis indica
ttttaaatattccaaacaactatatatataaatacatctcttgttgttataagataattcaaatttgaccaataaaattatcaatttgaatgtttaaactacacatgtggtactaaggtgatcatggtctaaaatgttgtgctattattatgtttatcacataatgaacactttacaacactataaatagcttggggccataattgacaagttaaaaaattaagggagcacaataatatataagtcatagttcaggattcaaaaatcctaaatagcatatttaagcatttatcttatttaagttgtgattatatatattatcttattattcctataataataaggagaattatcctatatagtatatactctttttttaactcttttttttttcaaatttacggtttgggtttctaaagtggttacagcgctagttgcaataggggtttctgtacgattttttgttgccctaataataatatcattgtgcgctcacctaatttttttacttgttaattatggcccttaattatatgatgaagaaagaaatatttcttctgtgataacatagtaatttttaacttgttaaaaaattaatggcccttaattatataatgaattaattttctttcttcatcttaccttaagataacatagtaattttatattgaattaattttctttcttcatcataccttaaacaacttagaaagaaatatttttcattctctcccaattttctctctcttttattttattttctttataccaaagagagtgaaataattatatgatcaaaacaaaggcaaggtaccataatatgtactagttatgttgagagtatcaaaaatgaaactccttttatgaggtacacaaaattctaagagcaatatcaaagtcattacacattgacctttagtgataataatcacacttgttttaagaaactagtctcaaattgaaccaaagagaccccatctaatccatcaccatgatcactatactactcatctcttccattgaagtagttgtttttccatcatcatcaatatttttctcattctttgatttcttactctcaagatagtgttgataaacataagacatcaaaccccatatggccaaaacaagtgctatgactttaactccatcaattttgtcatgaaaaaatatgacagctaaaacaggcaccacaggcaaactcaacacacttataacatttgagaagagtgaagacacttcaagaattaatccaattgctccaatattgaaaagttgccatgaaatagctgcccatgttaatgtcattacatatgaaattctccctaatccaaactcttcaatctctttactcaaaaccttccaatcaccactaatgaaaagtcccaacaaagtagctaatgttgccacaagtgattggtaaactgtcatgtccattatggctgaaaatgtttcccttttcaagactttttcgagtgaaaattgtgtcaacgaaagtactaaaccgtaccctgcagacgccaagatggtaaagatgaacccgagtggatatttcctccccgaaactttcgatgattggtctgaaaaatcggcttggaatagtaaaaggacagaagagattgtcaaaagtacaagagagttgattatgtaaggagtgaatttttgtgagttgagaaagaatgaaaataaagcactaaaggacaattgagttgcacaaattagagagtaagttgagacaggaaggtggaaaaggccaatggagtggaaaagacatactgcaccattcaaaagtccaagagaaatgtaaattgataaaacagtcaagggtgatttcgaaaacacaatattgttgttttttgatggggttttagtgttgttttttggtaatgtaattgcatagtatggaaggagtattgggaagcctacaatttggactagtgcagccatccatttgctattaccacctctgtcatagtaaagtcttcccaataatgttgcaaccgattcgccacagaggacgaaaaccgagtagacagagactctaatccaccaattatggtctctggtttgagtttggtttgagaaatttgatgaattggcttcattagcttcctgaactgttaacaaaaaccaaagacaatacacaaatcattgcattgataatatatgaagtaaaggtatgaaaaagtagttacttaccaatgacattaaggttaagcttttggtcttcttcttcttccatgtccaaatttgaaggaaccagaaaagtagattgagaatgagaaagagaaagactcaaataatattagcaaaatcttttatttcttttctttcttgattttcttttctttaaatttacatgcaatttgcatgtagatattatcaattacctaacacgcaaagagagaagaacttctcataaagcatgtaatcttttgtaggagaattcttagttctcttaactcatttttcacaccatatattcgtgaaaaaaattaaataaaaaagatagctaaacaaactcaaaatattgtccctaacacttattttttttgaaagattaataatgacatgaatgaaaattttcaaatgaatatacaagggttttcgtttatgcttcacttttcgaatcgatttcgtgggaaaaacagattacagaatagttaccgatatcgaagattgatcgcggtagacaaaatctatgtcacagttaactactacatttttctttgatgattgaatcaaaatggctaaaagaagataaaataaagaaagggataacttgcaatgcgcaatattaccatccgaaacgaaaaaaaaaaaatatatcgaattccttccccgatctattgtctttgtcttcctcggcttttttcgccctggtgttgtgtgggggcgctttatccttgaaaactgtgtgggggcgctttttactagcttcatgaaggtagacttgaaagcgaacattatccaagaatttcgatttttatcctcttattctgtatatatatatttgcaaatccaacagaaaaacctattttaattctccttaggggtcttgaattgtcaagcctgtaagaaattaaacgcgtttattattcagtattaggttgaaaaccaacgacacggctaagaagattagcgagtcatacttacccggttaatgagggatcagaagaagaatgactgagaaacagtaaatagcgaggaaaactacgaatccggctatacaattatgcaatagcttttgattgtcttttgtcggtatgaagacggttttaagtgtattggtcaactcaaaaagccggtgtgatacctggaaaaaaaattggcaaagtgatgacattagtgcaaatatttctctgagcaaagactgttttcgtgcttgtaaaagaagggctaattatcttgttaccaaaatataaatggcagttacgagcatgaagttgagcatagggtattccgggatcaagcagagaagccacttaggctgtccattgggaatgtttgatctgcagacagacatagaaaagttagaatggcaaccgagaataaacgaagaactataaattataatacaaacaaaaagatccaagagcacaaacctcaaccagatgtggaactgggaaatgtaggtttcgagagtaaccttgcctagccatctacagataaattgtcagaaatatatgttaaaaaacattagaagaatgagccttaacaagggttaataaattttttgttgaggtataataatcacatacgcaaagagagtcatggagaaatttcggaactgctgggtgaagttccgcaaacatatataaaccctggtaaagagaaaagaagagaaattaaagtctgaaagaggtgtcctgtgaatctatgcaaattgatttatgtcatcgaagttattaaattattgctcgtgtttaaagctcacgttatagggatccatgaggtgtaggggtggagcttgttatacgaaactttgtctaacttgtaaatgtactcgaaccataaataaccaacctacacagaagatcataaatgaattgagaaagaatataaaaaataaccataaaagcttgtgatgttaaacttgttgttcgaatactcacaaatacagaaacagcaactatggctcctttgattgaaactctcttcttggtttctgattcctccaatttttccatccatttctcaacctaagataaaacaatattgttcaggtaaagaaaccgaaaggcgaaagaattataagacatgtgagcatgaacattagataattacattgggatgacaatatgcatatatcattccgataatccatatataacgatcaagtccagatctgaaatgccattcatgcaaccgagagagatccggctttgcaggatcagtataacctgcaataattatcatttagtaaatatgtcaggaatgtgataaagaagatggaagacaacagtattccgaaatctaggaattgaaactaaaagaccgaacaaattactcacctagaaggaatgcaagtggactccagagaatctcgaagaccccaggaatttcccataccaagataaccacgagaaagcaaacgagaatctttgcaatgatcactgatcttatctcattatacttgtgaaaaattccaagggctccatacaccattagagtgaataatgtgtgcattggacatatatagtacagcatgtaatcattgttgagaacaatacagcaaaatgccacaaaaagtttagtctccacatcatctgcacaagtgaagaattaataaatgagattgctaatagtttttgtctaccctttattttcggcgataaaatttttattgttagaacaggtgacttgacatattaaatggaaacgaaaaaaataaattacctgtgtgaaccgtgcaagactaaaatcttttctgatgtaatagtaggaaaagttgccaaaaccagtcatccagacatatgcggcaataaagacacgaatcgcgttatatatttcagttgcagcgaagtaatgatacatcaaaaacaggacctgttaacggagtaaaaaaaatgtcacggccatgaaataaaatataaataagaaaaggaaaaatgtaattggtgactgaaaacagagaaactttcaagataggaattcaataaatccgagcaacctaggtttgcgggctcagttctcagcagaactgaatattttatagttcaaataaaattataggatctgattttttcactaaaaatttatagttagtgaatttaacaagatttcttacctgcatccaccccttccattcctcagtttgatgacggttaaggtacagtatggatttaccagagaatgctgatctatcaacgtgtttcttcaaagaagtcattgctgaaactatgatgagaagaaggtagaggaagataaaaaggtcgcggttgtaattctgtcaaagagagagaaaccagagaaaaaaagtgatcaatatcaatatatcaacaaaatgcttctgagctcatcatcttatgaataatcattatccgcatttaatgaaggaattactatagaaatatagaaggcttgccacttctagactaggtgttatcggtaatatatactatcataattcatactgagaatttgaagtagtcataaaataaagttttgacagtcatataaataactaactttatcgagatggtatccaatcaagaagccaatttcagaaaattaactttatatatacttgacagaagaattttatagagaagagaaggtatccatcaaatatgctgcacatgcatttaaataataacacatacaaagaaattcagacacatgaaaaccaaaaagtaggaacaattacctttgtagactcgcccaataaacttgtgcggtcagatatgtagaaatagagtagaattgctccaaactcagacctgatgaaatcgcaatcttgattaggaaaaatcacacgttctcaaaatttgtattattattcttcaagtacaatactaaaactttaagaaagaagagagacaaaacagcttacattgctctaagtgttgctctattctctagtaagaaagagtcctccaaagtcaaaaacctagaagttcatgcaaaggggaaaaaacttagaacgacctttaataacactatcttgaagaattcaataaagaggtaacatttaatgtgtaatataacctaattaaatttgctttgatggatgaactataaaactttgaagatgctgatcttgcaagacctccttctaacaaaacggcacgatcatcttctttgatggcctcccctccctagttcaactagattagtatctgaatgactgtaatacaggagaagcatcagcaattttttactacgcaggaatcacgacattttggttttaatagtgaaaattttgaatttctagtagaataaacaccaataatttgcttgttttatgttgagatctcaatatcataataaccaaaatgcataacagagaaccaatagaactcataaaacaaactctaaatgaagcctggagtgcactatttctggtaaaaacagaaaacaatttgatgaatgggaaaccaattcaatatatataccaaatacagacaaaatataccaacgaccgaaataatccaagtataacttgttcctccatcagtcaagataatgataaaagctaaagatgcatttaccatttctctcatttttacacttccatcaccctaagtagtctcatctaatgggaaaagcaaaataagtgaacaaaaaaaaatctatggtttaataatcccaaaatggataaaagagataagatagacttaaacaatcaccaagctatagagtccaacgcccgccgtataaagtaaggagaagagacttacactttgtaaggagatgaagatttcttatattccaagtactctgcatatatccatccaacaaatatcgggatgattcccagcaaaaatgacacctgggaacattaacagaatctccattataaacggtaaaatgtttatgcagaagataaaagagtcaagaagaataagcagtggtcaaaggcagagaagaatgtttagaactgtctaagtgacattgaagttttaatagtgactaagcatgtgtatttatattgcttgtagaatttaaggttaattatgagtcacgccactctaatcaattatgactataaaaagatttaatgagatctccaattaatacttgctctataaaaattaatatcagaataaggaactgaaattcaagaaacccaaatcaaaaactggttttgaataaccagtcaaaaggagtggcagattcaaagtttcaatactcaagcaaataaagaaacttttatacaagttggactctgtttttttctaatgttaaagcctctgtaacactctgattcagaaccaaattagatggtaaaatatgaatcgtttttattacccactccagcttaaacctccaccaattcaccatgaattgtaaaaaaagaagtttgtaccataaatgagagatcatgcagctctacgtttatatataccaatcatatttgcatgtcaaacataatgcttgtaatatggttcacagttaagattctagcttgtgagcaatcgaaatagtttgaatggcaataaaacatgcatgatcaaactacaggtatagaaattgttttgcttttgtcctccccaaccaaaattgagtgttctcatttcacaattcatgctacttagcttaaaaaaatacaaaaaataaactgaaagagaatgatggagtggtgatggaaagccattcaaagatcatgttcatctacataaaataaatctactaaacaaacaaactttaaatcttcacactatattccatagatgcatacaagaacatttttacggaaactaaattcaaatttcaaaccaagccaataaaaaacaatggtgacaacaccaataagtttcaaatcattaagaaatatctcaatcaatcaagtaaacgagatcttcaaccaaaattgcaaatcaaaactcaacacattcaaaattttcaatttctaaatctgtttttttattattattattattattttcaaacacacacctgcccaggcgtaattggttcagaatccaccattgtcgatccttccttcgaaaactaattcaaagctgccaaaagaaaacaacgattcgagatcaatacaatagaattaaactcactgctattactactacaactacaaactccaccacaaccattctcattatccatatctcaaatcgtagatccaaaaaaaaaaaacaacagaatgagaatatagtaagtaagtacctggagaaggattgattgattagtagagaggtcaaatcaacagaacattgagaacataaatagcagaaagtaaaaacaaatgaaaccctagcaggagaatgaagatcgagatgaagtagtagtagtagaagaagaagaagaagaagattgaggttgttcaattcaagcttttgcttaaagaataaagaaaaatgtcggaaggtacgtccttctcactctctctctctctcagtttctctctctagatttctctctctaaagtctttctctctctagctttgtttctctctctaagtttctctttctgtagcggttgattatggttgttgttactatctttctttctctctttcttttt

SEQ ID NO: 265000 - DNA, 1580 bp, Cannabis indica
ccaatataaatttgacactataaaagtgtacacataaaccgtttatattggctattaactataaaaatagatagataactacttgagctaagtggcctgtgtgttggaggttctaagttcgagtttcaaattatgtattgtgtaatatataaacgcttaactaaaaaaaattataaaaaatagatgacatagaataataattgagagagtttaacgggtttttcatttttatacttcaaaactattttttttttgcatttttacaaaattctacatagaaatccctattgcaactagcgctgcaacctaaattgcaacaaaaaattgtatgataacccctattgcaactagcgttgcaatcactttagaaacccaaaccgtaaatttgaaaaataaaattaaaaaaacagtaaacgaggtaatttctcaaaaaaaaaaaaaaaaaattaagttcacatgcttacaaaataaaatacttatgtaaaattttccaaatagttatatgttaatatgcctcatgacattcaggctcgttgtatgttcaactgtaccactatacgacaacgtttagggatcatattttctgtggaatatcaattaattgattaattcccatgatagaaaatctgagagaacgagtggagaagtgtgagtgactcagtgagtcagacaaacaatatcagaacaatggaatcgtcaataggcgtactgatgccaatcccgatctacgaaggccttcagagagaactgaagaaacgattcaaagtctacaacctatgggaggcccccaacaagagccagttcatcaacacccacgcctcttccatccgagcctacatcggcacctctggctttggagccgacgccgatttcatcaatgctttgccaaatttagaaataatcgcaagtttcagcgccggaacggatttgatcgatttggagttgtgtaaggagaaagggattcgggtgagcaatacaccggacgttttgacagatgacgtagcggatatcggcgtgggattgatacttggtgttttgaggcggttgtgtgatgctgatcggtacgtgaggagcggcggctggaaaagtattggggattacaaccgcaccactaaggttggtctttctttaatcttcatcattaattaattaaaccataaacgataccatttatttatttttattaatttatttattgataaaagattaaacttcattgaaaatgagaaagttcaatataatactgagatatcgttttataaaaatctatttgtatgttttagtatattataataggaaaattacttatattttttttttgaaataatctgtattattattaggggaattattattttcaaacttttttttaaaaaaatctaccctttagattgttttgatgatgtttttaggtggactgttctgtaaattttagttgtaatttaaattgtttttattaacataaaatataattttttagtatatttttatgttttatttttattattttgttgttaatttttttattttttttatgtttttttatatttttataaaataccataaaaatatataaaaag

SEQ ID NO: 265001 - DNA, 4360 bp, Cannabis indica
gatccataaaagttgtcagagtggtcaaaagacataaccaaaaattcatagtgcccatacctagtgcggaaaccagtctttggaatgtcctcctctcagattctcaattgatgatagcccaatcgaagatcaatcttagaaaagaccatcttcccttgaagttgatcgaacaaatcattgatcctgggtaaatgatacttattcttgatagttaatttgtttagttcccgatagtcaatacacatgcgtagggatctgtctttcttcttaacaaacaacactggagctccccagggtgacacactgggtctagaaaaccctaaatcaatcatcctcagaagttgaatcttcaattccttaagttcagctggagccattctctaaagtgctttagagactggctctgctctaggtgctaggtcaataacaaaatctatctcccgttgcgttcgtaaatccagaagttcatcaggaaatacatctaaaaattcttaaaccactttaatgtcttctggctgaactgattcaggtcgtgttgtatctaataccattgccaaaaacgctaggcatccatcttgtaacaactttctagctttcaataccaagatcactgggattcaggatccctaaactgatcccacaaacacaaatggttcctcgcccttgggttggatgatcaccatcttttgcttacagtcaatactagcagagtacttggacaagaaattcattccaagtatgatatcaaaatttgttaaactcaattccactaagtcagcactcaactctctacccttgattcggatcgacatagacctaacctaccttttggagataactaattctccgcgaggcagtagggttccaaaccctttatcataactgtcaatcggtctacccaatttatcaaaaattcaggccgccacatacgagtgagtggccccagagtcaaataaaatagagaaataagagttgttgaccgagagctgacctgtaacaacagagggactagtttttgcattagcctgagtaagagtaaacacccttgctggagcgagctttgcttttatctttgactcttctttctttagttgcggacagtcttttttgtaatgctcaggcataccacactcaaaacatccccaccatctacactcactcagatggtgcttcttacagttgggacactctggatacgtgtatcaggtttcaaaaccaccttaacggttgccatgaccgtggttccttcgaaacctcttcaacttactcgagctactagatgcagatagtttctttctgttctaatcagaggttgagtcacgaccacccctaccataactagaggtaggaagagtagtggctccaccaataatctgtgtccctcgggactcctgaacgcactcaactgcgccctctgctcacagtgcttttcctaccatgtcgacataggtggtattatcatctgttatgatcatcaggttgtgtttgatcttgggaacccatccaaatacttttctttcttactgaaatcagttggcacaattcttgaggccaacctagccaacctatcgaactgggttgtatactctttaacagacatattctctttttaagttagttgagtaaattcttttcattttgccctacggactgccttgttgtagtactttgcattaaataactcccgaaactcttcccaggtaattgtagtgacatctcaagaaagaggcaccatatcccattagaccagggcatcctcttggaattggaaggttgcataagctactctatcattaccggtgactcccataaaattcaaaatttgagtaataacggtcagccactattcgactttcataacatctggacctcccaaaaagactggaggtgcctacttgcagaactttttgtacagtggtcccatccgattcataacaacaactggccctgcctgcacaacagaggcaggagccacctacaccacaggagcaggcattgcaagagcaccctgctacctcagacgtctgatctccctcatcttgctcattaattcttccttgtatcgctgcaaacatgttctcccaatcctgagtagcccgcggtgggttaacatttccccaaccgcgtgctgtgcctcttgggcctctgcctcagccacgaatattcacgggaaactgaactccatgattgccattggatccgactaaattaccctggcttctcgtgttttgcctagcgtccattctaatagaacatcatgcgaaaccaagaaatagtctggtcagatcgcgatcaagaataaattactaattaccgcttacttcagaaattaaaatatgtgcctattcaactatcgggctataacatgcttcctatcaggcttttcttacaacatactaataaaacaagctactaaatgaataaaggcttactgaaccttgagtcgagcttatctctgatgatgattgtacatgtcgtgactatcttcagaagataacctggtggctctaatacaaaattgtaacaccctactagattaggcgtgttatcgtgattttatattaattgttcaatccgttgctaatcaacgagtttgttaaaaaacgtgattaattaaaagtttgctgaattactctttaatttgaaagtaaataacttttatataaaccgggatcccgtatttaaaatatttacaactatgatacaaaatgttcgatacaaaagttgtcgcctgacaactatacaaaatacagcctgctgtcccaaagatcgtatgctctaggcctaactgttccgacatgtacaatctttatccgctcgcactcactgctgttcagttttagctttgcccttacctacacatgtaaacaataactgtgaattgacagactctgtaagaaaaacataatcataatataaatataactcggattacaattaggcaccatacacctaatcataaccctatccccgcatcccacgagatactgagtttagaatgttcatacgacggtactattaaccataatatcagcatatattcagtactctagtcgtactgatgtgatagcgtcaatcaatacttataccaaacatacattcatcggtatccaatataactttatgtatactgataccgctatttcaatgtaatctagcaggcaaacataaacatgtatgctaaacatataatcacatatgcatataatcatactaatcttaccgcgattctgaattcaagtgtgccagtcatcttgagtggaacagctgctcgacaatttacaggcctctaagtcacaacattcgtaaaattgataactgatacgctaaattacttttcggggacttaaaattaaaactaaaagtttccctatcgatggataacatggcaataccctaaatattgtaaaaacatgaaaatctagggtaccctaaactgccccaaccagtaaatcggttcccaaccgaaaaccagttctgaagggtctgtctggggaggaactggtagaccagttcgacagtaccaaactgaaccggttgatcggttcagtgtctgtaccccccaaaaccacataaaaacctcaaattaaccccaaatcgtaccaaaacttccagagtacctaaaaggtccataacaaacctaatccaagcaaaagaaacaagtaatagcctctgaaattgaaatcaccattgaagagcaaagtttgagctctaaaactcaaactttgttcaaccaccacaaaaagcaacaaatcaaacttgaataaacttaaacaaccacaaaataccctttgaaaacataatcaaaacaaatttaaacctacagaaccctaaccttaaaaatcatgcaacaaaacttagtttttctaccttaaactcaaggaaaaagagagaagagtcttacctcacaacctacttgagctacatcagctcaaaacttcaggaattgatcaacaaagaggaagaatcttgttgggtttcttggtgcccttgtgactgaccaaaagagagagaaagagagacttggattttcttaattttttctaacttgaataaagtgaaataagctaatatttacttaatatcaatctcaataaatcagattataatacttagtattactttactaatttaacaaaagacaaaagctaacataaggcaaaaggctattttgtccttatttcaacaagaagtaatcttgccacccaatggcattttggtcaaatttaaaatcacaaatattctcgatattttcaatatcaatctaagttgtcccactatttttaaagtactataccataagaagaagtgactctactggccaaacatcgcattccactgttaccgagcataaaatatg

SEQ ID NO: 265002 - DNA, 719 bp, Cannabis indica
attatgatcatggtgatcactaagggtggtaaactttaaaagcaacgtgtcactaacgttgcatacatatttaataagcgcgtatattatttaatatttatatatagtctttgttttgctaatatggcaatattggcatatgcatgcatgtttttatttctttcacactaaaatctctcttaagtttttaagttatatttgaataataccattttaataagacaaatgtgttcatattcttaattattggtacatgattgaaaggttgcttcacaaaataaaagaaagaatgaaattaccgaatcaaaatttagcaagtattgttatgaataagatagagaatgattgaaataaacaaacataataatatattattaattaattaaagaataaaaatataaaaacaaatgatgtaaaactagtaattaaaaggaaactcgggggaacgtaaaacactctttccttaagaacaaatttgtcttttactttaatgcgaatacactaaagaaaagaaaaatactaagatagcgtttagttggaaggaataaaaatataggaataagaatgagaatggaaatatgaatatgaatggaataaaattaaaaaatatataaagaaattgataaaaaaattattaaattttttctcatcatgaattggaatggtctttcctttcattaattcaaaatagaatagccaaacaaaggaatagaatgaaa

SEQ ID NO: 265003 - DNA, 1047 bp, Cannabis indica
atctctttcatatcaatcacttttaactttttttaccattgtaattttaaatacaaactaaagtatgatagtttctctaaaaaaaacgtatgatagtcacgttttacatagagggagatatagatatagatgtagaaaatataatattatcgatcattaatgctaaagttgaatgttacaaaatatctcaagtattgacacttgtcataaacttctacatgacttatggttcaccatgttcacattcataatatgcattaaacaagatataacgtacgcttgatacctatttactagttagtataaaacccatctatatatttatatatatacagaagaaggaagataagaaccttcaaacttgaactaaaataattaactaataaggcatggagaggaaggtcttgacagtgttgttgctcattgttgttcttatttcccgtaagtttatatatataaatacaaatcttgctttgttcaagtaattggtatataaatatgttagtaatatattgtttgtataataatttaattattgtaacagatgaaatatcactgagtggaactgaagcaaaaacatgtgaagtggagagtgaaaaatactcaggactttgcctatatcgcgacaattgtgtggaaatatgccaaagtgagggctttccatacggcaaatgctccaagatacgacgtcgttgcatgtgccttaagccttgtgtttgatatatatgattataaaagtacttacttactctactcataaataataagtaaaataagatattaatgtaagattaattttagtgctgcaaaactaaacctttgatctatacatggctatatgggtattattatgtactgtgtagtagaaaatagaaatcaatgaatgaataaaaataaagtaataatttttttttatcttaaataatattcctatattattgctgatttagcaaaaaatattgttaattgtattaggagtttatttatatcatatttcttttttatgttaatttatttttaggactcagtaattttttatttttttta

SEQ ID NO: 265004 - DNA, 759 bp, Cannabis indica
agattgtctatttttgtttaaaagtcccgaaaagctggtttgtggtactctttatggtggttgtccaaataattcataacctatcttcgtttcaatgtttattcaaatgtttgtcctaaattgatctatccagttcgagtgctcacttttcattttccaactccatgagtgaaatccttagccatgaataaatactttcaaatacctgtgaggctaatggagttgagactttcacttggtacatttttcgaaagcatttatgtgttttggtttgcggtaagaaggttcgggtttggtgcacacactcacaactctagatttattcaaggtaattctgtatagttcttattggcttgttactaatatttttcttgaatatttgtgccatttttaaaaaattttaacctagaaaatattatgttgacattgtttattttcgcttgaattgctagagactagcaataagctagttgggggttgtgattaaggctcaaatttgtacattttaaatctttatttatgcatattaaattaatataaattaaatatttcatattatcaatggtaaatttattttagttgaaaatatttaatttattttaattttgtgttatttttcagatttgagttagtaaaatattggtatgtttggagcttggaaacccaactcaatagttggtatttttgcaaaagagaggcaatggtccaagcacaactcattcactttccttaccatcaattattattccaaactttgtg

SEQ ID NO: 265005 - DNA, 831 bp, Cannabis indica
gtgaacttagagttcatgggccaaatgccactatatttggaaatacagtcggtgtaaaagtacgtcatcatgttccagtttagtatagtggttgggccaaaattcctctagaagataagaaaaatgtatatggtcacatcatggtttacatatttataatacagtttttatattcataaagttataattttatgattcatttaataattatcatttttgtagaacatctttgatatagattttaaaaaagatctataccttgaaactatttgcaatcactattgccaagagcgatatagaggctaccgtaataaatgccatagtaaatacaaatatcttatatatcgaggaaggtaaaaatccattagaaagtcgaactaagaagttggtacaaatagacgaagactgggaatggatgagtaaaaactgtttctctaatgaagaatggaatgtatcataatatttcttcaatttgtacacatttaatatttttaaattcttaatactgacatgaaatatgttatgtagaaatagtcagctgtaggttccaaaaatagaacaaacgtttcttttatgcattctggtggaacaaaatcttttattcaatacttacataaagatgttgtatttttttgtgtaatagcattaaaatattattatatttaattttatttattatttaaatgtgaaatcaaaataaagcataggtgatgaagtacaacaacaaactatgaagtgtggagagattgaaatgtttcgaaaaactcattatacgattgagaatggatggatcaaccaaatagccaaggaaaaatatgtatgttaacttta

SEQ ID NO: 265006 - DNA, 658 bp, Cannabis indica
tatccccaatagtgaattttctatttttaactttagagttaaagtacttagtcaccttcttttggtaagctgccatccgtatttgagactcatcccggagctcttcaacctgatccaacgcttcctgtaataaagcctggtttgtagctggatcataagttgttctcctatgggacgggaataacgtttccaccgggaccattgcttcacaaccgtacgccattgaaaaaggcgagtggccggtcgtagttcttggggtcgtccggtaggcccataacactcttggcaattcttcaggccaattatttttgcaggccagtagctttttctttacggtgacctttaggattttgttgactgcttctacttgtccatttgtttgcggccttgccaccgcggagaagcttttaacgactccgtgttggttgcagaagtcagtgaactcttcgcaatcgaattgctttccattgtcagagactattttgtgaggcaagccatatcgacacactatgttcttaataacaaagtcgagtgcttttttagcagttatagtcttcattggctcggcctccgtccatttggtgaagtagtctactgctactattgcatactttaatcctccctttcctattggcagggacccaataagatctattcc

SEQ ID NO: 265007 - DNA, 1078 bp, Cannabis indica
gaaggatgtggagtatgttgttaaatctgaatatttttaatcttcagcagcttagtatagaatttaaagataaaagtatttttgtagcatattatacccccttttccatatttagaccctctctttgtccctcggactaggtgtcacatgttcgttgtagctcaagtagcccaagctattatactaatacccgattgagctaattttcgcggggtcccttttctgttttggtaatctctttcttatcttaatcatattcactttcttacctttcttgctcagaaggattttatggttctatactggtattttctcttgttcggatggaattgcctttctctcgttctatagtttggataatcatttcattttatggattgggggtatttctttgggccttcgctatattttacccctcaacggttactgcttttattgtttcaatagagaaggaaaatgagaacacagaattgggaggtagagatgcaaagaataggcaaattatgtaaaatttgggttggagtaaagaaatataattattaaagctttgaacaatattgcatatgatagaatgattaaagctgtgagtgtgaaatataatatctaaaagattatatttgtaattaccatacatttataatcttaggtgaccaaaatgccattaagtagatttgagtcataacatttaaaaggttgtatttgttatgccagccacaaaaaacactccatccagtcacgaacgactccaccaaagccacctagccacggcacagcaccaaaccactcccagtcacgtccaacacctatcccctctccatttccatctggtattctatcttctctgtaaagtgattattgctgatattgtttttgtaatgtttatgtactgatattaattggttttatgagttttgtttttgtactgaataattttgtggaattagtgttacggtttttctgaatttcttgaccaagaatggcgaaggaggatttaagggtttacaattccatgactcagctgaaggagatctttgatcctgctcaaaaaggagtaaaaagtactgaccttgaaaagcat

SEQ ID NO: 265008 - DNA, 2568 bp, Cannabis indica
aaaattagccatcatactctctaattgttgatagaaggtttttgttagatagaagcaactcggtattgattgaaccaccgctttgagtaacacctctttaccaccaacggagaactgtttttcattccaatcatgcattaatttccaaacacgttctttgatgttactgaataactcttttttgtctcggcctgaataagaaggcaatccaagataacgttcatggcatttactaattggcatttgtaaagtctgttggaagaaagtttgggcagcaactggcgtattcggagagaaagacataactgatttcttattgtttagcatttggcctgaagctcggtggtaaatgtccaaggatcttcgtattgctaaagctaacccctccatagtttcacagaacaataggctatcatccgtaaaaaataagtgtgagactgatggtgcatgcctggttatgcgtaaacctcaaagattaccagccacttcctccttctgtagcaatctggatagtccctcagagcaaatcaagaagagatatccccttgtcggagacctcttgttggtttgacataccccgtaacttcacaattgagtgagaaagataagcttgtggaagctagacaatgttgaatcaacactatccatttgatatcgaagcccattttctgcatcactgcccaaagataaggccactcgacacgatcaaatgccttactcatatccaatttgaaagcagagtaacttttaccaccccttgtcctatgttggatgtgatgcacaagttcaaaagctactagaatgttatccgttatgaggcgatttgagagaaaggtgctttgtgatttagaaattaccagtgggagcgcctccttaaaccttatgaccaacatcttaaagatgagcttgtaaataactttacacaagcttattggacggaaatcagccataccacaaggagctttaatctttagaattagtgtaataattgaggtgttgatagaatccatactgtacccatcattcaagacacctagaaaaacttctgtaactattgaaccaacaatgtgccaataattctcataaaacatggcagacatgccatcactacctgggcttttgtcgggactcattgtcttcaatgctattagaacttctgttgcagtaagaggtttggtgaggagctcattgatttctacagtaatggaacatggaattgattctgtgactagttccaaggccttcaagtctaccatagaagctgaaaaaagatcagcaaaatactctgtgattatggttgtcattccatctttcgaagccactttgttgccattgttatccctcataaaatttattttgttcctcgacttgcgtgatgaagcatgagcatggaagaacttagtatttttatcaccactttgaagccaattcaaacgagatctttgctaccaatacatctcttcttgtgccaaaagatcatctaaaaagtcctctgattttttaagttcatccatgataggtgcggttcttgctgtggcattgtttaatctagaaacatgttgttgtatatgtgtgatttgtttcttgtaatgaccaaatttagaatagtgccactactgtaatgaagaagcacaagccttcaatttgtccaaaaagctgtcgatgatagtgccagactttgcattctgcaattgttgctgtctcttcgtgttgtagccatacttgctcaaatttgaacctattttgtccgctgctgctggttgacattatctttcaagttaatctcaactaatagagctctatgatcagagttatagtagtctaaatgttgagtagtgataggttcaaatattgagttccaatgatcattgacgaagcaccaatctaacatctctttgatagtgtccaccgaatgtcttccttttatccaagtgaaagggtcaccctgaaaaggctgctcattcaagtggcaaatgtcaagggcatgtctaaagtttcccatttgtgattcattgcgcaaagcaccacctgatttatttgtattggataggatttcactgaaatctcctataaccaatcaaggagaaagagttgcaacatctttgagtctttccaaaagggtccaggtgttggatcgttgatgaacattgggggactccataaagggcagaaaagtgacatcttgtgtaatgtgcaaagctaatataccaatcaaatacatttgcattaaaatttaaaagagttacatctacatcgtctttccaaatcaacattaaacccctcttaaacctactataggaacttcaagtccattattgaaatttaaagcttgacgaaaacaggaaataacattaggacctaacttagtttccattaaaaaaagtacatgtggggattgctctttaacaagcaaacggagatgacggaatgcactagaattccccaatccacgtgcattccaactgacaattttcatggttgattgcggggctgaacctcagcctccgcagcattatcgaagaaaccaactgaatccatagcagtcgaaacttcctagtttggatttcc

SEQ ID NO: 265009 - DNA, 559 bp, Cannabis indica
aatttgaaatttattaattatttaatttgtcatacaagataattttaatataatattttaaataaaacagacaaagttatcttttgattaaaaatatgttaaatatcaaaatatctaatcttataattaaataatatataaatattaaagaacttaacaaatttttaaatcttaccataatagaaaatatttaaaattggaaatattccaaaatagaaatatttaaaaaaaggaaatatttcaaaatggaaatatttaaaattaaaaatatttcaaattagaaaaatctaaaattgaaaaaattgaattttgggaaacaattccatgaagaaattagatttttgggggaaaaaaacccaaaaaatcgcaatttgtggggacaccattgaacccgattttccaaaaatcataactctttcaatttttatcggaatcgagttctgtaaaaacaaaaatcgcttaatttttcacaaggaatctaactaaaatattttcaaaaatagaaaattattttttatggaaaaaattcgtacaacatatacattcatcacataagcac

SEQ ID NO: 265010 - DNA, 1123 bp, Cannabis indica
atggattccaaggctgaggagtctctactaatccaaaccaagggaaccccgctgatcgttaccggtgatctttacaattgactcttgagagtaagtattgtcccttgtgaatggtggtttgagtcggatcattactatttttgttgactccatcgaaccccccccccttttttttgcttccgcagaaatagacatagatcttttgagtgatcttagaggtcctcctcaggctgacgaggaatctcagaggataattggtgtggtctcggatgaatccaggaggaaagttggcatggtttctatcagagaatccaaccaacccaagaccaaaacctgcaccggaagagatttgtgccaacttctctctggtatcgaggaatttcctgaggctgggaataaggtctcaactgcaggaaatgggatcttctaatgaggggaatgaggtctatgtagagtttgaggccctctacatgtagacggtctttctcaaactacgtgtagccagtctttctccaagctatgtgtagacggtctttctctgaagtatatgaagacggtgtttctcgagtttagcaaccctccccttacattctttttttaggaagatgacttaatggtttgcccctagtggcatttttgtgaagacaagtttgtaacccaacttggattttcttatcttaaataccttgtactcttttcatttgaacttaatacaattgtgtttgcttgcatttttattcacaacgtaaacaaatatattttgatcaaatgtacagtacttttggattttttcattactcataatcttcctgtttaagtagttagttatctaccaaacttttttattttggagcagttgtcaattctgcctcgctaaaactgttataatctgcctgaagcaaacttaaatatactttaatagttttatcactttgtatatttttaatttgcttgtatgaatagttagattatctatccattttctaggttcaagtacttttgtcaagacgccttaatgtctcgtttcatactttcctagctcgtgagaaccgttagtattcagttttatacgcgagctataacttttgattttcttttcccgtcagataggtttttaatcaaa

SEQ ID NO: 265011 - DNA, 656 bp, Cannabis indica
ttattttccagccttcgttgattgtttctcattcccaatcgagtactcgccattcttggttgaatactcgtacttgtctttacacataaatttcttcttgttattagcaatataatataatttggtgttgcgaaattcactcgacaacaaaaacattgttttggattctaactttgtgatccgggctaacagaacatttgatgctatgcgggagtgttgcatatttagataataatttgattggcactataaaccttatgaggttatgaccaaatacgattgtcaaaaggttagccatctaatttttacaatcttcaattttgatttttgtcatgtagtagcaatttgtcttcaaatattacaattttgcttgtttttattttatcatatcataacatcaatttgtttttgtgggcatttagatggcttttcatcttctacaactgcatatggccaacccgaaaagatacaatgtgttgaggatttccagttgctttgaatccatatatggaagaacaagatattgtgtcatgatgtttcttttgagcttcaaaagatgagttaacataataaaaaataattaagggtgcgtttggaaagccacattgtaattggatttgtgtgtaattggaggtaattacacaatttggcatgtt

SEQ ID NO: 265012 - DNA, 1052 bp, Cannabis indica
gaataaacctcaattccaaaaaatcatatcttcttaactataatatgcattatatgagttttttttttttttgtaaaactttcattaatataaaaacaacttcaattttcactatagagttaatattctatagtaaactttgattaattatatatatgtatatatatatatataaaagttaatattaggtaagggttaattttaatatcattaataaagaagatttgtagtataataaataaattatgacttccaaggaactattcgtcatgattaatttggatccatgactttgaactactttacaattttcactatagaattgaagtgatttcaaccccttctagaaatttaaatggattatttgttatatactcacactaaaatagtttctaagtgcttataataataataattattattaatataaataataaatatttgcgataaaattacttaatattttagttctttgtaatgtaaatatattattttttatcgaaaaatatgtatatttttaaacaagatgtgtacttttaggtcatgtatcaaattatattttgtgaaaatttaggacaaattgtaaaaaaatatgtatatatatatatagaatctaaatcttttgaaaacatgataaatatcaacaatgtttgcatttgattacttgtaacttttttatagaatcaattcttgtcaataaaaagatgccctttttagagatatatgcctaattgtgtaaaaaagaaataaaagtgttatctcttcattcttcaatagacaataatgttagtgcatataatacaagaattgtttagcctatgtttcaagtcaaagcatgcccacctaagttaaggtaagttatgtcatgtctaagccaaccactaaaataaaggtgacttttttaataaaaaaaaatgtaattttattaattaaagataaaataacaccacaaattatatacacaaattctaatttaaccaaatgccataaatggcaccccctaggacagcataaaaaatctctatcaataaccctcttggcttttttacatt

SEQ ID NO: 265013 - DNA, 2027 bp, Cannabis indica
atgactagtctggtttggacatctttgcattttctatgttagcaagcaaaacatgagttgattctatgtctccacattttacagattcatgacatgagaagtcaagcaattattgtttcagctccatttgcttttacactaggcattttgggatccctttttgcaattatcctaggtaatcaagcttaatgaaacaatcttttaagcctcactcatttctggtatcttcctgcattgtctcattatttcacatgtttgtttaacagcaattaaggaatatatatggacatatgcagctcttgagtttgcccttgttgccatcatagttcacttattttacactctggttagtactatttttcgagcaataatttatatgcaaaccacttatgtagtcttgaatttattttttctctcctacaagtattgataaccacattttgttttttgtatttttaacagcttcatctcaacgctatatatgcattattactggcttcaattatgggttttgggatagcaatgggggtgaactcattgtatattaagtattttgcgtggagggttagttctggtgcaaacactaatccagctgctgaaaacactaatccagtttagatgaaattcaagcacaatccaaattagtggttatgtagttgaaccattgattatgagaattattatacttaatcatgtaagctaaagctatgccgttttaccaagtaaagcagtgagatttttttttttatatattaatcagagttaagcttgtacatgagaaacgacaaatcatataaagtgaataatgttagaaaaaagtcattttcaatcaaatattactatttaatttatacgttagaaatttcttacttgcaattattcaaaaagatgatttacttgagcattttggaaagggaaaagaaaaactattatttatgcaaaaacctatttttacaacaaagacgaaggggaaaacaatacaaggcattacacactaaaacatatacaatatatgcactaagaaaaagagggcattgatgcaaagaaacaaaattcaacttgctttggttttattcacaggaaggaacttgctgccctctttcctcagccataatgtagaacgagttttcttgacatgatttgtgaatagcttgtacctgtcataatcaatgtgcaaattgtttaataatattgcaaaaaacaactgcagatagtataaaagccctatttttttcatctaaaaagtcaaatgtctttaatgtaataacaaacctttcatactccaacttctgagtaacaattccgttcagtaacagctctgaactgtaaattgttgctcctgtgagtatatgacaacattgtattactatgctggccttttattttattttggttttcaaatcggtaaaaatgaaatatatggatattattccaaacctttttcaaggaaaggcacacaaattgcatagtcttcttcacaagatagaactaacagatcatctggaaaggcaccatctttcagtgcagacctgcctatcctctcaactgcctgttaggggcatacaaccaaagactctaaaattatgtgatattcgatcgaaaacaggagcaaagtataaccaatctaacaaagttttagtaaggctgcatgactagagaaaacacacacactacaaacctggccctgaactgccttcaccagatttgaaattatttctactccaggctttgtgtttggggtaaccaagactctcaagccctgaaaaaaaccttttccggtgaataaaataaatatttgataaaaaagaaaaaagaaattagaaaaagaataaacctgtaatattggatgctgggatgcacatgctaacgaagccggcatgctaaagccaatttcctttcttttttcgaatctctaagaatgtatttttctcatctaagaaacacttggcttgaccgcagttgtcaatccataacgatgtcaccactggtttaccagaagcaatagcctctaacatattccttgtgcg

SEQ ID NO: 265014 - DNA, 5777 bp, Cannabis indica
atatatatatattatattttggttttattttaaaacatataaagactggacataaacttttgtaaatcgctcaactcaaataattcgctcaaatgaaactgagataacccgacgaaaaatacaaaccgaaaaatccgacgaaaatataacctgcccaatctttatattgggttggttaaaaataataacaacccgtctaatcaaccggaactaacccaaacaatccgattaagaggatttttatatatttatatatcatataatttatatgactatttaaaaaatataaagttcaaactaatatgtttttttatggtggttaatttgaactatatttgactcattattacaattaactaaaatataacaattgaatgtaaaaaattaaaaaaaataaaaaaaatattaatggtcggtttggacgggttaatccgaccaaaccactaatttcattgggcgggttagtactattttcttttttcttaattggatgggttgcacatagatttttgtaagccgatctttacattgggttgaatgaaatataacatgaaccgatcaaaccaactaacgtacaccccatatatgaattattcaaaataataaaaataaaaattttgatttgagaagtaatacttttttacaaaaaaaaaaaataattaacataatggcaaattaattattgttggattatattatttaagaaaatatagaaaactatagcacacagttttatgtaagccattttcatttaattttttttagtacaattatttttcatttaatcgaatgagaatagatttaatgaggtgaaagtatttattttttatttatttatttatttatttgatgtaaaagtgaaagcattaatagtggaaagtgattttggagaatacagatagataaagaaagtgacggagagtttaaaaagttaacagatgagtgagagagcagaaaattaacatctggcatttatttattggagggacagggatgggacaggaaaaattgggacatacgatttttttccaattatatgaattcgtacgaacgagagtcacgcttacattcatcgcggttgtacacgtgtgtgaccaaagatgaatctggaccgtcgattgtgttgaatttattaacataggtgcattctcgtcttttcggtctagtcgaggtaagagaatcccaaacgggtggtgtttttgtggactcatggctctcattacgtggcacacttttatgggatagattaatccaagcttacctacacaacatgaacctctctttatttaagcttagtgatacttcaaatgctgtttcccgcgagttcttgcccttgcaactggaaagctggtgctatggctaaaacaaggtaaaaaattcatggaaaatctaagtctgctgctaagatctacgaagaagaaaagtgggaaggtggtgtttgatgcaattcaaactagtatgatgaatcaatttacggaaattaacccctggaaatgtcggatgagatcctgctcttgtggatgtctttcaacctcctctatcccctaaatcttcactggaagcgattcagaagcaagaagatgttaggaatgactttgtgcagttcctcaaagcaaacgagcaatgtaacagtgaaattgcacaaggtaagtgtttgattccttcaatcttgcgatctagttctgtagttcgtaatcttgataattcttttcagaattctgagcatcgaaatagtaaggtgaagattactttggatgatattgaggaggaaattttgttttggaaaccatcgattgtgtgctatgttctaggagtgaaccctccattacacattcttgaaggatttgttaacatgatatggaaggataaggttgatcgagtgaagatgctttcttatggcatttttataattcgtttcagctcaatggaatacaaagataagattttgaatgggggctacattttcttcaacaggagacctgttataatgaagccatgggacccaaatgtaaattttaagaaagaagatgtgcagtgtgtgcctatttggatccaattggaggatttagaactgaaatattggagccaaagatcattgttaaagattgttgggcaactagggaagccacttatggtggactctgtcactaaggaaagggagaattgaattaccccagggtgctagtagaggtcttgatggatcaaaatctatcaggtttgcatgattttgagaatgaatttgggatgaatacgactgtaagggtcaaatatgaatggaaaccagccacttgtgctcattattctagggtaggtcatattgctgcaaattgtaagaaaagcactactggaaaacaacaatgggttattaagcaagataataggaatcaagtgcagattgatgaagaggggttcatgaaggtgtttaaagctaggaaaatagatgggaaaggaaaatcagttactaatatgaactcagcagttaatagcacagtggtgaggaactctttccaagcacttgatgtggaggaatcggctaatgatgcaggggagaatttaatggatgatagaattaagataggaggggggagccctctctctcaaatggataaattgttctgttggaatgtttgaggagccaatagtcaacacaaacaacaattaataaagcagtttgttaatactcaaaaggttgactttgttgggcttcttgagactagggtcaaggctccaaaacttgggaccttgtactctaatgtgtttgaaggttggtgtttctcctctaacattgcatggcatgcagggggaaagattgttatagcctgaaactcttggaggtttactgttgatatcgttagatgcattggtgaatttatgcatttaaagatttcaacagtagaaggtttcaacagtttcctaactgtggtgtatgcttcaaataatcgaggtgaaagaagtcttttatggaaggatttgtgtgagttggctactgttgagaattgatttctaatgggggactttaatgacattctagccaaagaagagaggatcgggcatagagtaaaatcttaccctgattttgatttcttgagatgtgttaatttttttcaattagaagatgtcaaagtaattgggaattttttcacttggacaaataaataacctggtgaagatcaaattttctccaagattgatagaatcttggccaatcaagcttggattaacaagtttgaatttgctgaagccgtgtttctcaatgaggggttatttgatcattcccctagtattttaactttgtatcctggtttggtgagtgggaaaaagccttccaaatactttaagatgtggaaagcacatccaaagtatgatattggcttgagggaagtatgagacctggaaataaagggcactaagatgtttcaggtcatatctaaaatgaaacagtttaagatcggacttaaggagataaacaaggagggattctcttatttacagagtgttgtcagtaggactaaactggaattggatacactgcagagccaaatacaacaacaaccacttgactctaatcttcacttgcaggagaaggaaatcagagagaaattgattagagtgcaaagtgactattcctccttgcagcagaaggctaaaatagcttggattcaaaatggggactgtaattctgctctttttcatgcttgtattaagcagaggttgagacagaatcgaatcctctcaatttagaaacaagatgggagcagagtgcatgatccagcactaatcactgaagctttcttagatttctataaagggttgcttggcaccaaaatggagaatagaagacatgttgaagacaacatattagccagagggcctacggtgacacaagaacagcctgatttgttattacaaggattttccaaagaggaggtgaagaaggctgtgtacagcatacctgggaacaaatctccaggtcatgatggattctctagtagcttttttcaagataattaggaggttataggggatgacatatgtgaagttgtgctatcatttttggagccaggtaaaatccttaaagaaattaattctaccataatcactttggttccaaagattaaatgtcctaactctgttaaaatttttagaccaattgcttgttgcaatgtcatctataaggttgcaaccaagctcttgagttctagaatcagcaacatcctccctgatataatatctcactcccaaggtggttttattaaagggaggtttataaggcataatatactgatttgtcaagatttggtgaggcattatggtagaaaagctaataagcctagttgcatgatcaaattggatctccaaaaagcctatgacactattaagtgggatttttttggaggagatgctagcagggcaaaattttcctagaaaattcatacagctaataatgaactatatcacaacccctaaattctctctcatatttaatggaacccttcatggtttctttgaagctaaaagaggacttagccagggggatcccatgtcccctctactgtttgtattgggtttggaatatttttctagactaatgaggaagattggagagaaagaggatgtttactttcatgataggtgctttgagcttaaactgaatcatttagcatttgatgatgatgtgctactttttctgtcatggagatttcaaaagtactatatacatgctgtaggctctaaaattattttccctcacatctggactgtaacctaatgcaagtaagactgcaatctattgcagtaacatgcagcaagattatgtgaatcagatattgcagttttctggttttatgaggcagttcctgcgtttcacatacctggggatccccatctatgcaaagaaaatctctgggaaagaatgtgagttcttggctgaaagaatgacagctagaatcaagtggagctcaaggaacctttcatttgttggaagaattactctaactaactcggttcttgttgttattcaagcttattggagccagatgatgatcatgccaaaaaaagtgctgaagtccatagaggtaatctgtagagcttttctatggaaaggtcaggctttatttcatggagctggggttgtagcttgggaaaatgtttgtcaacctaaatctgcaggtggtttgggaataaaaaagttagaggaatggaacaaggcagccatatgtaagtatatttgggctatttcaaataagcaggaaagtttatggcttaggtgggtgcatagtgtatatatcaagaagcaggagtggtggagctactctgcttctatccattctagttggtactggaagaagatggtggctcttaaagatcagataaaaaacatagcagattgtgctaaattccagaggcaaagatacaccattgcagctagatacaagttgttcactcatcctcaaaactgactgttatggtgcaatgaaatatgggctagactgaacacaccaaaacacagtgtaatattgtggttggcaatgctcaatagattaaaaactaaggaccggttggtcaaatatagtatccaagtgaatgagaaatatagtctttgtgatgttcaaaatgaaaatggacagcatttatgttgggatcttatgccctaaataaaacccattacaatctaatctgatttgttatcaataagattttagaagtgatttatattaacatgtagttttcatgtttatggtttaatatatatacaaaatctgttaagtccagaacat

SEQ ID NO: 265015 - DNA, 589 bp, Cannabis indica
ctccaccgtggaatgaacgtccgatttagaaaactctccctcactaaatggctcaagttcctttatgagggtattcagaactactgctatcattgtggaaaacttgaccacactttcaacaagtgtgacaagtttcttcatcactgtgaccaccacccttttccccccagtttaagctacaaggatgccctacgggcccctgccaaatccatttataagaagagtatctttgaattgtccaactccatcccctttgaggaacaaccatcccttaccaaccttgatcaccataaccctcaagaccaaacaaatagctttctcgtgaccaccgtgcctaccaccttccctgctactgtagcatcctcatcaccctctactttcatccaacacaccactgatcccactcccaacactacctatcccagtcagcctcaaacggtcaaccccacactccactgcactctaccaacacaccccatcatggctacccaccacccattcctaccatttccaaaggcaaagcacctactgtacccacaaccctccctcggtttctactgaacagtccgcctctctccagcctcacatc

SEQ ID NO: 265016 - DNA, 627 bp, Cannabis indica
ttttgtaagtttcccaaattaaattatgataaaatatttttttgttaggaaattatgataaactattcattaagataagtggtaagttgaaaaatgcctcttttattaatcaattaactaaatttgcctctaattttatatttatttgaaacatacctctttttatatgtattgtacccaaaataccctgacataagagagtcacatggagagtatcttaaagtgacagggacaaaattggtataatgattaaaaaaaagaggtaaaaatgatagactttaaaaaaaagggtaaaaatgaaagagaacaatataaaaagagtatagagtgtaatttcctcttaagataaagttttcatttctgcattacaaacttttggccaaaaactaaaggaaaatcaacacagttagacctttccaattttatttatttattttttttgggtcccttttttggtaaagcatttagatatttgaatacatatttgaccccactgcacaaaaaagaagaaaaagaattagaaaaaagggaacaaagtacgtagaattgtagaaagaaggtttttctttttttttactttttttttttgtttttttggttcgtctacattgctatagtctactagaa

SEQ ID NO: 265017 - DNA, 1069 bp, Cannabis indica
agcagttggctatttatagcctttgtttcaggacccgatcctaactgtcataactgacagttaagtaaagcagttagggtagttaaatgtccttgtccaaagataaatattcttctattagtggccaaacatatcacatggtttcattttgtcaagtaaaatcctctataattaactaagagaaatgctagaagagactaagcaccaagtaatatatattatatatggttataattacattaatgtaattaagtatagctattgcacataatttaatataatattattaagaaatatcactatataataactatttaaaaggtatgatataaagatatacatatgtatacatacatagataatctagtaactaggtactcaaaattgacaattttcccgctatatattattaatgcaacatggtttcatgactatgcatcaatcattttcgtattctaaatttccaacaatattaaagcaactgtgctattttatggcaaatcatcaatgcataaatatattgtgatggcctaaaatttgtttgtttattttcgttttttgaagcaaaatgacctaaatttaagcgacaaaaattactttaacaatggacaattgtcacaactatttatttatgtgttccaattaaacaattaatatgaagcatataagaacacagctatattaagaaccatcaatattgttgaagacgtgtgaaacaataataaaagtttttaaattcgttgtcagccgacgtggggcggcaattatataccttgggaatatattggatatggtttaaaagtcatccttgttgtcctatattatcaccacacattccactacaagaaaagattaagtaattactatgtaatatatatatttattattaaaagagatttacagtacaagaattgttacttcatgcatgcttgatgtccaagagtacgtcacaatttttaatgctgaagaaaatgcatattatttgtcgctaggtactatttctgcgtgtcgctatatcacttcttgaataatataaaaaattagataatatattaatataaataaattt

SEQ ID NO: 265018 - DNA, 1023 bp, Cannabis indica
tgattcaacattagtggatcacaggggtacatttctgttagggtacaacaaggcttgtgagatacaagggattggcacaattcagttgaagaatcatgatagaatcatgaaaagtctgcaacatgtgaggtatgtgccagatcttaaaagaaaccttctttctattggaatgtttgatagattaggttttgttgtcaaaattgagaatggagtaatgaaaattgaccaagggtcagaaactgtgtttaagggaacacttaagaatggtttatattttttggatcaacactacaacagggagtgatgcacctgctgtaaattcagaaaagctgagtcatgttaagctttggcatctcagattagaaaatgttagtcaaagaggacttgaggagttgaataagcaaggtctgttcaagaagaaattgatagaaggacttgagttttgtgatgaatgtgtgttaggaaaagcctgcagaatgaagtttcctaagactgagcacaacaccactgaaaagcttggttatgtgcactaagacctttggggaccctctagaattcaaaccaaaggaggagctcactatttcataagcatggttgatgatttcagtagaaaagtgtggattcatatattgaaaagcaaggatgaagcactacctacctttgacacttggaaaaggctactggaaaatcaaacaggaagcaaaatcaaggtattgaggacggacaatggccttgagttctgttcaaatgagtttaatgagttgtgtagcaggttgggaatccaaaggcatagaacagtgatcaaaacacctcagcaaaatggtgttgctgagagaatacactacttgaaagggtaagatgcatgttactgagtgctgaaatggacaaatcatttatgggagaagccatcaaaactgcatgctatttaatcaacagatcacccttagtgcctaacaactttaacactcctcaagaaatgtgggcaggtaaagctcctaacctagaacatttaagagtttatgg

SEQ ID NO: 265019 - DNA, 1691 bp, Cannabis indica
ttttatacatgtgtgaaatagaatgttttaacctttgtttttgatggttacattttttcgtatttttcaaaattttgtaagatgtcttaaataactacaacatagacgaccatagaaaaaaattagactaaaaaattctccctgatgacgaaacaaaatgcaccccttttagatttggaagctattgaattcttggccagaaagacttttctcaattgatggtaaagaagtgctacttaaggttgtggtacagtctattcttacatatgatatgaggttcaattacctaagaaattaattaatcaaattgaaaaaaatgatgaatagtttctggtagggatcaaatgttatgggcacatgaataatttaggattccgaaattttgttaactttaatcaagctgtactagctaaacaagcatagagaatcttctcaaaccccacttcaaaactaagatgtccaaattaaagagtttagcaagattaaataaatcaaaccaaccttgagtaataagttctctatcaagtcaaatcttgatccattcagtagatatcctcgacccttctcccaagtgaaaggatgcctaatcaaatccaaatcaattaaattacactctaaatcacctcttaaaatctcgttagcaactagtttgtataaggatttctaccccttttatcaatctgactaacaatgttgttcatatcttcaataacacaccaatgcaacttagaattcgcaagattacgaattaaatcccacatattcttccttaaccctctattcggctccctatacaacctcgtaagtcgaaattcctcctgtccatctaaacaaatcaccatatcaatataattaacaacataatgaataaggcaagcctcactctcaaaccgccataaaaatgcgatacccctactgcaacccacacaatcaactgcgacacaacctttaaaccccaacttacgtttaaccatcacaactcgatctttttgctaagtgtctcacaaagaagcaaaaaattgggcttatagtaatatcccggaggaattgaatagtctatgggttctcgcaagcccacaacaattcttgttaaaaatgctcataatccttggtgggcttggtatcccgagcctaccctattcaagttttttgacagcccactaacttcatgctctccctctcagccgcatctcccacctataattacaccaaccctaccatttggaatctcaagttttttgacacctataatttaattatatttatattttttttatttcaaaatttatttattttcctaatttcatattatttttaatttacgtggaccaataaaattgtgttacgtgtacactatgtacactgtgaacacgagtttaggagattttactaccaaaattttagaattgaaagttagttgcaataaactaaatacttatagaggttatgccgcaaattactcaaatatatataaattaggttctaatttttcgatgtaaattcgcctgttggtttccaaagagatgccatttagaaatatttataaaatatccgatccaatttaatctgcacaatctaatccaattcaatctgcaaagtgcgaatatctgcacttgtgcggattgagttagattaaaaaattcaacatccatacttgtgcggattagatattaattgatatgtaaaagtaa

SEQ ID NO: 265020 - DNA, 637 bp, Cannabis indica
ctttttttttttttttttttatacaaataaaaataagaatttaagattcattcacataaggatcgggtaatactaatacgtactttttacatataaaaatattttttagtataaatttaatttaattttattttaaaaggattactaattacaatttttagttaattttcacgctcgaaatcacttgccgaaatattttcaattttttttttataatgatattcgttatataattacagtatcataaatttttaaaaaatttcgaagagtttacaatgtcgaaaatagaatttccgatattccaatttatcacgcgattgttcaaaaaaattcaaacatatttttgacattgtaaattatttgaaatttttcaaaaattcacaggaaaaatgttgcaagcataacgaacactgcaatgaaaaaaaatattccgtcatgtattttcgagcacagaagttgagtaagaaattataataagagattgatagtagcactcctcttaaaatagatcaaaaacatttttcatcaaaagttattttcaattgaattcaaaaaagataaaaaaaaaaaaaaaaacaaaaaaagttaaatctaatttaataaaatagagcattagtatttattttaattgatctaa

SEQ ID NO: 265021 - DNA, 640 bp, Cannabis indica
gaaggggtcgcacgcacccccacacacctcgcctgtgtgggcatggttggaaaagattatcttcaacttccacttggatctactttggccacgcgacttggttcgtgctcttgtcggatctggacgaactctgaccaaaaaatgcacgaaaatgacagggacattgaggggttttgatcggatgagatttctaagagatctgtactattaatttcaagtataaatgcatacacaatgtaaatgttgtaatttaatctgaaaatttcaaaacaaaaaatttaacataaaacctactaatttttcgattaaatcaggaatttaaatatgaagcaacattataaaacgatagaaaatcatttatttataatcaatttcaatttataatcaatagaattaaaaaatccaaaattaatttcataatgaaattataaaccttaaaactataaacataaaattctcataaattatccaacgaaatttagcatgtaatatatcaatataaagataatttcatgaacacacggataataattaagtatacatacttgtagtggccaaaaattattctaagcccaacaaaaaaggtccaacgatcaaagtacttacaaagcccacttataaatcagaaataaggaacctg

SEQ ID NO: 265022 - DNA, 533 bp, Cannabis indica
gttttgatttaagggtatcggccaacctaaatggagaaagatcaacaatctcaggccctatgtcacaacaacaaaaagaacgattaatcatttgacctaacccgttctaggtccttaattcatcaccataagtcctcttgtaggtcactagggtaccaataccctaaacattgagaaaacttgaaaaataggagttctaaacatcatcaaaaatggtaattaagtcgtttagaaaatagactatttttcaatgtttcctagtagggaaaatagtagaccgttttttcaaaaatggtttgctgtcttttataggaaacatgaaacctcaagtttcaaatttttaaaattctaccaaaacctaaccaaatgtttccagacttcacaaaacaatcatacaacatccatacaataatctctacatgacagaaattaacactactacaaaccaagcctttagaggcacttttttttagcaaatattaaagaaccgacgacatagggttggaattttttagaagggattttgacaccac

SEQ ID NO: 265023 - DNA, 565 bp, Cannabis indica
atgaatctggtgtgaatcatttgatcaatccatagcgttttaaattctctgattcggtcatggttttagaaatctcgccaggtggcggtttaaaccaaataaatctgtataattatatacatatacttagtatatttatttaaaatgaaatgttgatatttgatattgagcttatattgttacgataataaatttttattgttacttatgtattataaacctcttcaaagtaaaaaaaaatactaaaaaagtaaacaattattagaaaaaaaattagaataactacgaaatacaaactatggttcgaaccaaaccaatctattttttagtggtttgatttcatttggtttgatcattttattggtctggtttggttttgaatttttaaaatcataatagtggtttagtttcaaaaaattgaaaatttggaccaaaccaatccataaacacgcctacgtaaaaatataaaaatttgacaaaaattaatattttatgtaattattcctaagacatgttctatatgatttaatgattgtatagtactccaagtactagtaggagtcaa

SEQ ID NO: 265024 - DNA, 804 bp, Cannabis indica
taatttttcataattattaagaaatgaataaggacttaaatataaaataattaattattaattattaataaaataattaattattaataaagtaattaaatattatatataattatatatgtatgtgaatatatattaatatacaattgattaattaattaaattaataaagattactagttatttatttaactatttaatcaagaagatgatagtgtgaatatctatttttagtttaattagaatttaagtgagatctaatttcagctaaatacactcatttattatatttaaaaattaaataaatatttaaataaaatctatgagtaacctatataaggaacattaaatttagagttgttagagaggttacaattataattttctgacaacagataacataggaaagaatctctcctaaatggatgaaactctgtcactctctctcctttctttagtcatctcatttgctgagaattgccgacactggtctcggtgattttgaggtgttattgtggaagactatgtaaaaagttaaagttcgattcacgttcttgacaataccctgctacataaaggattcaaggatttagaaaatctaaagaaaggagccattgcgttcccactgtaagtatactcatacttaaggtgtttaatttctattttataatgcatattctagttagtctaatatttaggttaaatattaaaatacacgattataagtgagaccttggtaaaataattcaaacaactggactcaaaatctttggtaatgttttattttctatgcatgaacatatt

SEQ ID NO: 265025 - DNA, 577 bp, Cannabis indica
gagtttaggtagtttttgccgccaaaatttcgatttttgtggttaactgttacaaaccgtaaagttcatgtggtttagccgctactatccttttttttaacatattcattacagttttattttaattatgtggcttatagagcaaatataaattatataaaatttaaatctcaattattcgagtatctatttattttagagttattaacgctcaacctccttgaactttggagtttgggacaatcaaccccctagactgaaatgattagggttgaactctgcaatttacaaaattattttgtctctgtacacctttcattggtctggctctgttatttgccagatggctcctccatgacaccaagttaacattgtcatgtcatatgccaccctccatgtccgatctgggactaattaattttcattactcattatgattaagatgaaaaattaagaaaaataaataaaataaaaataaaaaaattgaaaataaataaacaaaaacaaaagagaaaatagggtcgaagagagaaaagaaatcaggtgccattattgtgcgaagaagaagaaaatggtg

SEQ ID NO: 265026 - DNA, 1217 bp, Cannabis indica
gggctcattatgacatacacatgtagacaaaagtgagtgaggcgataacagaaattgcctattataaaaagaaacttattactaatgagataagttgtaaagaaagcttttcctcaaccgaaatacatatttcagcatatatggactgaaaaaaagaatgaaaaagcgatgttgttctagattgttcttgattagatatcgactctttattatagcactacacctatatacattgtgtgcaaaaaagccctttataccttcctaaacctaccatatatgatatatcaacatatatatatatttcagcatgtgatgatatctcacaataaatttatatgggcaaaataaaaattgtttggccttattgagtatgcatgcactaattgctaaccaatttttcttagtttctactaataaaatacggcatacacaacaagatctattgattgatcatgaaaagtatttaatttctaagatttcacccaaaaagttgacaataacctcttatctaattcctacatttcagaaacttattatatatttttttgagtactgacattttatatatataagcagttagatttgaggagattcagctcacatgtgatgggtggtactattgagtatctttttcgatttctcttatttgaccaaaaaattataatgtttataaagtaagacataatttgatttttggtatcttgtccatgtccaagttcaaccaacttacacaacttgattgtttccaaaacttaattaaaagaaaacattaaagattggagtctattgctataaatggttttaatgagttggtactgtttattcagttattattgatttccataatgtttgtgcattcgtaatcaatacataaattcattaaaaaagaaaaaaaaaatcaatatatatattgtatcaaattaagctgaaactaccccatgtagtaattttttctgggggatttttaagctatgaatgaatggagttaatggagtgttaaatgaatgtatagaaattggtaggtgatgaatagcactatagttttagaccaaaaaaagtcagtatccaattatataatcacaaatgtaataaataattgaatactgttcgaattatatattcatgtggtgtgtaaagtttatcaccaaaccaattactttactagtgcattaaaatttctaataaatcaacattgtacatttatttttattttattt

SEQ ID NO: 265027 - DNA, 513 bp, Cannabis indica
tatataatattatttaagttttttttttttcatgtattatagttactaataatatattatttttttattaatattaaagttaaaagaataaaataattagtttttgaacaattaatttgtatatttgtagttgtaaaatgtagaataatatatttatagaataaattggatcatttttttttaaaaaaaaagttcggtttgggcggtttaaaccgaccaaaccgaggttcaaaacggtcagttttaagataggttctggattggttcgtcggtttttagattgcaccaatacagatcaaaaactaaattttggattttcatacagaaaaaaaccaaccgatgctcagccctagtttaattcacggatgatgtcattatgattaatttagactgagtttactagggctgtacatcggtctgtttgggcggttcatcctatatatgttctaactcaatctaaagtttgggttgctaaaatttaagtgtaacccgcctaatttaaaaaaaaaaaaa

SEQ ID NO: 265028 - DNA, 7096 bp, Cannabis indica
tgcccacctctgtgtgtggaccattttttgagatagggaaaaccataataggcgtttgctgggtttggtttaagctgaccaaaatatcaactaattgaagtaacaaaaaccaaaatactctctacttaatcaattaaggtagcctaagtggttgaactgttagttgatcaagttagttttagttggtacaaatacaatgataaataaataaaaaaacgtgttcgtttttttttttgttcttttttttttaaaaaaaaaaaaataaataattaggtagtgaatttaattttgaagtaattaaattacatcacaggttgtgggatcaaactcgcttgtgctggtttcgctgtgtttggtatcgattatgagggtcacggacggtcgagaggggccaggtgttacatcaagaagtttgataacatcattgacgattgcaatgattttttcaaatcaatttgtggtatatatatatatatatataaaagattggagtcaacattatataaagatcttaaataaataataatgtaataattgaatgatgacgtggcatgcagcaacggaagaatacagggataagggtaaattcttgtacggagagtccatgggaggagctgtggctcttttacttcacaagaaggatccttcattttggaatggtgctgttcttgttgctcccatgtgtaaggtaacaccacattattaatgtttactttggttgtcgttttgggtttaactcttgttcgtttgttgttagatatcagagaaagtaaagccacatcctttggtggtgaatgtactgactagggtggaagagattataccaaaatggaagatagttccaacaaaggatgtaattgattcagctttcaaggaccctatcaagcgtgaagaggttaaaatttactgataaacaacatcattactaagtacttttagtcaataattcttccttactcgattggttaatgagtgcagataaggagcaacaaacttatctaccaagacaagcctaggctgaaaacagcactagaaatgctcagaacgagtatgagccttgaagatagtttacacgaggtatgtctaatgtctctacactattaagagctttgtattaagattggaaaatccattgttgactttttttctttttcagataatgatgccattcttcgttttacatggggaggcagacacggtaacagacccggaagtgagcaaagcattgtatgagaaagctagcagcatagacaagaccatgaagttataccctggaatgtggcacggtttgacatcaggggagcccgatgagaatgttgagattgtgttctctgacatcataagctggctcgagaagcacaccaacgaacgagaccatatcacgagcattcaacgtcctattcccgcgctcagcaatggtgtcgtgaggcttgcaaccacagcctctgtgttgccagagaaagtgagcaaaaaaccgcggacacattcacctgtgaggtatttgtgtggactgaaaggccgccgcttgcaacatcactctgcaatgtagctcttgctcttgttgtattgaatatagtaaactaaactcaggtttataatcagatcttttgtgctttagatatactggacttaaattatcatcccagtgaaaaatgtattatgtgtaatgtactcgagctttcaaccaaggtttgagaaaatgacaagagtaactatgaaaagccattctagcaaaacaagaaaataatatgaaagagagtcaatctgagtgataaactttgttttggtatttttggcttttggtttatttcctcaaaaaattattaactaccactgaagtaaacaatgttctttcattctgtttgttgggcttgaagctcaacttttgtcccccaccttttttcaaaagtcaagagtagctatacagtaggaagaatgtgtaagctaaataccataacaaggaattttaaaaatcagaaagctcatcgtctattgaagcttaaagagggtaactgatacaaggttacaaaagatagacgtaaaacaaatgccaagtggaccacctaaaaggatctattccgaacgataaccaatatagctgtgctacctcttctgctgttactgtatcttttggaagtaggggaaaagctaggagtactcttttttttctagtaagcaaacaaatttctttcccaggtaccacttcaaagtataaatttccctcaaacttgggggattaagccgttgtggacgaaccaccttccttgtggtcaccaaaaatgcgttgacgaaagtccttgaccataagaggaagacccttgcgaagggacacctttggttcccagcccaattgttctttagccttggtaatatctggtttccttttgtgtggatcatcctctgtgttgggcctgtgctcaatctttgcatctgggtcaatggtttcctggacaacctgagaggatgaacacatatagaacgtggtgttcagatttcaggatataatataagtggtcagagagtacatgacagctaaatagatgaatagctaattacaaaacccactttctattttattcataattaaaactacgaaagtcaatgttattcttcatcttaaagagatcttgatgccaaaaaaaaaaggcttatctagtagccgacccgagataatgtagaactactacgagacctgttcctaatatacaagctggtcttgactatatctattgcagttggatctgacaccgtctaccaatattattataatgagattagattgctgaatgaactcatacaataaataaatatgcatcactgatgacaatgacagatatatcaccaacaaatggaagcgcatggtcaacgggagtaatgctcttaccttggcaagttcaagcatggtaaattcaccagggtttcccaaattgaaaggtccgacatgttctccttccatgaggcgcataagtccttcaacctataatgacacattttaaaagtcatcagcttgctacaaaactaagattaaaaataaatacaaaattgctgcgtaaaattcttccatagataattacagaaagacagagaagtggaatcactcttccaattaattgtcccagcttcgattaatattaaaataacacacacaaccctgcctaccaccaaacaatgaaaatattcttttgagcccagccaaaatggacagccctattctctacaacacatcagtaatcagaagccatctggtgctcatcatcaatggcattaatggaacaattactttctagcactaaattagaaataaacccagcttcattttctagagggagaaaaaaaaagtcagttattgaaaaggacatctatttattaccatttgataagaactttcaatgcaaaacaaatggtggtatctatcaacctacggtacaataaatatctgggaagggatggacccagacaacatttcaggaggtccatccctctgggccacatgtagctaattgatattggctctatagaggaatagatttacgacaatgcaggtttaaaaactggcgcaggttgtaatgtgctatgcacatggaaaaaatataaagaaaaatgggtgtcagaacctctaaagagtttcaaacttgcggttcaattaaccactccaataaaaatcttatcttcaagctagagtggcggtttttacaattcattaatctcatcaaaaccaatcatatgatatgaaaagaagcaaactaggtttggccaaataaataatttttctttttaagaaaaaagtaaagcaactaaggacttggccgggcaccaaaggaactttaaagagaaaaaaagaaagaaagagattgtaaagttgtgtaacttgccagatcagaaacatattggaagctccttgtttgcttcccatcaccataaactgtcataggctccttcctcaaagcctgcaaagtcaccaataattaacgtttaataaaaacattaaaatatgttaagaactccttttgttctttatttaaataaaaaacacatacataagaataataatagtatacctgggcaacaaaattactaacaacacggccatcatcaatgcacattcttggtccatatgtgttaaagatcctggcaatcctaacctgcaccaaaagggtaaaagtaaatatttatttcttcccccaaaagaaaaacctttttacatccatgtgaaagtgtggagtgcacatatcacaaaatttagtgtttgtatttccataaaaaaacaacctttgtcactttttgtttattttaattaattaatgtttccaaaagttagattttcattataaattcatatggtaaaaacaaaataagtaaaaataaataaaactaacctcaacatcagcgcctctgtgataatccatggtcaacgtttcggccgtacgtttaccctcatcgtaacaacttcggacacctgtcaaacatacacaagcactgtcagataaccgacgagcactctgtctgtttatcagtcccaccagctgacaattacataactaccctttccttttccttaactctttttcagaaagataaataacaaaataccctgcctgaactactggacgcaaagtgcgtttaaaccgtcggatcagtggaccccgacaatcagggccaaacacgttgactgtaaaacaaaaaatcagaccggatctaaaagagtttggccgtgtgggtccatgtggtgaggaccgactcgctggagaaagacaaagcccccccaccttaaaccccgtttgaaccgctacaacatcacgattcacatttcacggaaacctcttggcgcaggttaatagggaaataaggtacttaaatgctaacgtgcgccgatatcggtatctgactaattcgatcggcaattgagaattgaaaaaaattgagagaaagagaggaaactgaccgatgggattgacgtttccccagtaagtttcaacctgaggatgttgcagaggatcaccgtacacctcactggtgctcgttagcaaaaaccgggcacccacccgtttcgccaacccaagcatattcagagtacccaccacattagtcttgtgggaataagaattaaggattttccaaatataaatcgaaaacaccatttgcgaatctcagagaaacagatttaaaatttgaaaggaaaactgaaaacagtgatatttaaattaaatgtggaaaaaggatatgatagtcttaacggggttgaacttgtaatggacaggggaggcagggcaagccaaatgatagatctggtcaacctcgaggagaagtggctcgacgacgtcgtgtcggatcatctcgaatctggggttaccgaaatggtgcatcacgttctcttttcttccagtgaaaaaattatcaacgacaatcacgctgtcaccacgctccatgagacggtccacgaggtgagacccgacgaaacctgctccgccagtaacaacgatccgcttcccctttctcttcagccccaacggaatcttacccccggaattccagttctgaatcccgaaacgacgctcgttgtacacagggcgatgagtcaagtggctcgattcgagctcggcagggaacgaatcaaagatcgcggagctgtacctttggggagcttggttggacgggaggagcgtgaaacccagagtagctatagcaatgccgatgagaacaaatgtcaaccgctgttcgcggaggatgtatcgaatcggacgggtcacggctaaccatggcttgggtggtttgggggagtaggtatcggccattggttgggtctcatgacccctgaaagtaagctccgaagtcattgaaacccttgtcttcttcggtgaaaggtttcgattccggaaaagtttggggtttcgagatacgaattattatttgttttgatatcccaccctggaattactgggtgactcgggattcaattcaagagagaagaacatatacaaatgaaagaggttgaaaatatttctgtatatataggagtagggagaagaagagaagaaaaggttagtgaataataatataataacaacaacaacaaataaataaataaaaaatctgataaaaaaaaaaataaattcaccggtaactcgctctcgcttctcggcgcgtggcttaagttttagttttagtttttcttttctctttttcttactaaaattgctttgtatatatatttgtgggtttctttcaaaaatatatatttgtggttgattttataaagcatctccttaaaacaaatttattgatctactttctacttgttttgatattcaagaaaaaatattgaaaaatttgaatattttatgtgcttgtaaaataaaatagtcacgtatacaacacactgtttgaaaataatttttagtgtgctaaactttttagaatttcttaaaattacaataaagatctatggatgcatccttttaaaggagtacattatagaattttcctatatatttttattgaggagtggaaatcatttattataattctttagttaatattagtgactaaaaatatatgttagaatattttttaaaatttttttatggtttgaaggtttttgaaggcccttggtaactggactaccaaaaattctattttcgacattataaaccatttgtaatttttcaaaaatttatgagatgatactataactataacaaatattgttataaattttttttaaaaaaaaaatattccaatatctaattttagacatgaaaattataataagaaattgtaattagcactcctattttttatttataaaaatgtcaaataattcaaactagaatttttttgtggatttatgctaattaaaataatttatattttggttagtagagggtagggggcggcgttccatgctcatgaaccaaaaccctttaaatatcttcccaagttggctattttgacttggaaatatatgtttagggtctaaatcaaatccttatggtgcattagtctcgatgtgactttaccatattttgtataaaacatccacgaagccccatcaatcatgttccatattatttgtgaaatttcatgatatttagaagaa

SEQ ID NO: 265029 - DNA, 720 bp, Cannabis indica
gggcacaaaacccaacatatatccatcgcctaatcagacgagcccgtacctactcccaatacttatcatatgtcactgacgcccatatctacacgtcgcctggaggaaaccctacaacggtttcattctatgccataacctggcagttttcatataactaacatcatatctacacgtccctagaagtatcacatcacctcatcaggtgagcctgtacctacgctcgatacttatatgtcactaacgcccatacctgcgcccggtatgtcgccaggagtattacatcacctaatcaggtgagctcgtatatttacattcatagtatcattacattatcattgcttaaccaatcaatcatttcattatataacaatattaactatatctcaatattaatcaattcataacagtactaattgtattacgtagaacgtactatgcagtacaatatatttttcttatctcaagttctagttcaggtatgttggaaaacctacttaaagtacgatcaatgatcctaggccctatgtaataacaatgataaaccaataagtttttatccgaaaacatagcttaacagttgcaaatgacaacctaggttttcctaccaaatctcgtagttaaaatacactaaaataaaaattatattttggttctaaaacctacaccatacggtagagctcttttcaagctttgaaacagtataaagaacgtccaaaa

SEQ ID NO: 265030 - DNA, 630 bp, Cannabis indica
taaatgaagaccccaacaataattacatagtaatatgattattatatggctattttcacttttaatatataattacatagtaatatgatggtagaaattaattacaactttcatattaatttgcatttgacaaaactaataaatttatattaaaataaaaattacacatatttttttattgaatatttttattattgttgaccttaaaaagtaatcaaccgacagcgaggtcgtacaaatctgatgcttgccacgtatttgcacaaataaaaataaaaagtaatagacaataagatttgtcatagtggttcggcccccttgtgatagcagataatgacctactccttttttgttgtatttatactgagggaattactatctagatcgctacgtgtaggatacgctatagtaccttcaggattactagatatgaatcaatactggcaaagctcaagtgttgagaagtactagggtaggcgtgtgagagagaaagtgaagaagagagagagtttatcaaacacttagagtttaagatcaggtttccagcttaaagacaacttagattttcagcctaaggttaaggcctttatataggaaacctaaaactctaggtttacaattcaaatccct

SEQ ID NO: 265031 - DNA, 682 bp, Cannabis indica
aatccccatcatcaagaaaaaataaagttccagagagagagaaggtttgatgcaaaaaattggaagatcataccaatctaaggttattacaaaatcgattctatggactccggtacgcttctgctattccttaattttattatttgattctcttgaattaattagggatatatacagatttacagtatttctaacatgtggtatcaaaagcaccctaaattagttcttgagaatatatggtagtgttggtcttccattaaattatctttcctacatttggtgactgttatatatgttttattcggataaatcgttcaaatatatatatgctcatgcgattcaaatttctgcactgcatatcctttgtgcgattaaattctgctatgtgaatatatgaatatacatactttatatatgtatataagattttggcttgaatcgtatagattctctcatgattttgtggttattatatattaacgattatgcaattaagtgatttggtatatataatagatttatatatactgccacttacgtttgcaattatgtggcatatatattcatcaatcaatcgaatatataataaattacagtaatttaattaatacatgtgatttatatatatatttgtataataagtctcacatgagacaaaaagattgatatgtatatgcgtctg

SEQ ID NO: 265032 - DNA, 1230 bp, Cannabis indica
acccctcaaacaagagggtgagtgtctcacaccaagtttggaaaccaagtagttgaatcttgaatgagaaagaggctttgtcatacaatctgctacttgatcagctgaaggaatgtatcttacttccaatgacttgttcagtaccttatctctcacaaagtgtatgtcgatctctatatgcttagtacgggcatgatacacaggatttgaagctaaggcactagcactcatattgtcacaccaagtaatggaacaagtaggcagaggaaatttgatttctttaagtaaggactcgatccaagttagttctgcactaacatgagcaagtgctctgtactcagattcagtactggatcttgaaacaactgcctgtttctttgatgaccaggacacaaggctttctccaaaatagacacaatacccgccaacagatcttctgtcatcaacattgctggcccagtcagcatttgagtacccagtgagattgagtctgtcactacaacagatatgaagaccttgaaagctagtgcctttgagatatcttaggatccttttagcagcagtccaatgagaagttgttggagctttaaggaattgactaagggagttgacagcatagcttatatcgggtctggtgtggttcaagtactgcaaggctccaataagacttctgtagatagttggatcttctattggtttcccatctgctagtgacaatgattttccagtagctattggagtaggacatggctttagatgttgcagattgttcttttccagcagatcttctatatattttgtttgggtgagatacaggccagtttcatttctggtaacttcaatgcccaaaaagaagtgaagggccccaagatctttaagtgtaaacaacctgttaagcctttcaatgaatttgtctagatgaatcttgttgttacctgtgactataatgtcatcaacatagatcaatacaagaataatgacatcatggctgatatagaagaacaaagatgtatcggcctttgagttgctgaagttccatgacagcagggtgttttcaatttgtcaaaccatgccctcggggcttgtttgagtccatacaaggacttgagtaacttacacacatggttatgttttgttggatcttcaaaaccttctggttggcacatgtagacatcttcttccagatgaccattcaaaaatgcattgtttatgtccagttgtctaacatcc

SEQ ID NO: 265033 - DNA, 578 bp, Cannabis indica
tttttatattttgtctgttttgttttgtcgttgcaaaactggtttctatagtaacagaattacattctgcttctgcaggcgtacacagttttatatttttgtatatattattgacatttgcaaaaattcggtttttcagattccatgtcctgtcatttttcacaatattttatttacgtggcattttttcatattaaaacaatagtaaaataacactacaaaacaacaatttgtttttaatttagtaattttttctctttttcagattttatggttttttcctagtgtttctatgattccggtgttgatttgtccgtccccaaccacgaaggagaggtgccgtttgtgttttgttactgtttacagtataaaagtaaatatattgggcttgggcagcataaaagaaataaaaataggctaggacagtaaaaatgtaaagtttgtcgtgtcccagtatttttgaaaacatttggtaaaaaaatagtattttagtaagtttccctaaatatatatatatatatatatttatatatataaactgaataagggccactgaataaatgttggccaccttttca

SEQ ID NO: 265034 - DNA, 519 bp, Cannabis indica
aacccatgtgcaggcctaatttaagtactaatctttcagcaaaaaattaagtacgaattttttgaggtaagttgaaaaatatctcttttattaatcaattaactatatttacctctaatttttatttaattgaaacatacctctttttataaatattgtacccaaaatacactgacataaggaagtcacatggagagtatcttaaagtgataggaacaaaattagtataatatttaaaaaaaatgtaaaaataataaactttaaaaaagaagataaaaataaaaaatagacaatataaaaaaagtagagtctaatttcatcaatcttcttcatagtcataaataaaagcgaaagagtgggccattgattaagcccatcattctagcccatatttttagttgggctagtgttacccaaagcacagcagaatatggtaataagctaataatgatttaataaacatatacttctttttttttgttatttgtaagacaaataatcatgagaagtttaatatat

SEQ ID NO: 265035 - DNA, 682 bp, Cannabis indica
attaggccaataaaagttaatagccgaaatgtaagtttgatatttttaagtttatgtatacattattcttttaataggtgtatatttttaaaaaattctttggagaaactagatggattattatatttatactattttattaatttaagatttcaaaagtacataatatgtagaagcacatcagatttgatttttcctttgtttatttgctttctttattttatacctcaatattgatcaacatacaaaaaaatatatcatgagtccattttgtagatctcatcaagcattttatagatagaagaagcatgcctatgagtcatgtccccaacaacaaaatcatgaataatgccatcaatgtgaattcaacttcgacctggaggctttttcacacccatctgaaccatcttttgtctcacaaaagcaacatctagccacctttcagcagctgcatacacattagacagcagaacaagataacttgtagattggtcagaattgagctccactgatagtttcttagcaatattggatgcaagctctgcatttttgtgaagtctccaaccacctaaaagagcactccaaataactgttgggttttgtgccctaaataaaagccattttaatataatcaaatttactaattaataaagatcagaaatcatttatgttgcatggttca

SEQ ID NO: 265036 - DNA, 544 bp, Cannabis indica
agagcacccgtgagccaagcccagcaagacagtgtataacataacaattattaatatgcacatcatacttaatttaaacaataatgcaattcatatatgtcagtgtatcatagacctgtatgttgccctcaaatgcctattcatttctacgtggcgtgacctatgtgtcgcactcacacatctatttaaatctacgtggcgtagacctacgtgttgctctcacacgtctaattactttaaggccttagaattggttcatctcagttatggttaccgagtccaacttgattatgccttaagcgcataacccttgaatctcattacatataacatgacatggcattttcatacatatatcactaggataataaccctaggcaactatatcgttcatattagggtaagtaaccttaatctcggttattaaataaatcatacgtataactttctaatataagcgccactgcgcatactctatgtgctaatcactgtcttacctattgtccagcaatagatagagattccaaatccccgggtgctcctg

SEQ ID NO: 265037 - DNA, 897 bp, Cannabis indica
agtccaggttatgaaatctattccacgagtcaacacaaatgaatgccatagtcaaacctttatagaaatttggaataaacaaaaacaaatttaatagtatagagatttatttctgttgccctactagattaggcacgatatcgtgtttttcatttattgtgatcaccttttagctaaatcaaaaggtttactgaaaaaatgttaatattatttaagatatatggattaatcatttaattatattaaatgtttattatgatatcttaatattatttaagatatattttggtaaccttagtttagtgtagaaacttatttgttatttataataaattttaaatatgaataataaaatatattttagtaacacgtggatttggttcgtcgattaaagtttttttaattgtaaaatttgattactttagtaactaaatgaaaaaaaaaaactactcttgttgttattttaaaactatacaaaaaataaagtgagaaataataaaacaatatttaataaacaaataagattatagtaaatgaaatataaaagtgcatatctacatgtaaatttccctaatttctaaaccattttagtagagtgaaaattccttccaaaagtttcagaaaacgtcatttcaaggcaaaattaataaaaacttaataattttttttcttttatatacagataaaaaatttcgttcttttttttgataaaaaatttcattctattcttatagttattttatttctatttattcttagttttgtttctcctaaacgatgctttctctgaaaccatttatgggcctaatcttcaatgtttgcaggcccaagtactatcattatgggcctaatcttctatatttgtccagcctagtgtggtgcacatgagctttaagt

SEQ ID NO: 265038 - DNA, 1413 bp, Cannabis indica
agtgttagaattttggtgaggtcctaaaagagctagagtgggtgagagagggggagcttcatcatccaacccacctaggggtcgctctaatgttgatagagcgaggtttgtgaatatggaggcccaagggcgatttatgcaattgaaagataggcccttcattgaagatagggggatagatattggtaacccgagccaaactacaaacattcctgctgtatttgcgcccatcagagaacaaatcctaaatcggcagtggactaagtttgtggatgtcactgagcgcaacaaccaaaccttagctttagaattcctagcaaattggccagaaagagaggatgaaaaggtcaaagtcaggggggttaaagtgcatgtttccacagccgccattcatgctgcctatgacctaccaatcttcactgtagaagagcaaccattgagacagcaacttcgagcacggagcttgaattatgaggaaatcgctgaaacccttggttatccaagacttaggttccatgaatttgatggagaaccatatcagttgtatcggtgtgaactcaacccggtagccaaggcatggctatactttgttagtgcaaggttggtcccaaacaaacattattctgatgctcagatcgacaggcttaagttgtttatggaattatgaaggggtacaacttgaatgtgggggacatagttagagtgacttttgatatgatggttgagggctcttgtggaggtggacttgggcttgctgatattattaccaccttgtgtgaggcacatggagtaccacagtactcttatgatacaaaagcagcgccacaacgcagtatcaccctgtccacagtgcttcgattcaaaccaccgcaccctcatggtcaaccgccagctcagagagatcctcctgcaagagaacaagaggagcatgaagacattgtaccaccacgtattgctgggcctctcgacccagccatgcaatacactcatgatcagctaaattatctgattcagcaaaacatgcacatgcaaaattacatgggccagagaagtgtttttgatgaggagcaggtggcccagttgaacacgctagtcacgaggatgaatgttggtgtggacgaacccaactattttgccatgccaccccgtttcaacccctatgatcagccacctctcccaaaccccttctaatggggctcaggtaagtttctctcatctagttttattttcacacattggggacaatgtgcatctttagtttggggggagagacttaatttttcagtttatttcagttcttttcgcttcgtttttagttagattattttagtgtcgtgtgttgatagctaagttggaagattgattgaaccactgttattcacttgtgcaattaattaaaatcttaattgtgtg

SEQ ID NO: 265039 - DNA, 562 bp, Cannabis indica
ttggacatccacataattattaatatttataacaatgttataatttattgggatttttacccttggtgtgcttttttaccatttttcttatatttttgtctttattcagttatttaaacatttttaaaaaaattatatttcaatattatattttaaaaagtttgataattacaaaaatacctatgcatgcttatgtcatgggttttctccaatattacactccatctctttcatctccaatattacactccatctcttccaccttcttctctttcattcatttttttttattttcttttattttttgttagtttttttttctttttccataacccactatcatcccctgtgaagccgtaacccacgaatttcaacctcccatctatgctacgatctcccctatcttccatagctgcatttcttttttcctcttacagttaattttcttcttctataaatgaccaccactaggttgggttccaagtccccttcatctgctaaaaaaattttcaaaaaatactaagaaacctcctttgaagtcctctaaagttgatcctaaaat

SEQ ID NO: 265040 - DNA, 518 bp, Cannabis indica
aagggcccaaaatttttttttcctttatgacccactttgtttgagggccggccctgggtttgtgttttagaggtcctggattcgagtcccaagtaaaacataattgcaatatataaacgcttaaataaaaaaaaatacttaatttaacattaaaaaataaaattatatatttttgaaaaattattaaattgagtcgacttgatactaacttggtaaataactaagtattcatatcatcattttttttttgtcacatcgactactttaaaatattttaaccggtagaataattttaaaatattaaatatcctacggaaaatatatagctacatagtcaacttgaggatttgttcataaaatataaacaaaaattgtgaagaaacaaaaacaaaaatttacaatcataagtaaccaagtaaagaacaaaaacatgagttgaaaataactacgaatagttttatttttattttattttttttaaatataccattctttgatttatggctaattagtaattt

SEQ ID NO: 265041 - DNA, 4313 bp, Cannabis indica
tctctctctctctctctctctctctctctcatttcgacggctccaaacaacgcgtcctatatctctcctctctcccaattcgccactccctcacgcatatcggaataatctcacacaccttccaactttgtcggttccagatctgcaccacgtttccattttccatttcatactcctttcaaccacctcccaataatcaacaattatatatatatatatatattatatcataccgttttggctcttctgcttttttaagctcagactagtaaaaaaactacttgttatggattccgagcaacggcggaagagaaagcgtttaggtaagccttaccttcagccaaagttctgctcagtgagatctctagtcgtatgcctctccttctttgtcttccttctcttcttgtcctccgaccgttttcccctcagtccgacgtcgtttcgacctgctctcagctcctccccgaccttcactctcttctactccgccgccagcaactctatccttgattcttttggcaccagaagacaacaacgcgtttccagagtggaagagcgaatcttgttccctgaccatgtgcttctactggtggccggtgctagaattcgccagcctgccctggtcgattgcgtctactacatctcctccaccaatggttccagggagttatttgaagacggcagagctgggctcgttgttcgaccggcgttgtccaccgacggctacgatgagttccgatcgattgtgagatgtccacatcctccggcaaattactccgctgcagtggatttgaggagacgcggagactctgtgaacgagtattggccctcctcacctattaagcgggtagtacattcatgggacaaggtagtttatgaggctgttctggatagagatacggttgttgtgttcgttaaggggttgaatctcaggccccatcggaaatccgatccgactcagttacgatgtcgatttgggttgaagcgtggggaaacagacgaagggtttgtgcttacaactccggcgataacggcggcacaagaggttgtccggtgcccattgcctaggagtattcaaattaatccagaaaaggctaagggaattcgtgtaaccattggttataccagtaggaatcagaaatatccacgccgtaatgctttaccttccgctgctagaattaacagttctaaatcccgtgtacagataaacagaagaagaaatgagttgaagaagaagaagaagaagaagcatgagctttgtgtgtgtacaatggtgtggaaccaagctcctgctctgagggagtggattatgtaccatgcgtggcttggaatcgagggctggttcatatacgacaacaatagtgatgatgggattgaagaagtagttcaagagctcgaccttgaaggatacaatgtgagtagacaaagctggccatggattaaaacacaggaagctggattctcacattgtgcgttgaaagcaagagaagaatgcaactgggtcggattttttgatgtggatgagttcttctacctccctaacacgtttcggcagccccagggacttggttttccgggtcagaattcgctgggagagcttgtggccaacttctcctcatccacctcaattgctgagataagaacaacttgccacagctttggaccatcagggttgagctctcccccaccgaaaggggtgactgtaggatacacttgccggctccaaagccccgagagacataaatctattgtgcgccctgaattgctggacgtgactcttctcaatgtagtgcaccacttcaggctcaaggaggggtataggtacctgaatgtacctgaaaacattgccctgattaaccactacaaataccaggtgtgggatacctttcgagccaagttctaccgaagggtggctacttatgttgttgattggcaagaggaacaaaataagggatcaaaggatagagcaccgggcttaggcaccgcagccattgaaccacccaattggaaacggcaattctgtgaagtttgggacactggattaagagactttgttttggcctactttgctgaccctgcaacaggttcattgccttgggagttgaggtctctctcttcttctctaacaaattcaaagcaaggggtgcttccagctaggtaggcaggcacctatgtaaacacacagcagtcatacaagccattctttttcaatttaattttttgttcttctatctgatttttttcttctttacataaatatatatataggaatttatgaactcattacaggattcttatacagttgtaaattttttaacgatatgaaatgaattattcttctctttcgtaccgtgtttggagattgttttgggtactaaatctatccaatccatgcatcttctgctactaatcatgtgatatacattggtgtcgaatttgacttaaaagatctgcagttccgaatgacaaataggtgggagcgttaaacatcatgttacagggaaaattatagtttggtcggtattcattcggattatatgacctaattgtattaaatcttatcgggactaatcacgaaatccacatgcaatctattagatattcattagcgtagttatgtatgcatgtgcaaactttgcatttaagagattgaaagaataaagtaatacaaatcacaatgcaaatggtatgtttaaactgccaacagaatctacgcagtatgtttttcttccatcataactgcacatgctatatacaaaatgcattaaatttacatgtgtttgacataatacagtatattccgagtaacatatcgatataaacaaatgataaataataacatacgctaccttttgatagattaatatagagcatttacatataataaggctgtacaacataatatgccttttataaacatagttaaatatgatataataagtgccctgcgctaaacttgctgtgcttgctttcaaacttgatctagcagagaaaaagccacgttgtcgaaacattttgccaaagtagcatccaatttctccgcaatcaatgatatccacgcctgtaaccatataaatgtttacgacattttgataaggacaaacagacagacaaacgatgccagtcaagaattgtgtgatttttccaactactttcaattattagttcatgattgttgagtagctgacagcaagtataattattattatgcttgggaatacaagtctggtggtacatagaatatactaccacgtcataaaagaaaatgaatacgaagaagctcctagtagaaatatagggttggaaaaaatatagaaatatgagtgaaaatagtgagttttgatgaggccgagtatcatcttgaatccatagtttagtcggtcctcgttgttcagccaagttgaaaatatgtgatacaaatgagaaccagaagtctttataagaacaactattactccaaccaagtttaaaacaaatttatttaaatcccacaaaagaagataacatgagtagactcaaaacaatggagatactattactgtcacagacagacatgaaaaggtaaataaataagggagcacctgatcagaggtcgtgaaacccctaattgtatcaccgccaactattgctatccctttgtctccaagtggctgcaaaatgactgcctgacagtcggaaacatgtaagcctttagaaatttgaaggcttgatattcacatagctagaaggaaaagttaaatactgataacacgtttctctttcttgttggcttgcgatgattatcaacattctgtgagatagtcctgaaatttgtaatgaacaagtgcaaacaaacctagcttgtagatgtgtacatgatagactcctttcacatcaattgtcgagaaagcagaggagcaaaatcatttggtagttctaaatgccaagtacagaacagaccatcatgacaagcaacaggcttacatgcgcaactgatacatattagtattctatgggtatagctaatgccataatttcgtatacagcgtgattcttttaagaaaaatgaacattcaaagaatatattgctaggaaaggtagaatagaattcctttactcagttaattacatgtaataagtgtcaggcggtatgtgttgtttatgtcaaagaactgcatcaaaactaccattatttatttttttttattagtgaaaaattgcagaataaggcgaggcacacatttctgcttcctgttctatcataaatattatatagtgtataccattaatataaatgaacaaggctgccacaaaaaaaatatattatgcgtgac

SEQ ID NO: 265042 - DNA, 582 bp, Cannabis indica
aaataatttccaacagtatgctagtcatactctagtagtacgatgtaatattgtcgaataatacttaagccaacatacatttatcgatatctaatataatactaaatatactgataccgctattataatgtaatctaacaggcttagctaacatatacgctaaatatgtaaatacatatgcatatcattatactaatcttacctcgtttttgaatttaggtatgccggccaacctgagtggaatagttgctcgacaatttacaggcccctaaatcacattattcgtaaaactgatgagtgacacgctaaatcactttttggggacttaaacttgaaactaaattttccctatcgatggataacatggtaatatcctaaatgttgcaaaaatgggaaaaattagggctccctaaaatgccccaactggtagaccggttccccaattggaattctatggggtttcttagggaccaactggaatttcggttcctacaggtccccttgaaccaaaattttgattcagtgcagaaatcaccaaaaatcacctatactcttcaaatcaaacccaaacctcacaataac

SEQ ID NO: 265043 - DNA, 777 bp, Cannabis indica
taaatctcgtcttcgttttcatttttttcttacttctgtttgtttttcgtttctgtctggattacaaaactcctttatgttcaatatgaattctctaagttcttctactgctccccctctgatgctcactcttgatgagaacatggtttataccatgaatgaaattcaagatgacacctcccctgaaattagccttcttctcaaactctgtacagttaagcactttaatcgtgcctccctcattaaaactctagccccaatctggacctctcaatgccgtttccctgttaccatttctgaacactctgatggcctttttcttgtcacctttctttgtgagggggataagcgtaggatccttgatgggcagccttggcattttgcccaaagtctcactatctttgcagcccctgatatttcctttcctattacccctgatcagatgcattatgtgccattttgggtgcaggtgtatgggatcccttttagatgtaaatcatatgatttagcaaagcttatagctactggggtaggggatttgattcaagtggatagcactaccctcaaggatgggactgggccttatcttagggctaggtatctgttagatgtcaacaagcctattaggaggggaataaacatttgtttcattaaaatgggtagagagttcactaagtggctagactttaaatatgaacgattgcctgacttttgcttctactgtggtaagcttgaccatactaaaaaatattgtcatgcttatttacagaaatgtga

SEQ ID NO: 265044 - DNA, 629 bp, Cannabis indica
agttacattgtgtaattagtaactagttatggacaaatcattgatgtgtgaggagagagacacactgcaatttcaagtagagttcgatgcgtttttagagttttccttaaagaattctaaaaacgtcgaacctattcattgtccgtgtgtagattgttgtaacgggtctaaagaaaatattacaataattaaggaccatgtgtatttacgaggtttcaatagaagctatactacttgatgttggtatggtgaacatttagcagatgatccatatccattaggaaagcgatgggtagatgatatcaagggtaatgatttcaatgatcatccattggacttgcttaacgaagcacatgaggaatttcttaatgaacctgaaaattttgataattttctaagtgatgctgataaacccatgttcgatggttgtacaaaactaagattgccaacaatggtaaagttttacaacataaaagtagaaaatagagtgaccgataaatgttttactcaattttaagttgcttttaaatatatcttaccatttgacaactgcttcctggagtctacatataaagtgaaaaaacgttaaattccatagaattcaagtatgaaaaaattcatgcatgtcc

SEQ ID NO: 265045 - DNA, 788 bp, Cannabis indica
gcccaacaacacaggagcaaatggtgatgaagataatgatgggagtaagcaaagtgttcaaactcttgaactctttcctcttaggagtgacaatgtgaaaggttgttctacttgcactgaccacactaataagattattacttcagacacaggaagagactcagatttcaagctttctttgggtttcatttcacccattaataatgaattcaataaagaagttgctcgatcatggccatgtagtagttaggccttaaaaggttggtggtgacatgacttgttgtgattggctttactttccgtgtatttttcaaaatcgtgcatgaaatatgtacccactacaccacagtccacacctacacatacatggactgaactgaactagaactaaatttatgtaataaaattataagaaccatatttcttctttttctttctgttatcgttttaataagataatgaaatataagtgagatagatgactttgatgactgatttctttgtttgaaatttatgacgaatatttgctgcataaatagcttaacttttgaatttataagtgatatagatcaaataaattttcagcaaaataagtactaaatgtcaatataacattacaaattctgttagtgtattaaataggacacatgtcaaatctaaattctaaattctaaattatttggtctaaagaaaacagtatcaattccaaatcttctttcaacaaatttaaaaaactaaggtgccgtttggtaacactttttaatcagttttttgtttttaaaagtaga

SEQ ID NO: 265046 - DNA, 948 bp, Cannabis indica
atttttatgaacttgtttctatcttcaagaaaggggacaaacttaaagacagtttttacgggtttcggggccgccctgcaattgatggggtggtcccgtataataggcaaactcatgttaaggagtattgcaatcgttttttttctcttccgggttttgggcagtggaccatccggagctcctcactgagtgggtcaggattcctccttacgaacggaccgcacctactcaggtctttcttcggagagcccaggcctttgcctcttatgaccgggctgatcttgacgtcgggggcctggttactacggagaactgcaggaaggcaaaactcatcctgccgcaccaatccgtggaggactctaacctttcccgggttatctgtcccaacgtgagggtgcctgccgcggagaagaccttccgggatgagatcatcgccactgccgagaagaagtaccaggactatctctaccggaaggctcaggagaaggcatactctaaggcccaggcagcttccgggaggccacttcgcgtggggagcccggtcgagagaagaagccaggcgatcgccgggaagccccttcatattggggactcagcggagaaaagggctcccaggccacagccttcggctcaggagccgaacactggggctcctggtgccagcacttccggctccggtggtaagtctcctttagcagttcattacgtcccttctgttggcgagtatgccagtcttaggcctgtagggttcgatgagcgtctttataggtttaggatgccctcgacccggtggggagaccatttgaaggagttttatttttccaacttaggagatttcctaggtcggtcccggatgggttctggtcctccggagcccgtccccttaggcccttcagcttatattacatccagctggttccggccttcggacagctatctcggagatga

SEQ ID NO: 265047 - DNA, 509 bp, Cannabis indica
ttgctctaagcatgccagcgaggcatcctgctcggactatcttcccgagcagatgttccaagtggactccacgtgtcaccattcacgtgatgccacgtcagagtgcaaaaattgggataacaattatttatcctttccccaggagctccatttttttattcccactcttccttcatagccccaactataacaacgaagccaattaaaaaagaagagcaaacaaataatcatacgaccttgaatgcacgccgcaaatctctttctatttcaaactcaacgaaagcataaccacgtgaatcaccagttaatgaagcaagtaacactaactccataaattacataaatgcagaggaaaaaaatagggtttctctaaatcataaataaattacataaaacatacaaatcattaatcaatatcaatatcaatatatataataaaggaatgcacaaaggattcctatgtggcagcttatatgagtttttttcctaatcttctttttcttaatttt

SEQ ID NO: 265048 - DNA, 526 bp, Cannabis indica
ccacatagcacagacgttgtttaccaaaacgtaattgactaaactatgagccactttattggcttctctaaaaataaattttacatcagaaactaattgtggatgttgcagcagagttcttatatcttgcacaaggccatccacctccctgcaattttcagactgctcattaactgactcaaacgatgctgtattccagcttttaaaccttccttgatggcccaaagttcagcaccaagcgtgatcagtttaatcattaatgattatttttgatggactgaaaaattcaaagaacaaaataattcataaatcataattcaaaagaacaaaaattctaaatatattatcatctgttttcatgaaataaagctattcttgttttttttttgtaaggatgaaataaaactatattattattgttttatttgtaaattaattatagataattcatatacacacgcacacgctatactatagtccagtagtccgtgccgtttggtgccggcgcttctgaacatccaaagta

SEQ ID NO: 265049 - DNA, 1552 bp, Cannabis indica
atactcatcttgtgtcctaccttctgtagatggaccctggtgagtttttgggaggagaacatcatatcgaccatgaccttcttcaacttctgtacgaggatcaacctcgtctttgtgccagtccatcctcatcacgtgacaatctttccaactcgagctttgaggactgggagataagcagcgaacatacaccttctccagaatgcgaggtgcagaaccattgttatcccgatcagattgcaggtgaaggctacagacgttttatctgggagcttaggaaggggtggaggcaatattttccgtccaatcagacatacatcgtccggccagatatagttgacactatacctgtaggccgcccaagttttgctgttgtaggtacgcctatagccactttttgtgtgaccattgctaggcacactgatcaagatccatccagggatagaatgatggcacgcactaaacaaacagttcggagatccactttaactgatcctcacgtggctcggcttgccacaatgctgagtgctgaacaagttccagcgtgctgctgaggaggaagacaatgagggggacgtcaaagttcaagaggtggaggattagggcgaggtccttcttgacactccatctaaagccgaggaggagggagttgctcggggatttccctttgggggtttcaacgaggaaggggaacccgtgtccgaggttggtgaagtcctggtagagggtgaagactatgttactgaggaatacactgaggatgttcctcagagaagacaaggtgtcgtaggagctcggtgggtttctcctccatccatagtaacccaggccaagattaataatttggagaagcaagactacttggggaatgttgaatgcttcttcccctgtccaaatcaccgagcaaccagtcccaggcaagggttttgtgcctggtcgggcgcccataccaagcagggtgtaatgctacctttgcttccgtacttcaagaggattgcaaaatactaccacctctgcctgacccagttcactctgaagggcatcaaatatttgtccgccctgttcatcctttacgcctcgcaaggatggggcgagccatctccgcacgatactaactcgcttttcgacctgaagtcaactcccaagcagagcaggtcggggtatttctacttctctcaactagatgagaagtggctgaagggcactatggacaccgatattagaaaaataggacattttatggacgagtactactttgttcagggcatggataccgtccacactcagttccagtagatttccttgtactgccgcgctcctttcacattgggactcagggagagggcacaaaaaattcttcaactgccaaaagatgctcggaacattactctactggccactgaggccaattatgttaagtaaaaactcttcccagaggactttgtgccgaggcccgtgaaggagaagaagaaaaaggcaaggccaagccgggttggtgggactgagcaagaaaaggagctcattcaactcaagcgtgaggctaagttgaagg

SEQ ID NO: 265050 - DNA, 1094 bp, Cannabis indica
atatcgacatcccatcgatacccatcgacattatgtcgataaaaacatcaacagtaagggtgacagttctcatcgataaaccatcgacacaccatcgacattacatcgataacaacatcaacaataagggtgacaattctcatcgccaaactgtcgacatactatcgatatagactccacaatgcactttgcatgtcagacacgtgtacaatggaaattaatctatacaactatcgacattgtattgatattctcttgacaaatacacattgcatgtgtttcacttgtatagttacacatttaatgttaataaatttttcctacatttccaacaactattcccaaccgccacattgcatgtcagacacgtgtactatcgataagctatcgacataacatcgacatcatattgataatatgtatgccgattttttgttttgtgtgttattaacaaattatcgacatagtatcgataagctatcgacaactacacacttcatgcgttgcacttgtacagttacacatttaatggccattaatttttcttacattcccaacatgtatactgttctataaaagcaaatctctttctaattcataagtgctcttgtcttctacttctcttatacttaaaaattaaaggcaaatttctcttattcttaagttctaaatatgtctactagagagaacaagggcaaattctcaattctaactcctgaagagctcaagcaggagcctaatgttggcatagttactcctcaaatgcaaaaagttctagacgactatagaagttttgaaaaagaacaaaatcataatgagttaaggttgatacaacttgaagcacaatttagcacaactggtgtatgactggctccaccaccagggttccccgaagggtgtcatcgttgcagattaggcatctttaatggtaaaccggtgaagcctggatctttatgcaagtattgcaagtctcacccacaagccaaacaattttaatttgttattttatggtttgtggtgagttttatttaatgtttgttttttttaatgaactttttaatattttaatgtttgttatggttgttatgaacttt

SEQ ID NO: 265051 - DNA, 450 bp, Cannabis indica
ttttgatatatattttttttaattaagtagttaaattaagcaaagaaattcaaatttctctttcattattcgtcattagatcaaaatttgatgtttaatacttttaaaattaatatttatatacgtgatagtttggttcacggttgttttatacgaaaaattttaagtttttatttttcggtgtttattttgaatcatttaagcattatcacattcatatcatattatagagtgatttatgcatgaaaactacttaagaaaccatgaaaacttaaaaacaaatctggaaaattaacatacgaacacggttagttttgtgaaattaaagtctcatttatacatgtctttgatgcataaaacttatatggatcttttaggggttgattggtttgtgattcaaaaattatattttaaaaatgtgttttggaaataaaagtttaaattttgtaa

SEQ ID NO: 265052 - DNA, 846 bp, Cannabis indica
ttttttatatatataaacacacatatattattaacactatgtttggtaggagggagaagtggagggatggagaggagaggagggagagaggtgggaggagataacaaatccctttgtttggcaagagggattgaaggagagaaaggagaggtgagaggatagcaaatccactcaaatctctaatttgtaatccctctaataatggaaggattggaactctccttcttcaattattgtaaattacataaataccctcaataaatattattaaaaaataattataaggataaaatagtaattttataatttaataattatctatccttcaatcactccatccttcctaccaaacaatataaaaggattattactctcctctccctcccttatattctccatccttcatcaactctccatccatccaactctccctccttcctaccaaacatagcctaagttaaattaaatagccttgctcaaaattcaaaaaatatatatacacagtaaaaatgtagtaattgccgtgtaacagtaaaaaagaaattaaatgagaaaaatcattacagggtggaaatttgccaaataaaaattagaaaccagtgaacaagtgaggttgttgagatttaaactctaaacatcttagttcttaagctaattaaattactactaggctataacacatatttaaaattaagagtattattatttattttattactaactgtattttaatttttttttcaaaatagggagctgagtggtggggggcctaaggcggccatctccttcgtctcacctcagggccggccctgaatgctatgtagtagcattgatgctatttatatt

SEQ ID NO: 265053 - DNA, 1252 bp, Cannabis indica
aacggtggctttgagacctctgccttattattcaaaagaattactctgaaaatcctccaaaagaggaattgaaagcatccaaaagcttttgaatccatggaattgaaagcaattcatcattgccagcactagaaaggtcttggaatcgttctgtgacacgctgttggaagaactcgagctcagattcaagggcactagagtcctgattagtctccattgagtgaacttgttctctcctaaaactccaaattgatcgaccaaatgcggccagaggtgaagaagtgcctgaatttccgttgaaggcattattacaagatttcaaagcaaaaaaggcccttgatcttatcaacacaacaacaccgaaaaacacaaaatcagtacaaacccattaatacttagctaagaaggcctcgacccagaacttcaactctcaaaatcttcgaaatcccacttccaattcagtctactgcaatagttaagcccaaattcagaaatgttttcaccatattatatatcagaaaattatccaaacttgtcgaacactataaccaaaaattccagtttttttttttttaaaaaaaacagaaatttcacccagatcaaaaagctcaataacctggcttatctaaatgactcaagacaaaaaaaaaaaaaaaatacaaagacgttacaatctacaaaaatgtgaataagcaattctaaaatccaacgaatatttattattgaaaaaaaaaaaaaccaaacattagtagtaccatacattttcgaaaaaatattaagaaaaatcaaaaaataaaaggaaaagttgaagaaaatggcttacttggtcagatgtagtaagaatattgtgaagaaaagacaaagacatgtggaaagaatgaatttattacaggaaaagaggttcttgaaacccggcgaggacacgagcccctcgcttcggagagagagaccctaaatctacgacccaaagcaacacatactttataaaatttatattatataaatatatatatttcttttgaattatattaattaaaaaaggaacgcaaatattatttaaatgcttttaaattaaggaaataataatataaatttcatgtttaaggagaaactatggcacttttacgcatgttgtgtcagctacgagttgggaaagccgttacattaaattaattgtttaattattttctttttggacaaatgttctcttgtcttgatatagtaaattagcatataatgtatattcattttt

SEQ ID NO: 265054 - DNA, 1584 bp, Cannabis indica
agcagttcgttccactcaggttgaccgtcacacctgaattcgaaatcgaggtaacattagtataacagtatgcatgtgtatttacatgtttagcgtgcatagatatgtatgttggcttcgtatcatccggcagtatcacatcggtacggctagagtatgactagcgtaccgagtataggctgatattatggtcggtgataccgtactatttgaccttatcacattggtatgttaagagtatgactgacataccgagtataggctgatactgtaacacatcggtaaggctagagtatgactagcgtaccgagtataggctgttactctgtcaaaagtaatgtcgtacgaacgttcgagactcagcaccgtgtgggacacggggattagggttgtggtcaggggtatgggcatctgatcataactcgggatatatgtatgttttatgatttatgattttctactgagtctgtcgactcacagtgctatgttatgtgtaggtaagggcaaggccaaagctgagaaccgtgaggacgagccgatggagattgtacagtgtcgggggtaaagtgttttgtaatcaggatctcgaatattttgtatgtattatataagttttaattaaaaagcaaaattttaattaatcacgttttcgataaacctcgttgattagcaacgagctgcacagtacgtttaaaaatcacgtaaacacgcctatgctagttagggtgttacaaaatacaattgttgggctactttagatagagtttctgaaaagattcgacatcgcacatttccaaatacttgttggagatctgtttggatctcaaagtacttcaggtatactagggtgttaagacagttagttagttgtaactgtttctgttattttcatgtgccaactgtcttggttgttagtccttttccttttccgttgttagttagttaagcttgatgaaggtgtataaatacggtgtactcctattcattcaatgagattttctttcttctccaattatttctctttgttcttttctcttttttgttctctcttccttctctttcttgttctgcattcttcatggctcgaaggtttaacatggtatcagagcattttcctccactcaatgttaatatggccactgctggtgctgctgggatctccaacaatggatcgaccttcaatggagctcaagctactcaaaccagagctcaacctcctactgaaccagtgtacttcaatcataacatctcaattcgtcttaatgatcacaatttcctcttatggaaacaacaaggtcttgctgccattagaggaaatcgtctcctaaaattcatcaaagaacaacctccagctgagttcttaattgaagaggatcgtgttcagaatagagttaaccagatcttcatcaattgggaggtgcaagatcaattgttggtgttgtggttgctgtcctccatgactgagagtctcgtctactagttgtctgacacagaaaattaggtttgatttggttgaaggcaatagttcagttgaatagttggatgagatgagagcatcatgttccttttatagtgtttcaacta

SEQ ID NO: 265055 - DNA, 659 bp, Cannabis indica
cttaactgttagtagttatgtgattaggagcatatagttttatgattatttatttgaatgcattgcctttaaaattcataagtgtggtacttaaaacttatatgattgctgtctgacctacctgacttatgcgctcgcaggctaaatcctataatatggatgcctagtgaaacatgagaagttgtggtaacatggtcgagaccagaggcggtcaggaagattaaaatcctcctaatccccgtggacgtgacaaaggccgtgggaggttacaaggaggtggacatgaaaatcctcattgccggtgatgcccataaaatttagaattctggtaatcactgttagccactgctcaaccttcataacatcgggacctcccaaaaaaactggagctgcctgcttgcggaacctttcatacaagggttccattcagttcactacaacgactggtcctacctgcacagcaggggcaggagctacttgcatttctggagcagggattgcaagagcactctgctatctcaagcgtcggatctcttcatcttgttcattaattatggcttgcatttctgcaaacctattttcccaatcttgggtagcctgggcaacctgtggcgggttaacatcaccccggccgcgtgccctgcctctaggacctctac

SEQ ID NO: 265056 - DNA, 928 bp, Cannabis indica
cactatcgggctcaaataccaccatttttcgtttacagtcaattgtcgctccatatttagacaggaaatccattcacaggattatgtcaaagtcagacagttgtaattcaattagattggtggtcaactcacaaccgtcaatccaaaaggacaaagacccaatccaccttgtggatactataaggtctcccgagggtaacagtgttctaaaccccgaagcataaatatcacatgacttatggaaactttcaataactctactcgacacataggagtgagtagctcccgaatcaaacaacacaatatattaacagccattaatagacagctgacctgtcacaactgacggactagcattagcgtcagcctaagtcatggtaaatagtcgccccgggttcagtgcagtattcttcttaggctcctctttcttggcctgaggacaatctctgataaagtggcccaccacgccacactcgaaacatttcttggcttgacactcaccaggatggtgtttcttgcatttaggacactcgggatatgatcggaatgaggacccgcgaccctgacggccacctctgttaccccgaaactttctatttccccctaatgctctgaaagcctcagccttccgtttgtgatcaaggttgccactgtcggtccccttactgatatcctttgcaacctgctcttttattacttgttgctcagcctcctgagcaattaaggccaagtctaccactctcttatacagaatgtcatgtgatggggtaattttcaagtctcgactgattgtggcattgagtcctcaaacatacttctatatccttgtgaaatctgtaggcaccagatcacgagcaaatttagacagccgatcaaattccagagtatattcgaccacaaacatcttcccctgagtcaacttcacaaa

SEQ ID NO: 265057 - DNA, 532 bp, Cannabis indica
ttattttttattgttttttattgtttcatattatttttttgttgtttttatataattttcttgttgttttcattatttaccgtaaaaatataatatatatatatatatacttgaacgtaaaaatagtaaaaaatttataaaaaatagtactttatataattatcccaatattttattaggatttcatcttgaagtggacctatggctcattgaatgtttctataatttgatataagaaacttaaacaaaatatctaaaattatatatattattttttttacatttttacagcctggtattttttagaagaaaaataatattattttcatattgccataatattatactatatttctgtaacatgaaaataatatcttttttagaacaacctaaaaataacgatctgtaaaaaaaaatccctaaaaaagtatatcaaaaacacagtattcagtgaaaacataaaccttttattgtttttagatatttatctcatttgacattttttttaagcattttacaaaaatattggatt

SEQ ID NO: 265058 - DNA, 534 bp, Cannabis indica
gacccattacgaaatctattacgtttcatacagtgcatgccttcaaatcccacgatggcattgtcatgtattacgacctccaacaaaagcactttggaactctgagattgtctcatgcatactattttttagtgggttggctaagtatttggagattatcttgtgcaccacattgtagagactaatgagtttaaattaaaaaaatttaattctaattcttgaataataaattaataataatttttttaaaatggacctgtatgtgctagatggacaaaatagttttttattctattaagtatatgtggactttgaagatgatttttttttggtgattatcttattactaataattttttttggtgattataaattatttggttcgacagaaaaacgagaaagaaaaaaaagttaatcaagatgtaaatgtaagaattaggtaaatttctttttgggtatattgaaaaatacctcttttatttatcaattaaccaaatttacctttaattttatatttaattgaaacatacctct

SEQ ID NO: 265059 - DNA, 783 bp, Cannabis indica
ttgaacaagctacgtacaagttacgcccttttcatgaaattatatttttttgctgttgtaagagttagctgagaataacaatatatctcatcaactcaaaatccatttatatctcatctcttctctctttttttccatcccaatatatataacaaaatcatatacctctaatttttttttgttggtagttacaccacttctcttcttctccagatttttatctttgcttattctcccaagtaatgttaatattcatcactttaatatcatatttttttttatctatttttttttaataaagataaatatgaaattttaatgttaatattcatcgcttcttcatttgtttcttttaagaagaatatatcttcatcatccatctctctcacatttcgttcttatcctatattattattatcaatttcgtttctatcgtttctattaaatttcagaaacagtaatgacattgattgattgtaaattaaaagaaaatataaaaagaaagtagttgtaacaattcattgtgaataatggatattgtccaaatattattgaaggcctattaaagtttattgggtaaatgagaaaatataaaaagaaagtttctttacgccccaaactccatagcctaatatgaaaaatgagtttattgggttaagagagcttaataaaactctagcagtaagtgatatgtatctttattcaaaaataaaactctatactatatttaatcatatagagtttttctttttggatcaaaccgtttcatgtaagtatggattt

SEQ ID NO: 265060 - DNA, 1544 bp, Cannabis indica
ggagttagagtctgacatgaggacacaatattcacagctattcaggttagatttcgaggacgaaatccttttaatgaggggataattgtaatgaacgcatttcataatatggatttaaaaagacaattagcactaattattggtatttttataattatttgtgaattcatttaattgtgggtcccattgttagaaatgggcattagagttacaatttctcaattccagagattttattaaactctaggtgtattatttagattatatatgcattatgttatttttataatttttgctcggcgacaatggaaaatgcgatggatggctagtttaatcacatgggtaagtttagaaccttatttcttagttgcatgtgtattggagaaaatagggtaccgagtttgagcggggttatggtttttgaccattttacccctaagcttaaattagcctaagtttaggctgtaagggcattttagtcttttgccaagggagtgagtggtggctgccttatgtgttgacacctatcctttttattttcagcaaagattagttagaaaatcctttttcattttgagaaaatcaagaaaacaccaaaaataatacaacctctctttcccttctctctctcttcgaaccagccataagcaagggggttgactgctgatttttggtgttttcagcaaggaattcaaggggaaatcaagtggaggtaattcctaggtcaattgttcttagtttttcaagctttgatgttggtttgaatttgtgattttgagttataggggctgttaggtttgatttgtctttgattctaattatgagctttatttatgttgattttaagatcgggatattagttttgatgtatcgtgatagaattgagaaagtttgagctttgaaactcaaacttaggtctctaatggcatgtttgaattcagtgagtttttatgggatttttctggttgaatatattgtttataccctatttaggtactctgaaaagtttggtggtaattggacaatttttgagcaagatttgggttttttgggggagactagtataaactgattaaccggtttaccagcacctgtaaaaccagttaatcggttttggcaggttccccaaacaacccattttctcaattcttgtccatttcagtgccttagttgggtgcttccctgttttctaggttaatgtaatccctagtgaatataagagagccttcaattgtagattcggttttcgtggattaggattttggacatgtgatttacccagttttaatatgtgattagggcaaccatccagcacgagactttccgttcaagtcggccaactcccttgaatctggaaaagaggtaagaattgcgtataatatgtaatatgaatataggaatgtatgtatatgtcatgtgtatatgcatgcttatatgtttgtaacactaccaacacttttacggttttggtgcagaggcattggtatagtgtataatgttaaatagtacattacggtgataccagcacaagtacgggaaagtac

SEQ ID NO: 265061 - DNA, 500 bp, Cannabis indica
aatttgagtcgccaataaaatcttaccactgtgtacacatgtgtatatatgacatatttttattggctttgaagttttactgtcacgtgaacacatgtgtacaatcccagttaacatttgacagtaaaatttaacttgcatcttaaatttgtaaataaacagaagttatggggattaagtgtataaaaattaaaatataaaaagtaatttataaataaatataataaaaaaatgttattccaaataattattgcaaaattattaactaaaaataaaaaattatgaaaataacttattaacttaaattaatttatataaataaatttaatttagaagtaattattacaaaaattactactaaataattaatgaaaagttaaaattttaaaataactttttaaatttatacatataatatatataaataaaattagagacttatctttaaaaaaatataaactttatttgtatactacgttaagcattataacataaatttt

SEQ ID NO: 265062 - DNA, 3194 bp, Cannabis indica
aataataataacaatataattgtatcacacttaatataccaaatactaatatatgtatataaactggatattacacttcttcatcttctttcactctataaacccatttacatcctatgggttctctaccttcaggaaggtttacaagaatccaagtattgtttttcaagagagctagatgctcagtatccatggctttgagccatttttcattttgcattgctacttttacagtgcgaggataaagagaagcaagtaacactcttggttttcttatacctgacttagaccttgtgcacatagggtgttgattagttggcctaattgtagaggatgtaccagcatcgggttgactggttaaaccaatggaggattgagtcatattgggaggtacagtggggttggatagggacgtgtcactggtatgtatgggttctgaggtgtgcacagtgggagagagagactgagtggggtttatgctagtgaagttgggacatttgttggtattaggacagtaggggatggtaaaggctgagtagactgactgacagctggaacagcaagggaaaaagtgggagcagttggaaaagcaataggggaatccaatggaacagtagacagacctgtaggttgctgtgaagagagagatgttgattgagaaaagagagcagattgagcaaaaggaaaaactttttcattaaacaacacatctctcgagatgtataagcgcccatctttggataaacacttataacctttatgggacaagctatatcctaagaaaacacaaggtgtagacctatagttgagttttactttattgtatggtctgagattgggatagcaaaggcaaccaaagactcttagcatagtataatctggtttgacatgaaacaagagttctaaaggtgtgctaagattaagttttggtgtgggcattctattaattaagaacacagctgttctatatgcttcatcccaatatttaagaggtaaagaggcttgagcaagaagagtcaagccactttccactatatgcctatgcttacgttcagcaacaccattttgttcatgtgtgtgaggacaagacaccttgtgtaatataccattatctgtcaaaagtttagtaaaagcttggtattcccctccccaatccgattgcaactttttgattttatatccaagttgtaattcaacttgagtcttaaaacttataaaagttggtaaagcctcacatttggttcttagcatataaatccaggtatgtctagagtaagcatcaataaaactgatgtaatatttatatccactagaagaagtgataggggcaggaccccacagatcagagtgaagcaattgtaaaggttcagtgtactcagtagtagaaataggaaatggaaatttgtgatgttttcctagacagcaagcagcacaaagatctggaaaaattggcatcagttttattactaatttggatattacaagatgatagggcactttgtacaattttagcagtagggtgacctaatctattgtgccaaagagaaaattgagaatttaaatggggcaaagtgatgctgttacaatgactttgagaggtaatagttggtggagttgtggactcaaagaccggtgctggagaacttctatttttggataggctttgaagttgaagagagtcaaacttgtaaagaccttgatcaagcttcccagccaacaaggtcttcatggttacctgatctttgacacaacaataagtgggatgaaattcaaagtatacattgttatctttggcaaattgggagacactaagaagattctttgtaatgtgagggacatgtaaaaggttatttaagacaagttcttgggaatgaaaaggagagagaatgaaggttttacctatatgctggatgttgaggccgaaccatcacccatatgtatttgtcggtcaccagtgtagtcagtggagaatgtcaagttttgagcattgggggtaatgtgatgagtggctcccgaatcaggaaaccagctattatcttgaacaacttctggtgtggcatacaagtgagagcactcggcaagattggcactgccaggaaagccttgaaatgtttctggaccaagaaacgatttatcaaatcggtagaaacatttttggactgtgtggccaagtttgtggcataattggcattgaagcttttgaccccaagccgaatattgtcctcgaccttgagtagaacctcttctttgtgatgatgtttgaccacagccagtataggaacctctagactgagacatgtgagaaccaaagccaggaggaggatttgtagcatagtaatgacctccggacactgcagcatgaggagtagaagtattagtaggataatatggtgaggaaaaggtacctttatttcctgaaaagggctttgtgtgggacaagtttacctcgactttagctatgtcaagctctgtggagtctttttccaaccttacttcttgagccatgagaagtgcctcaatttctgcagcagaatagtcatcaagtcgagtattgacagaggttacaaacacattatattcactggataaaccattgaatatggcttcaatatggtcttgtgcagacatagaatgaccaattgatgcaagaatataaacaagactcttaatctttaaaagaaaatcactgagagagccttgcattttagagtttccgagttgagttttgtatttgccaatattcgctctgttcaatgcagtgtagtagatacgaagagtatcccagatttgggcagcagtatcacacccaaccatgcgtgtgagaattttctcagccattgaagacaacagccaagaaacgagtatggtgtcctgttgatcccaagcttcatattcaggagagactctgttgtgtgaccgatcatcattagtgaggaatttgggggggattcgagctggatcaagatgattctgaaggcgatttcctttgatggcagcaacgacttgatgacgccaaggaagatagttgtgttcgtctaaacgaactgagagagtatgcaaaaaagtgactggagcagaacgcggaaggttaacacttgaattatgagacgaacctccattgttggccatgaacgaaggcttgaagagaataaacgaaccagacagaaagagaagaaagagagagctctgatacc

SEQ ID NO: 265063 - DNA, 1246 bp, Cannabis indica
tttagtaagaatgtacttctccattcccacagacagcgccaaatgttggtgagcaaaattcgcaacaccaaaaatgaataatgatattaataataagaagaaattatatgaagaacaacctgcgagtattcaacctaaaacgacgagtactcaaactgggaatgtaagtacttagtaaaaaaactggaaataacaagaagacaaagaattatagtggttcagtcagatcacggtctgcttagtcaactgttgcaagagtttttgtagggtctgatttcattgtggatcactcctttatatacaaagcaagtgtcaagttcattacacaaggattgtattcattgtcaatccgtttgtacattgattcacaataattaaactaaaacgtaaacattaatcaatgaataagagtttcttttcactaaatacatcaacgtatgcgacttccattgctcgagttggctgttcatattctggtgtaagctcccgggcttaggatatacccaacttttagttaagtctaagatgcctgcgtttttggacagtcgcatttacggacattgtataaccagccgataaaacctagacgcacgcgtctatattggtttatcgaggttgttcggtcattgggaccagctcgcattatagagagtcgaggtttaaactcgaggagtctcgctgatcctagctcaggcgaggtttaaactcgaggagtctctcatggacatctcagcttttcttggaaaattgagtacacgtgccctccaaacaggagtctggtctcgagtttctaggttagagaaatctcactataacaattatggttagaaaatagccatcggaaacacaaggcatgaaaatcaagaagctcaagaacaaaataaagtaaaatacaaagtgatcgcccgcacaagactcagaagcccattatcacctgatatcgatcttatctcagacatgacggctttccattttccgaacacgggaggagatggccgagtaggtgaaatgggctcccttatgcgaatcgcatgttcaacaggcctaggcgaggtcgggagtttcttcttcctcttcagcagagtcacctgcttttcctcagcttcatctacaggattcgaaggctcctgagcatattgtttggccctggcacctcctttctgttgggttttgtgccctaaataaaacccatttccatataatcagatttacttattagtaaagatcagaaataacattttatgtt

SEQ ID NO: 265064 - DNA, 1563 bp, Cannabis indica
agaggacggcatttcttacaactattcctaataatgtatatattttttgtcttatgcatggaacattttatgtgagtgaagcaaaacctaactagctaaaatacaataggtggccatgaatgataaactaggtcattaaaattaaaataaagagctgggccaaggccaagcggctatggtgacagtcatgatagatgctctagtcaagatttttctagtggtggaggctgcaattaatgaactcaggaatatgatctttgttgtgtttagtacaattgtattaactcgatttggactatgtaatgtaaacttgaaaccacaaaacatttttggatatggctcctaggacatgttatgaaatcgatgcaagtgtgttttgaaggtgaaataaatgtggtggatgatctactagagtaatcatctcaaaattatatgataacgatgtgtggctaatttccattaatagttttatgaaatcttctggccttggctagctagttaaggcaaactattctatatgcagaaaaacatattcctaatgaatgaggaagaaagaataacatattttctgttgttgatggcttttaatgaattaatgcgataattagaaattcaccattctctagcttgattctctctattaaattacaattgaaactatgaataatttatgctgtaccgaatgtggtagcggcttcaaatttgttttgagtttatgctgtgcaatatcttaacaacgtaagcattgaaaagtgaggtagagaggagatatgttgatagtattctataaattgtttgtataacgttgatggggatgaaatgaagaatggctgactaagactggtcaggaagctattgttacagtcattgaaagaagcatcgagattgctctaatgataaaggaagttaatggagaaatcatgagttttgttttataggtttgtagtgaaattgggatgaccggactgtgatatagttttctttaacatgtaacttgcaagcatgatatatcctgtcacttctggttatggcccagacaagtaatgaaatggatttggaatactagttatatatgaatgcatcaatcataagatagaattttatttttacctattttattaattcttttaatgtgcaaaaattactggatgaaatttcaatacttgatcataaagtggccaatacattaaagacatattataattgtcctttattaccattaccatcactttgggattggagaataaatgatgactaacaactgcagttatatatttctgcgataaaaacgagaaatttcgacaaatggaaaattttttaaagttgaaagaactgcatgatcacgctggtcaatctaagattcaggaccataaagacttgtttgccactggaaaggtcagcttattcgatggccaagaatattaagtggtgtcagtgtgttagtagtaatgactcgtgttcttgttggaaggaatgagattctttgttcacatattctggtgtaagaatcattgtaggttgaaaaaaataatgaatgttataaacatatgaggaagacattgt

SEQ ID NO: 265065 - DNA, 615 bp, Cannabis indica
cacaaacctctactccttttttttgatgaaaactcagcttcctatccatgtagcggacaaacttagggtcaaccttggctttgaccatgcttttgaactccctaggaagtattttggagggggacttatgcttttgtggaaggattgtgtagatgttaatattttaactttttcatgtaatcatatagactataatacaactcttaatgataatgaaatatttcatttcactggcttttatggtttcctgctgcctctcaacgtatttttacttggaatcttcttgataaagttttttataatgctcctaatctcccttggctcattatgggggattttaatagttatcttcttcatagtgataaaattggaagtagttattttgataataatatggacagtttttctaacattttgaataagtttcaactgtttccccttccttttataggtcacaaatatacttggtaaaataatactgtttctgaaagattagattgggctattgggtctgattcttggtgtaatctatttccttatgcggttctctatcatttgccattttatggttctgatcatagagctcttaaggtcatgattaatcaccatagtgat

SEQ ID NO: 265066 - DNA, 1971 bp, Cannabis indica
ttacttacaaacttaaaactttacatacttatactctatttaccaagacaaatctgtagtatttaattgtaacattcaacattaattttaatcttttcattattaatctgtagtctaatggtgaagatggatttggttaaccactaactaatttcatcaattaatacgcacctgtacagttgcacaaacaaaaggaaagatgtactgctatattaagtttgaccacatgaaaaaaataatatatgatatgaagtaatgaaagttactgaatggttaacctaccatatcagctgggatggtataaacccaatctcagaaaacaatattgatctaatgattttggttaattgttgagaaaattgaacccatataatgtttttaattagttgtacagagatagattatttatggtaaattactaccatgaccagttctaattaagatgaatttgcattggctatgtatatacataagctaaagaagaaaaaaaaaacactttttaataagttttttaacatacaagtaaacttttatttttatttttcttaaacattttctaaaaaaaggtcccgtttgacttaatttacataaggttttttttttttttaactttactattaaagaagttctatgagtgtttggataaaaataaaaataaaaaattagaagaatttgtaactctttaaaagaatttttgagaagttaattttaaaattaaaataatttatataatttctaattttagttacaaaatttcttttaatgatatctaaatatttttctaaaaaaaaatattaaaaaaatctttatataataattatttaaacatttaaaattagttaaaaattatacttatattatacttttaggtacaaataaagagtagaaacttaactagattttgggtctattagtactgctcggtactttaataaattgttcttggtgggtggaagttggggcagtgtaagttgaagaattttatcgaaatataatataccttatataaaaatggttttagtataaataaataattaactcaattttacatgttgtgtcatgcttcccacatcagtgttatgctaggctcgttttgtcactttcaagaattaaggatatacataatttataaatttataaattgcttcaattgatcgcatgataagaaaggaaggataaaatgggtactataagaaaacaaaagaaaaagaaagaagaaaagagaaaagagaaaagagaaaaggaaaaagggtacccaataaagtgcaataacatccaataataagtaaaattattacaaaacttaacccttacaacacagcatcacctctaaatcatttcaccatcaccatgacagtatactggaccaaaagtgtaactttcccaatttttttttcttatatgtattttttttttttcaatttttcgaaattaaattcgatcatttttttacttaattttaagtactactatatttttttttcctcacttttttcttttatgaataattattggtattgtttttggatactgaaatggggttaaagaaaacgaaatccgacaaatttagatttaaagaaaaagtttgtgaggaataaaagatagatattatatatatgatataaataagagtggtggtgcaatgattttggttagttctagctgcaaggggttgagtctcatctacttaacaaacatcagagccaaaggtaactttaaattatttattagtgctataattattatgatagatagatgttataataaattatagatctggatttgcatttagacccttctcgtttttattatgttaagaacatgcaacgtgggtttaattgctctaaatcataacaatggtatatatagttgctaccatgtacggtgaacgttatcaaacaaattgaaagttaatcttagtatttgttagactattagtagccatactattttttcaaatgctgttaggag

SEQ ID NO: 265067 - DNA, 516 bp, Cannabis indica
atttttttagataccgaaacaaataaggtgcatcaatgcactccttttaaagagtgcattgtagaatttatataacatacaaattattaaaatggggtgtatttataaatttttaaagtgtaaagaaaattggaaatgcaccccttaaaatggatgtactgatacacttctatctgttttggcattcgaaataattttttagtgaaattttttctcatgttcatgtacgttataattatttaagacgtcttacaaagatttaacacgctaaaaattagattcaaaaaatgtgttacacacgcgactatttattttatgcgtgtgtgaaatagactatttgaacattgttttcgatattataaattattccgaatttttcaaagttgtgtaggatatcttaaataattataacgttaataaatataaaaaaattgaactaatttttttttaatacttaaaatagttaaaatgtgcatcaaatgtatcataaggttgcattaaaattttaataataat

SEQ ID NO: 265068 - DNA, 696 bp, Cannabis indica
agagggtttttaaagtgtatgaatacacccttaggttgctagtattggttagctctcttggtgtatcattttcaaaattactttcaaagttagagagtattttccttgttgtgtgaagaacttgagtccaacaagtgcttagtgttttattattgtgttattctgtattgtttcttgttgaaattgtgcaagttaaacaccttggatattgttcatcaagcttcgggagaagtcttgttcatgagtcacttttcgggaggaaaagtgcaagtgagtcactcttcggaaggaagattgcaagttagtcactctttgggagaaagattacaagtgagtcactctttgggaggaagattgcaagttagacactctttggggagaagattgcatgtgattcactcttcgagatgaagtgtgcaggtgatacaatttgaagggagttcaaggtctcggcacttcagagttttaattagaagaatagattacaacagttgcggcaaattcaaagagggagtctttatttgtataagtcaatttgattttgtaatcatttgagattcatctaataaattcattctatgggtgtggccctatgcactaggagcaattcgaaagagttgctgataccacgtataaaatattgtgtgtcattttattttctgcatttttactttctacagtatatttctgctctgt

SEQ ID NO: 265069 - DNA, 570 bp, Cannabis indica
acaaaatacaaaataatatttacgctaaagtttctgctttttgttgaaccaagaaaaaacaaaaacatgtgggcgttgaatatgtgctcctcggcaaggtaaacttgtctgtctttgctcagccacctactgtccttcccctttaaaaattcatctattgttattcaaaatattttttcctaaagaaataattaagtaatctcataagttaaaattaaacataattaggaataattattaagtttaacatgtcattacaaacaattatttaattggagacaattaaaaagtatcaattatacttttaaaattcacataatccagtgagaaaattaggtgtcattataaaatattacaatttttcaacaattatttatatagagtgtatttttttaaaatataattattaatttgtttatcaaacataaaaataaattttttagattaagtatatagtataaatcttaaaataacatttcgatagatcttttttatttcaacgttattggagaattttttttattattatataagttataaagttcttcaaaaaaaaaaaaactaataacg

SEQ ID NO: 265070 - DNA, 803 bp, Cannabis indica
aaaaaaaaaaactctttgtattctagctcttattattttgtctatatatataagttaaaattttgtggacatttcataatttttaagtttttcttatgttttgtttttgctttctaactttttatgctttatttttatattccttaatatggctattaatttttgaagattttattatgtttttcttttcatcttttttctaattcttaatgctctattttcaggttatttattggcaaatctctcaaatagatattttgcaccaaaaactattaggtaatttttttcttgctttgaaagattatcactaatctttattgtttttattttcatcatatatctctctttctacatttttttttttttgctccattctactctttcttataaatttgattttcataagtttaaatttttcattttcatcttctattttgattttttgttgtttatatatataaatatatatatatttatataaactatccgaatctcatctcatattaattttaataagacataaaaccataatatctttaatttggataacaattggaagtagtattacaaattctatttagtttatgaggaagattttcaatctttaaaaataaaaaagtctaataaaatttaagcaatttaccgttataattaatatataatgccacatcacttttttaaaaatttttctttacagatatatatagatagattgtaataaaacctgcatacattatttaaatttttatattcattatatattatattatataattatataaaaaaatgacaaataaaagtga

SEQ ID NO: 265071 - DNA, 610 bp, Cannabis indica
attaaataatatttacaacattataataaatataatttattattcattttttttttttgaagtggtgaaacaaattcacacatgattaacaatgcaacaaattacaatcgacagtggaacctcctcgaactaggatagctcattgtctaaccgaagggtattttttgtcaaaccatgagctgcagaatatttatcgcgagcacatgagacaaaactactcccagaaatttagacaataaagttataacatcttcaattagcaccccatcacattgaaaaatactttccctttattaatagttgttgccagagttagcgaaattgaaaaaacatcacaacaccaaactaaaaatcacagttatattagaatgaaaatttctaaataaaagttaatatacaaactcagaatataacacacaacccatatcacaactcaaaataactaaaaaactaacaaaattctaagaaaaactagccaaaggtattaccctttggctagtaacaataagaaagcacactaatttaaaaatgctaaaaatcaatatcaaatagattatatttaaaatttaacttattgataaattttctgtaagtgtaggccctccacaaa

SEQ ID NO: 265072 - DNA, 997 bp, Cannabis indica
ttgcagcaaagcttcattatgcagaaccagatgttcaagctggttttaaagttgctaaaccggatctagacgaggttgctaagcaagcattagaatggaactcaactgtagtgtgtatggtaatgggggccaatcctccatttgttgtgttcgagggatttgtgaaacttatatggggataccttggcattgagcgggtggtcaggatgaaccagggacttacgattgtgaaatttaaggatgaggcaactcgagatttggtctcgagtcagggactctgcaattcgacaagaaactgatgatagtcagaccatggccacaagatctcgatactgtgaggttagtttgatccgttcccctttggattacctaatttaggattgcaatattggggcataaactatttgagtgctctggttagcacgattgggaaactgattatggttgataaagtaacaagggagaaatctatgattaaatttgctagggtgctggtcgaaatggacataacagatgatcccccatttttttatacattttgaaaatgaaaaaggccagattcaagagcattttgttgagtacgaatggctccccattaagtgcaacaacggtaaaggatatggccataacatggcggagtgtaggaagactagtccaaaggtctgggccaagaaaaacctgcaacatgaaaagaaagttacaagaaaagagtagcctactggtgtggaaaaattagaggaggacaatttggattccattgggaatgatgacccaattggagaaatgaagtagtcagattctaaggaagagaaaacttgtgaaaagtctagaattactactccagatcgagaatgtattgaagggtggaagaccccaaacagaatagacaatttaaaggtgaaaaaaagatctcttggactggttgagcaagcttctgttcaaaatactttcaaggttttgcaggaacaagaaaaggatgttgaaaagtgtaacctat

SEQ ID NO: 265073 - DNA, 725 bp, Cannabis indica
tcagggtaaacgaacagacttgattctgataaaacatacgaatcgaaatagaggtttccaacggctgaaacgacagtgcattgtacagcgtagaaggacttgttgtagagaatcaaagtcgagtcgccttaggcccagtcctcggcccaaattattgaggtccatttcagtcgggtcatctccgaagaaatggagctccaatcgtttctcgaacccttcaaaacccgatacagccatttggtgtgtttttttttcttcttttttttaaacaaaacgaagcgtttcaatgggagtaagtgagtgagtttaaaagaagaataaataaagtgaagaactacagggtgaaagagagaagtggggtgtgtgtggtatttataggagaatgaaagagaaagagaaggaaagggacttgggggggcatgcgggtgaggcaaccaagactcatgattgcaagcattatgaactgaatatataagatcacattagtgtttgtttttttcctcacccaaaaagaaataaatacactaattaaaattatatttgtgtgcccaaataattttatagataggaaaacaaaataatagacagatgcaggtaccaaaattatttccacgcgtaactgtatggcaattaggagaaaatacttttttttttatatctttcaatgactatatatcactttaattaaattaaaaaaaaagaaaaaaaaaaatgtgtatatatat

SEQ ID NO: 265074 - DNA, 1603 bp, Cannabis indica
ttaagaaaaaaaaaattagctattgctacattgttgtgtcatttggatatgattatatatacgtattttttaaatttttaaactttttttaattaggtaacgtatactatattcttaaccaaaactcacgtgtgtctatatataggctggattcgtaaatttgatataaaagttttttattcccaaattttacgaaaaatatggtgtgtgaatcgatttaccataaccaaaatgaaaagcaatcaatttcttattacaaccatttcaatttaaactataatattttaagtattttaaattaaaattaaaatttctttatataaaatatttaataaaaaatattctgttaattaataggatattctgttaaagttaacgtagaaacctaaaagtatcgttaaaccaataattctgttacatagccacactttatatagaatagatacacacactggtgcactcatatagaggtgaggaggcaatcgttccaaaaaaaaaatattgataaaaaaaatatattttttaaggctaattagaatttttgccccctaaactgtaacatgtatcaaatcatgctccttgaacttttttggctgttcaaaattacccctgaattattgagattgttaaatttaaggactattacctaatttcattcaattttactatttcagtgattgtttatgtactaaaccatgctcctcagactttgatatctaccaaattaatcatatccctcgaactttgacatgtactaaatcatgcattctgaactttggtaccattaaatttctctacctcaaactttgcatttgataacatggttcttctcatagaacctcttgactcaccagaacttttatgtcaacttgtacatctttctcgatttctctattgtcagttataagtgcaaacaaataacagaactttagcttacgacttaaaataatgttttcttgaatttcaataccttatttagaacagtccaattagctaggaataggtctgactcagttgacaatgggtaaaaaatggaccgactcgatccaaaaatcattgtttggatgagtggactcaattttcagaagcacattctgacatctactagatgtgtgtcggacctctgatttaagtgattcttgtgttagattcgtcttgttgaaagctttgatttgatatgtgtaatacttttatgtttggctctaatactgatttattgtgtgcgaaagcaataaatagcaggatatgatatatcaaagcaaaaaaaaaaaaacaatacaaaattatatggttcgacaattcgcctactccacgggaggcaactgatattattaaaatgagtagaaaatatacaaattagaatgtaaatttccacacaaataatatctgtcaagtatttttctcaaagtttttctacaaactgaataaaaatactcacatattcacttactatttttgcaaccaaaagtttggctatatatacaaatgctctctaaaatttatccactaccttgaactgatacattatgctcttcaaagagcttcatggaaaaaattcatttccaaccatatataattaacgagggagcataaattaataact

SEQ ID NO: 265075 - DNA, 520 bp, Cannabis indica
tcacttatatacgacctaaggaagctttttaacatggtataaggggcggaggtcctcgtttcgagtttcgccattgttgaaacttcgaaggtgcggtttgaaacggatgcgaattcgaacgtgtttaagcttgttcttgggtcaagggaggttatatatgagtgcatgggaccctaaggatcgtttttgacgtaagaaaacgaagctttaacgtccaaaacgaaagaacacaattttgactccattgaagacggtacacagccaacgaaggagacgactccgatctgccttctcggacctttttccttgggttgatcttgatcgttttgaggtcctgagcactgtggagagcttccccaatcgaaaggacgcttcaagagcaattggagacaaagttacactttaccggcgacgaaaccgacgagaacgccggtgaccacgttctgagcatttctgatgtttttcttagatatttttgtagattttgattccttattttattctaaggtgcttggtgaag

SEQ ID NO: 265076 - DNA, 524 bp, Cannabis indica
tacattaaataaaaacataaaatgaaaataaaagaatacatacttcttgatgactatcagggtatcctcaaaacttctcataagttgtatccttttggttgatcagaaactcacaccgtagtcttccaaatcgatccaccacacacaaagaataatgtgagctattaggataaattgtataatttgttcttgattaattctcaacacatgagcaagaattatttgagagaaaaataattttccttttctcctccgtatttcaaaaatagccttgaaaaatcatctcttgatttcttcaatcatgcttctatttatagtagttaattctccattaatttaactatatttaattatttaaataaatatctataaccgaattcagatactgatatttcagataaggaaatctctcaaccacttgagagaatatctcaactaatttgaaatatatttaaccactttctaaatttaaatatttatccaattgaattaattagttaagtaattaacccaaaaagacaaaa

SEQ ID NO: 265077 - DNA, 2239 bp, Cannabis indica
ttttttaaaaaaaaaattggtttggacggtttaaaccgaccaactgagattcaaaacggtcggttttaaaataagttatggattaaaaaccgagcaaaccgaacaatgctcagccttacataaaagtgttttatttgtgtattcaatcaatctttgttttcatttcatttgcaaaaatggggtacgatgaacttgacagctcaacaaacatgggcttttacgaaaagttcggcccaaagcaattatatttattcaaaattcggctcaaactatacatacatcgagatttccagtaaaacagttttagaattttgaaattttgaattggcgttgaagttgttccttgagtttgattgactggaaatttgagtttgagtgcccaaaaatgtcgacggggagtgaccctacttgggttggacggaagcctttgcgtcgaattgggggaatgtctgatgctctctctatcgcctctgatcttggtttttcagtctccccacctcctacacaggtcagattatgatctttgtaaatctaatatttctgattttcttttcttttttggctgatgataaattcaaattatgatctatctctttgtacattttacttgatttgagtgagtgtgtgcttaatgtttccatgtacgacttcacatttcggttgcccaattacttctgagaatcatatttgtatagattgtggaattgagttttatggaaattgtttaggagctttatttggaaataataaaaaaaaaaaaaaaaatctggttagaatcatgattagaacggcaaaaatcaagtaaatcgtctgggggagagagagaaagaattggcatcgttggtgaagagcgtattcagctcgatcaaggagagaagcaccaacaacttcttgatggagctcacaaaagaaacctacttgaaagcccttctcgatgggaagctgatgcaaacaaaaatccacaatattggatgacagtgacacgggtgggtgaaatatgcagagaagaatcactccaactcttctcaagtcccaccaagaacttgagatgagtttctgatgttaaaaccgaaaggatacgggattgagcacaaggaaatattctctagagaaggtgatgagtatatctagttatctaccattccaaaggacacgtcctcagtccaggacagaccagccttcgcaatcgactaaataaattttcatggaatttatccccaagaagtttgagaaaaatgttactttggtgctcgtccagttataataaaatggtctctcccttgagttggtgaatggaacttgtgttgatgttatataaaggccctttttttttattttcactctttagcattgggaactttctgttgtttctgcatttgaaccttatttgcttctaaagggaaagccaactaaatcattttgtactgtttctttttttttttttaaaaaaaaaagtgtcttgctacttgattgccttaaataagttaccatgcagggagcattaatcattttagggtaataatgttagttgtgaaaaactcaatgtatgtacttgtggtttcacaggaagaacttcagaatttatcaactaccactggggaaaaaggtgatgacttgatcagagttttgagagaacttaccgctgtacaaaggaaaatagcagatctgcaagtggaacttcaggggagaaaggtaaggtttaacagtttgagttgcctcttcttcagtttgcaggcagtagtttttccatgaattatcaatggtactgtaagatcacactctgatctactttctattttatactgattcctgtttaattgagttcaaaatttattattttaggatgacaaaaacgtggcatatttgactcatgtaagcgaaatggaaaagaagtgtgaaacattgggaaggattactactattttgaaggatgttattcagaataaggtagctcacctggttccttgtcaacatcgttttttggacaaaatatgatgaaaatttgagctttttgtttgagctcttatctctttagaaacttccggtggttttgattgtttatgttttccacagatttaccaacatacttttgtgatctaactgtaattgtgatgtttatcattgtaaaattggagattgcaatgttttttaagatccaatggtttgattgcatctatgctgatctcaaataagtataattgtttttagttctacatctacaccagaatcagtggctgct

SEQ ID NO: 265078 - DNA, 616 bp, Cannabis indica
ttgatttatatttatatacattaatgtttatagttttgatattgtattttaattaaaaaaaatcttattaaattataataattcatactaaaacagataataaacatttatttttaataaaaaaatattgaacttgtttattttataaaactgtttaattaattttacgaaattgtttattttgagttttaataaacatatttttttttatttaatgattaaaatgtatgatttcatataataagttttcaaaatgtataagtttttaaaataaattttttttgcacattttttgtaattatgttgtttttgttgtacatttatgaaaaaagcccttataaaaatatagttattgatgacttatttttatcatttatagggtgtataaatgatgtaaagttaatgtgagagttttgaaccatttgaagttattttgttaaatgctgaaaaaattggtaagcggttacttgctaccaattttttgaaattttgcactacaagtgacatgttgcctggccatttttttttttttttgacgtggtgaacagagtcacacatgattaacaaagcagcaaaccacaatcggcctcctcgaaccaagatagctcatcgtcta

SEQ ID NO: 265079 - DNA, 956 bp, Cannabis indica
tagaaagagagaagaagaaaaaaaggaattctccattcattgatacaagaacaatatcatacatttgtacacaacttagaacaataaaggggaaagagaatgagctaatagaattaattagaaaagttggacactaactaactctaacagaaagaaccaaacaccattaactttaactgtcttaataattcgaatgctaaaagaagagatagttcaacaagtgagataaagcttaaaaaagtcatacatatctcataaaaaaaaactaccaaacaacaataagctaatattacgataatgaagtcatgaatcaaaaataacatcatcctataacggaggcacaatattgctaaccaaactataaagatataaatcatgaaacttatatcttgatactccaatttgtctaacaaccctagtgtaaactttgaatagattaactaaaaatgacacaaagccaatgtcttaaagacaacatgataacacactaatatgtttctctggaaaaaaatactatttcatcaatcgagttaagaaacaaaatgaaacttacaaaaactaccaaaagaaaaggcaaacaaagcaatggaatacaacaaataatatagaaaaaccaatgccaaaccattaccacgcatccaccctaaaagccatcgccgcaaacaaccacattcttccgcagccagacgtaaagcagaggtgtcaaccaaaaccaagggagtaagaagaaagggctagagaaactttagtctaaaaaattgaagcctctaattgaatttatacaaatcaaatttcaattataggttatacaattcttgttgagacccaccttacataatcatgattaatgtttatggtggctaatgttaattaaaataaataggtatgtatggaggaagaacaaaacgtgaaaaaacctaaaatgtgtcatacaacacgtgtataacaattttttt

SEQ ID NO: 265080 - DNA, 797 bp, Cannabis indica
agttgtttttttctcacagcacagctacagctacttttctcacagtagtgtatcgatatgctacaactaaaaaaggagtaattttttaaaatacgttttatttataattttacagtactaaaattttaaattacaaaaatacaatttagttaaaaaaaataaaaattaatctcacgacaactataaataaattataaaacaacaaaaacacttcacaataactataataaataaactataaaacaattaaagaatatttattgtattttgtaaataaaaaattgagagagtaaaaataaaaaaaaattagtgttaataattttattctattatataatttttttttttaaaaaaacattaacaaaactaaatttcaaagatttagaataatttaaaagattaagtgggagcttgttttagatgggtttcgtatttggtagttggggcttctagatctaattattttttttcgtgtttctctttgtattttgtgtttaatggattatttccgttttcattccaaaaaaaaatatagattaatttttttattattattattttggaagagattagaaaaactgttttggtacttaatttataataagtcaactaaaaatattatgttaaggaaaaaaaaagggaaagaaggggataagcatggagaagttgagttccatcccaaaaggagagaaccattgggtcccttgtcatgttgttgaggtcactgtttatatatacacatctgtcttctctagtaactgtagtgctttgttttaaactatttatttatttattta

SEQ ID NO: 265081 - DNA, 897 bp, Cannabis indica
aaataaattttgtatttttgaaatttttacaccaaaaatttacacaatttattataaaaaaatcctacatcatcatttttaccttttctctttcttttattacacatataccacttgcacatcaattctatgcacaaacatgtgtggcttccctatcaaccatcaatcaacttccaatcacttccctctcttttttccttttgttttcatttgatttttgatttcttttcagttttttttttaaagattaagtaatctccattgttgaagcataacttcccacgattcctcacagttttttccctcttatttttattcttccaaaatttttcaactcccactaaagcaatcccataaccgtttccctctttcattttgtttccaatctctatttaaaatggatatcacccgttcatcctcatctccttctcatcctcatctccttcccctgttccaaaaaaaaattccaaaatgggattgaaatctctagctaacaaagctaagggtaaacgtccaattattgaagaggaggattctgattttgctcctcctttaaccaagcgtgggaggccacatcctaagaagaaatcaaagctcagtgtggaagagaaaatggttgatgaagtttctgggaaaaaagctagtgttgctgccgatgttcgaaccgaggttggtttttggtttcattttcgtttcccccttttttgaacattttattgtatttccagtttctgcgttttttttattctagtttgtgaaattttagggtttcgattttaaaatttcatttgatattgtttgattttttaggtctttaattttgtttgatcaattttattttgttcttttgtgggtttggctttttaatttgattgtatttactttcgttacagtgtt

SEQ ID NO: 265082 - DNA, 502 bp, Cannabis indica
gtaaaaaaaaaaaaaaaaaaatcttttaaacgtaaaaaaaataatttttttgtacttaagtaattattctttttttataatgtgagtgcggagcagtttgaaccgcgtattaacaattcaaaaccacaaaccgcaccgcaccgcgaagtttaggaaaaattcaaaccgcaactacaccgtaaagaatttcgaactgcatttttttttttttgttgcgatacggtgtggtgcgggcagtttgagcggtttgatgaacaacccaacaagttaaggtcaaagtccaaagtattgatttaaaaaaattgtttaaaaaaattttgaaagtgacttttgttttcaaaattttaaaattttgattattagttaaaatattgaaaagttaaaacagttctatagaacatatttttataaaatattttcacttttctaattaaaaaaacaaaaaaaaaaactgataaaaaagtgttaccaaacgtacctaattaataaaaattacaaaata

SEQ ID NO: 265083 - DNA, 743 bp, Cannabis indica
tcttttgtttggttgtattttaaaatattagaatattattcccatgaaatgccctttctaatattttagtgaaatgactattctattttaaaatagaaagaaataccattccaatgtaatatgagaaaaattttaaaaatttttttatcaatttttcttatgcattttaaattttattcattcatattcctattctcattctcattctcattctcattctcattctcattctcattctcattcttattctttcattcatctcaaccaaacgccacattatatctttgccctgtcctaatgtcttataacttataagctcaagaaacttagtcagcaatgaacaatggtctaactagaacggttcagaggacgctaaactgtaatctaagacagatagaagaaaatagtaacatcatcaactgaaactatatcctcatcattatgaaagcattttttcaactgtgtgataatagatctcagtagcttttgtcataggcttcaaatttgtccattatatagaaatatgcaaacagaaaaaagcaaccgatagataattattagtcctaaaaacaacaaaaaataaatagttaaacaactatagtgcatacaatggattcaatcaatcaatgcaacaaaagggtttttttttacttctaatggaagtatttgtatatgaaaccaaacaagtaatgaacataaaacaaacaaagtttgtcaaatatttactagaatccacttactat

SEQ ID NO: 265084 - DNA, 1006 bp, Cannabis indica
ggaagaagcctttaaagggggggccatatgggaagaagtgaagggagggggagctgcaggagtgtgaaccccggcaagtttggccaaaatggcgtccatggagatgcctgctataacaaaagaaagaaggcaagtgttagaacatccatgggaaacaacaaacactcagatatagcaatcaagctagtcctagcctgactctctaattcagccctagcaaagttccgaatcttaacgctggcagcatcgtctccaagatagctgttcgaaagccggaaccagctggatgaaatataagccgaagagtctaagggaacgggctccggaggaccagaacccatccgggaccgacctaggaaatctcctaagttggaaaaataaaattccttcatatggtctccccaccgggtcgagggcatcctaaacctataaagacgctcatcgaaccctacaggcctaagactggcatattcgccaacagaaggggcgcaatgtactgctaaaggagacttaccggagccggaagtgctggcgccaggagccccagtgttcggctcctgagccgaaggcttctagggagcccttctctcagccgagtcccaatatgaaggggcttcccagcgatcgcctggcttctcctctcgaccgggctccccacacgaagtggcctcccgaaagctgcttgagccttggagtaagctttctcctgagccttccggtagagatagtcctggtacttcttctcggcagtggcgatgatctcgtcccggaagatcttctccgcggcaggcgccctcacattgggacagataaccctggaaaggttagagtcctccacagattggtgcggcaggatgagcttagccttctggcaattctctgtcgtaaccaggcccccgacgtcgaggtccgcccggtcataagtggcgaaggcctgggctctccgaagaaagacctgagtaggcgcggtccgctcataagggggaatcctaacccactccgtgag

SEQ ID NO: 265085 - DNA, 883 bp, Cannabis indica
aaaaataaccaaaaaaaaaataactaaatcaaataaaatcaaaacacacaatacatatcaataatttaaaaactaaatataagtgtaagttcttaacctagaaacaaaataataacaaagtaacttaaaattaaaaatatgcaataacataataaaatagagcaacctcattgcagaactctcaaaacatgtgaaaccagtttcgaacctgtaaacccagtgaaaccagtttcgactctatgaaaaatcatagaacaccttttaaatctaaacaatttttaaacataagaggctaggcctggctcattttctaaacaaataatcttaaaaataaactgttgttttacagttcatggtactcatgatatactttaacagtttgactagctcaatcaattaattaataagttaaaataaatattttaaaatgagaaagatattatgcactcaaaaatttaatatcttattattcaaatatacattcagcttcaatcttaaaaaaatcaaatgcactagtctaccatcgtaaaaaagaaacactagaggttattttatggtgccaaacatataaaaaggtgatatctcgttattgatataaaaaatagatataattatataatagatatactatttagaaatatattatttctacaaaattatttatataggtacctatactctatgatgatgaattagaagtattgaattgctaaaaaaaatgatgtattattatatttagtaatatatcattataatagtgtttaaaaaaatatgtcaaattcggtacaatatataacattaagtgtgactaatgctacgaaaacaactacttttagtgacaaaattttatttataacatgattttttttgtgactaaatgtga

SEQ ID NO: 265086 - DNA, 3749 bp, Cannabis indica
aaaaacaaataggaaaagacccagtgctacgcaatcaactacgggtccagaaagctattagaaatggtgaaaacgatgagatgagggaaagcagaattcagcttcctactaaacgcagaatcgtctccgacgaagaagaggaagctcacgacggaggggaaccggcgcaggttattacccaactaccactggtttatctaccgggtattggagaatttgccccttatggtaataacaacaaaaaggtagtcatacaggacttaattgatgcagcccaaccgtccaattccaaggacaccagcacacggagcaactccacagtctgtaacgcccaaggttcacagcataacggccacaagattcaaaatgaagcaaaaaaagttacctcttcaggagaaaccacgaaatacaaagggaaaaagcctctgcataacccccctcaagaagacctgcctgcgcctggggaggtttcaaaccataacactccagaaacgaagagtcactatcgcaccagcaaggataagtcccagtttgactcatatgaaggaagttattcaagtccttcatatagggcctctcctttgggctcccaaacacaatatatcaattggccttctaaagagtgctgggcccaaccaaaggcccgtgaattgtttatgggctctcttactgtggacaagttccatagggaaccaactctttttaacccactacataccattgaggattttagagtggatgaacatttaaatggcccacgtaagagaaaggcttctgatggtttcatgttcagcccaactccaaaatccaaaacgcaaatgaattatgagtttgcaaagatagaacccaattcaggtgggcctccttgttctatccaaggtattgaaactccaaattctgtaactgatgtgccaccatatgcgaatgaaacatggcatgctcctcctcctgtcccgtttgttactgggcacgacattgaaggagccactcccaaacgcagaggaagaccgaaaaagaatattcaggctagcactgataatgcacaacctttgaaacgaagaggaagaccacccaaaaatcactcaggtctatcggcaaattcgaagcagttcaaatggacaaacccgtctaaaacgaaaaatagctacacttctacaatcaaacaccactgggagggcaaaaccattgatctgaaaattgaccttgacaaccactttgtggtagttgagataacccattcagtaccaaccgcctgccaaatacaagaactagaggaagatgacgatcgaacgaatgcactaccaactcagaactatggtgtggatttttgctttggggcctcggagacttgcccaaaaatgtctccacagtcgccatgaaagtcttagcttggaactgtcgtggtctcgggagcgccacgacagttcgacagttggcggctttaatctgtcgccataaacccgagatgctactgttatctgaagcaagaataccattacaaaagtttgaagcaatctgcagaagacttcatttcgaggaagtcatctacgtccctcatgttggtttgtcgggtgggttgggactctgttggatgaaaggcgtcaaatgcaacatcaattttaataataagtatggaatcatgggtagtatatcttcggaccccccaggagtgagttggcatttaattgggatatatggccctccgcatgagaaggataaggagaatttttggaaagaaattggcgacttggccttatcctcctccaacccactactcctcattggggatatgaatggcacactccttgattcagaatgcataaactacaccaaacaaggtaattcagcaagatatgccttcgatttccggcgtatggtggacagagctggacttattgatctgggtttcataggccctccgttcacttggtcagagagcaacaaacaagccagtgtaggtctgagacagaaaagggccagactagatcgtagcttggcttctatggagtggagaattttatttcctgatgcgattcttaatcatctgtcggcatccacatcagatcaccgtcctattctcctcgataccagtggaggatacaaaggtaagcaccatccatttcgatatgagaatatgtgggcaagagaccaaaggtgctactgggtggttaaggaagcttgggctaagagactccacaacaacccaatgattaacttccaccgaaaagtgaagaatactcgtcaaaaactcagccattggaacaagaaccgatttcggaagattaatgttcaaattcaggaggaaacttcttatttgcaagacgttgagcaatctaatccggacgatctgaatacaattgaaggggcacaacaacaattaagtgaagctctgcttcgagaagaaatccactggaggcagaagtcgaggattcaatggctgaaggagggagatagatgttcaaaatttttcatgacttctacaataatcagacgcaggaaaaacttcatacaatgcatcaaggatgctgaaaaaggaaattggattcaagatcagaagaaaattgctgaatgttttttaaaaaactttcaggatctttttaagaaagatccaaactgttgtaccccacaccttatcgatcttttccccactgccattacccctgaggagaatttgatgctaaatgctattcgaaacccagaggaagtgatggtggcgatagctgaaatggggaaggacaaagcgccaggcccggatggactcccggcaagcttttatgctcatcattgggatacaatcagcagtgacctccacgaaatggtaattcacttcttcacccactctgagcttcctcatttcataaacgataccgcaattgtcctcattccgaagaacgacacccctgtttatacaaaagactaccgaccgatcgctctatgcaatgtggcctataaaataatatcaaagatcattgctacaaggatgaggggaattcttccaaaactgatatcgccaacacaaactgcttttgtcaaaggaagatgcataaccgagaacactttgatcgctagagaggtggttcactcaatgaagaggaaaaaaggaaagaggggcttcatgatgattaagatagatatggagaaggcttatgacatcttgattgggatttcattattgccgttctttatcaaatggggttctccaattgctttacaagttggataagggcttgtatatccaccaaggaaatcaagttacttctcaatggctcaattgaagggaaagtcaaacctgaatggggtttacggcaaggcgaccctttatcccccacgttattcatcatagctgcggagacgctttcaagactcatattcagcaaggaaaaatcgggtgcactcaaaggtttcaagatgggaagaaatggaactgcagtgaaccatttaatgttcgcaaatgacattattttattcggccaagctacactcaaggaggcaagagtgtttaaggagtgtcttaccaaatactgtctatggtccggccaatccataaatgctcagaagtcttccatccacttctcgaaaggggtttgccgaggaaaaattcaagcgataacccagctcttaggcatgaaaagaatgtctcctgatgcaaactatttgggactccccttattcaagaacgcaagaagatcagaagagtattctccacttgttgagaaagttctgggacgagtcaaaggttggaagacaaa

SEQ ID NO: 265087 - DNA, 3049 bp, Cannabis indica
aaaaaaaaactaaaaaacaacgaacgaaaaatcaacctcacgacaaatataaataaagtataaataaactaaaacaaactcatgacaactatagacaaactataaaacaaccaaaaaaataatttattatttttactgaagagatatttttgtaaataaaaaaatcaaagtgtaaaaataaaaaaaaaatctgtgtcgaattatttttgtaatttttttaaaaaatttgggtcaattatataaatttatcaagaattatactggttcggatcaattgcaatattatcctactcgagttagagcacccccactagaatctttccttgtgcaaagagaatataaaacaggttacatatactaccatgacaatttgttcacaataactttgatcccaagcatctacaataatggtggaatcctcgctgcccagataatgttaaaacaatcaaaatgcatatcgactcgcaatcaatagagtttacactagtatgttagaattattattgtgtaataatataatcataagcataactccataactaattattaactatgtgcctaatattttttaataatcataatgaaattatttacaataactaattgtattagaggcatatgaaagcatctttgtgactataattggctcattaaattatagtctaccattaattaaatcatatatataggtccaattagcccataacctgtaatgacaacttaatctttattttgtgaattagtagataattagagtttattttcaaaagtaaacttttaattattattttatgattatggagatatatttgaattctaggtgtattaatcatgatataatataaaattttatgtttttcattatttttttatgttttcatatttttatgttcgatagcagtggaatgcgatgtttggcctataaagtcacttagacaaagtatagtatcttatttttagcgggaccatatagttaaacatttagaatcagaagtattcggagttatggctttgtaccatattatccctaagttttaagatttcttcatgatgaagaaagggggtaaattgataattttactttagtttgtctttagtgggctaatggattttgtaataaatcctatggttaactaattgattctaagttgaaataataaaccattatctcattatgttattaagtaagaaatcaaatccaaaaaaacaaaattgtcattctctctctcttttggtgtttggccaagataaaccctaagaaccaagggctttttacatcaatttcaaaccaatgatctctagccaggttttctagaaaccattcaaggtaagattttttttaggttttctttgaagttcataattaaagaattggattttcatgcttgacttttgagtatagttgttgtatgcgttgaacttgcttagaattgttttctgaagctatatttgagttaattaggttgttttgtgcctgttttattggatgtggttgtgtttgagctaagtttgaccttttgagcttaaacttaggtcattaatggtggattttgatattgttgagggattatgcatttttcagttggattatgtttattatggtttatttaagtgttttggactgtgtggaaaagattggaatcattttggttaagttttgagattttgggtcatttttgctgtaaaaatggtaggccgtttttccaggccgaaaaccaaaaaaaggacttgtcgtttttacagaatggcctgccattttttggggtatttttttcgaaatctcattttttaacgttttctcagtatttaggttttagtcacgttatttatcgataaggaaacttttaattttaagtctaagtctccaaaaagtgatttagtgtgtcacttatcagttttgcgtatgttgtgacctaagggcttgtaaactgtcgagcagcagtttcactcaagttgaacagcagtgagtacgagcggataaagattgtacatatcgagacagttaaacttggagtattcgattttcagggtagcaggctttattttgttagtcgctgagcgacaacttttgtaactaatattttgtacgtaatcttagaaacgaggtcccgaattatgtaaagtgtttaattaatcaagtttaaaagtttaattaagaaaattcttaaattatccacgttttttcataaatcatttgattagcaaaacagtgcacaacattaaaaaatcacgataacacgcctgtagtagggtgttacattaccccttagggttcgaatgtgatatagatttgataataagaatgtttaattaatagtaatgagatagagataaggggattccgccacattgacttctcttcaaaattcaccattgaaccttttttttttttcattcatcacattggaagattctaagtgtcaaatggctcacatggacaacatggacaacatgggttttcgaggtatattttagtgctcattaatgccctaaataaaatgctagatctcgttgatatttatgagtattgttgatgattattaattaatgatgtggtgtttaatgctcatatgttgttatagttttcaataattggtatcaagatttagtatatttggatttagagcttaattttttaatgaaagtcattttttactcaaacgaataatctgattttttaaaataattttggattaatgtgttcatgataaataaatattaaattattcttttagatgtgtttatatttattttggatgatccttttttttttatatatattttttattagagaatactaagtttagaggtgtccattaatggagaaaacttattttcgggtttatgtttttgggtaattttttttgaaaaattattttttttgtaaaaatgttttgtcattagtatgggtttaacttgtttattatttattacttttaataatggctctcaaaacgaaaaagaaattaaaaaaatgaaaacataaaatatgttatgctggcatggaaaatgcatcagactatattgatgttgggtaaattaattttta

SEQ ID NO: 265088 - DNA, 1394 bp, Cannabis indica
tttttaaaaataatcttatatttagtccaaataaaaatttatcacaaaaataggaaaatacaaaataacaataacaaaaatattattaaataaaataaaacaataacactgttataaagctaagaagaacaacataaatgaaaataaacattaagtaaaaaaaaataatttaatatgatcacttaaggatcttagctttgaagaatatcaaaatatttgttatatggacttgatgtattttaagaaacttgattttcttgagatgactaatattgttggtgatctcttttttgcgtaatccttgtttgctcattttaaaaatagtcacgtatattaggatcaattatagaatctaaatctttcaataaaattttgttctctttctgatattcttttaaagccaatctttgcttttgaatttcataatttttttctctagtggagttgctccaactaaatatttcaatgagctgttgattttcttttttaatagttttgacaatagtagaaaattgttcatcatttttcttttttgattttgctttcttcaccccaataggtcgtttagatgaactacctctatcatcattatgtctactgaaaatgatgaaagtccgtgagatgtagtttggggagactcggactccactgagtcaaaatttttgtagcattaatattatctgtaaattttccatatccttaagtatatcccacacatgattaaatttgaaacctttcttgtaatttttatcttgagctagtagaatcttgactcgattcaactacaaaaatcataaaatataacattaaaaataaaatacattaataataatttaaatgttacaaatacttacgatatcttattgagatgcaccacttgaatttaattcttcaatttgttttatgcatcttttgaatttagaaatcgctttaaagatcaataatatccgaacatgcaacaatcttttgtttctatcctgagtgacatacgtagttttagaattattgaaatcattcgcgactcgagaccaaaatggatcactggattggtttttacctatttgcggatttttagaaatatcaacataaatatgacatagatacatatcattctcatttgtgtataaaaaacttctttgagtgtaatgagtagcaattattttgtgagagaacgtaaaagaaataattatagcctgaattgaaaatgtgtagaagaaaaatgatgcggcaaggatgtaagtgacacagagatacaacatggaatttatagagttaattatatgttcacataatgactttgtcatcacattcaaaacaaaataatcctcatgtaacgccctaatgctaaggcacattacagtgatttttcaattacattgctatctttgctaatc

SEQ ID NO: 265089 - DNA, 544 bp, Cannabis indica
agactgggatcaaaatgctggacctagatctggaccgagatcctgacctacacccaaacttggacccgcactcgggatccgaactatgacctagacccgaacctagacccagatcggggtccagacctagacacaaacccgaacacagactcggacccgaactcaaacacccatacctagaatcataccaaaagctacacctggacacaactcgaacccagaccaggataagaaccaacgacttagacccagaacttaatccaaactcagatcgggattggaacttgggactcggacccaacctagaccaagacccagagcgcgaacccacacccggagcctgatcttgacctagactgaaatcagaacgcgaacccaaactcagatcagtactcgaactccgactcgaactcaaacccaaactcgaactcagaatcgcaaatggaactagaatcgaactaggactaggaccaggactaggacctaaacccaaacccgaacccagatcaaaacccagacagctaaacccgaaccgagactaaga

SEQ ID NO: 265090 - DNA, 547 bp, Cannabis indica
tttttttttaagttatataaaacttaatacttaattatttccaataacagtataataataaaaaaaaaaaaatactaaacaccaataacatttattaacaattctctttataaaaatattatcaccttacaaaaatataacacaattcaagcaaaattaattaatccactaattacttaaaaaggccataattttgcgtgtgaatttgataatatctgcaacacttagatcatgtgccattctggtcaaaattatttgatttatttatcaaaacataatataataatatcacatatatatagtctacgattacatgaattaaataagtttcaatcttctattctatatgtaaattatatatttatataagagctctaacattcagattaaaagaaacaaaaagcttgagcatatagccatggctactcattgtgaaaacaaagcatctttgttatcatcagctgtggtggtaatggttccattcccagctcaaagtcacctaaaccagcttcttcaactctctcatgtcgtttcatcatcatacgac

SEQ ID NO: 265091 - DNA, 1079 bp, Cannabis indica
atcaccaatattggacgttaaaatctgagactgagaaactaattatatttatcagctagttaaaaatatgacactgagaaacaagttaggtaggttaacaaaattataaattaaatcttagaacaaattaagtaaaatatcaaaagcaacaattacatacaaaaataagtttcataatacaataaaataaaacagtgaacaaatatatgtcacttgttaatctcgcttttagccaacgacaatgagtcaaattaaagcgattgaaaataattaaataacagaatgtaaataatataaagtaaagacaacatcttatttataaagattcgaccaattataattggcaatatagcctactcccttttttgttttattcacttgggagaagatgagcaagaatgacttattctctctcgaaaactcttacagtaatctctgtttcatgagtatcattaggaacttcaagtgacccataatcttgttatgccctttcataagtgacatatgcccttccttcatagcaatatgctccctctcaacactctctaacctagtcaaaatggcagaataatatggttcttgagactctgctactgttggtggaggaactgaacgtgcctccagttataaagatgatggaagtggtgtaacatctctaaatatttgggtgcctccactgctcctctaactgttcgacaagattttttgcttggctaagaagagcttcatgtgttggttgtccatcttcgccaattactagttcgtccaagtcgataaacaatgacgcctcacctccactcacggtcctcaaaaacacttcttggtgggatcggaaacataagataaagtacaatgtcaactgaaaacaaaaatattattgtaatgaatgaaaatttaaaaaaatgtaatacagtcgaaaaaataaaccaagatgaaggagtaaaaaatttacatttttggcgaacaattttataacatcctccttattaatgttcatatttttcttactcttagagttcatcattcttaggaagccattgttaggctatttttagcctatgttttggatccaatttatg

SEQ ID NO: 265092 - DNA, 511 bp, Cannabis indica
tcttagttaactcggtcagtggcatggagattttagagaatcactcgacaaaaataaaataaattaattttcaacataaatataatttttctatataattaaatctcttaagaaatatatcaaatatttaagtgtctagaataaaatcaacttaaatattaattttgttatttaattaaatatatctagaaaaatcttaaaaagtctacctaaaaataatctatctagattattcacaaactaattacttattttctaattaaaatataatatattttaagctatttactttaatttaataattaataaaaattacttgagttaagttgatctaaaattcattaaataataattttttaactttaatctaattttcaaaacaaattttgaaatatctgcaattaaagtaattgcatttcaaaatttatgttggaaacgattcttaaaataaaataaaatatactctaaaaattattctaattaaagttgatctgaaattgaaaaaatttcc

SEQ ID NO: 265093 - DNA, 825 bp, Cannabis indica
aaaaaaaaaaaaaaatgaataaacctataaatttctaccttaaatcgaatctataaatccaaacacccaaaagtacaacaaaatgaaagaaagaaggtttgaaaacttaccttagacatttgggacggtggtcgtgggttgggacaaacgtcgtgggttggggcagacgtcatttggtggttgtcaattggtgagagattccaagatgcgtgggttttttggtgagaatctgaagttgtcggttcatttgaggagttgagtgaagaagcgagagagagaaaggagggagagagagactagagtgagttttcaaaatgggaggaatgattttgggtttaatgaaaagttgggctattctaacaatattaatatacttaagtttagtgtatcaatgtcctattggaaaacaaaagaaatattagcatagaattatgatagtatttaattgggagtttgatgggttgtgcacattagcatagaaactcaaatttcccacttcaataaaaaggtgaatcattaacatatttttgagataagaagattatatgggatattttcattagaaggtgtcatttcaagcatagaaactcaaattctcccaaagaaaaaaaaaaaaaaatagcaacgcgactgctggaatatgaaaatttctactcaacattctcagatttgaaccgagtatgaagatgattataattttaatttttatatgaaattaaatggataattactaatggttgaaaacgctgcattgcaattgaagctctagctggagacagcttgatgtgtcttttatctcatagactgcttgaagttgcaacttaa

SEQ ID NO: 265094 - DNA, 1125 bp, Cannabis indica
aagctacatgcaaagctgaatatctaatgactcacattttataggaatgtgttatgaacgaggcaccaagatgccttgaaaagataatgcttaacctaaggtatgaatagaaggcctaactatttatatcagcaataaaaaatgtacaaagtaattcacaagatgaaatattaatctaaagtatgtttaagttagcataaagcaaattataactatttacgcgaagtagaactaataaactgctcgtgaatagaatacatggcagacgataactgctcgcatgcatagtagattattaactacttaagcaatatcgaaggaaaaacgagatcaatggaaatgcttagttagaatattttaagtttgatcaaagtataattgtttaagttgtgaataaaaatgcaaacaagcaaatatattaagttcaaatgtaaagatgcgaggcaataaataaaagataaaataaaaagcaaagttggccatccaacaatacaaatttgtctttacaatagaaaatgccacaaggggcaaaccattgtctcggtcatatggccattttcctaaataataaaaaaaaattaaaaaccaagcctacattgtaggagacttggatagatcttcttgttccaccttgacctcttcatcctcaccaagttcttctcccctagttttctcgcatagcgcaagcatagcatccaccccttcactaaaaaagctaaagtccatatcagggttggtcgaccaggtctgataaatggttctcctggtgatactgctgaacctgtctttggtttcagcctccatctctttgagttttttgtcatggtcagcctggagggacttgagagactcctcaagctccttgatcttcttttgttcagccagacgttacttttcagcctcttcgtttatgcaagaaacctcggcctcagagtcattgcacttttttggctaaagtgtccctatgctccctggtctggcaaagctcagtctcgagcatttcagcccactgagacggcctatgatgaatagcaaaggaaagaagagatgcctgcaagaaggaagcatattaaaaaaagtaaagatgataaaatgaggaaaagtgagaacaaggagaaaaggaaa

SEQ ID NO: 265095 - DNA, 715 bp, Cannabis indica
ccactttgtcttactacttcccaccagatccgtgcatcctttttaagtagggtagcagcataggatactctttccctatcattgaggtccatatattccaatatggactccgttgagcgcaaccattcctcaacttcaagtgagtctgagctcccattgaatattggtggttgttgcttcctggatcgcttgtacacaggttcaaaacgttgtatttgctgtggattcaatgaggctggttgaagagctaggtttccaacgggtggatttcaatttcggtgtaactcctcattcagagctcgtagccttgcaattccttgagttagctcctcacgtatacgagcctcttcccagagtatctcagcttgagcattgggtggtgcttgttgttgttcggttgctactttgtaaagcccgcttagttaatttggaaattagcagttaattaagattaattatgaaattatttatagccatttaaataatttattatactgttatttatggaattcagaaatgcatggttatgtcattcagtagttttcatatttgcattttcggtgcccggtattttggaactcggcgtttggctcagtagaaatcacaacttagtatgttagttgtttggggcggtttattagacattgggaatgtcgggaatggccgggaatttagaagttcccaaaaataccctttagtgtgttttatgtgattt

SEQ ID NO: 265096 - DNA, 629 bp, Cannabis indica
ttgtagaccacattgcacagagaaattgggcagaaatggttaggtcttttcgggttctggaccttggggatcaggacgatattagtggcattgattcctttgtgcatacgcccagttatgaagaagttggaaattgcatcacagaagtcaaaccccaccgagtcctaatagtgtttaaagaacagaaccgacataccatctgggccaggagctttgccactgctcatggcaaacagggtagttcgtatttcatcaagtgaaggctttctgatgaggtcagtctgttcatccaaagacaggcgattctggacaaggtcagtacaattaggagtaatcacgttttcattacccctaaagatgccttggaagaattccatgaattctttcccaatgagctcccttttggatatccacacattatctttattgaggatgctttcaatggctttccttctgcctttgatagaagccgacaggaaaaagaatttggtgcatttgtccccttctttcagccaggaaattctagccctttgtttccaatacacttctttcctagcccgggcctcattaagagagaatcgaagctccttttccatttcccaatctctagatcccacaggcagcttctg

SEQ ID NO: 265097 - DNA, 652 bp, Cannabis indica
tgttacttttatgttgttttcttgttgattttatgttgttttcgtgttattttttgaaaaaccgtaaaaatgcaagaaaacattctttgaacgtaaaaatgtaaatattttacaaaaaatggtaccttatgtaattattcctttgaaaatactatatatttttgtaataaagagtccaatttttttcaaggcccatccaatctcaaagccgtcctgcatagtactaataactgataaagaaataataatattgtatttaaattgtgaattagttgggaaacaacatacaccaatactaatagctgcaaagatgggagtaagtgaaatgatagagaagatcttagaggaatttccagttgccatccaagatgttgattcagataacaagaatgttgtgcttttggctgttgaaaatagacaatcacatgtttataatcttcttctacatagtaatattcttaaggaaagcgtttttcgccaactcgataaagacggaaatagtgctttgcatcttgctgctgagtgtaaagaacagagaccttggctcattcctggtgttgccttgcaaatgcaatgggaaattaagtggtataaggtaaattataacactttttacatgccttatatgtggtcttttataacactttacaat

SEQ ID NO: 265098 - DNA, 854 bp, Cannabis indica
taacagttgaacaactaaaaacaatcgtggaacaataacgaaaacttaatatagtacactgtataaagcttacagtacacaatatttttttaaaaaatttagcctcacaataaaaaaattaaaaatttcaatatataatgtaaaaactcctaataaaatatgtactactatagtggacttatgtatagtattacctagctatattatttaaatatatttaccatcttgatacatatttctatatttttatcttctcattgtttaagaatttgtaaaattgtgctatgtttccaattatttttatttataatgaattctagccaataatgtatggaggtagaatatattggatgtggctttagaattgatatagtaatacatgcatttttatatattgttaaagaatgccttattattcccttttaaaaaaaatatatatatagaaaatgaattccttatttttaaactgtaatttccctcaacactatcataagataccgtcttacaagtggttaataatttttttgttatgaaattaaaatatatacaaaaattataccaataatagtacaacattttaaatgatattggacagtgctaattttgtcacaaaaatcataatttgttgtcactaaatgtgtttttagctataatacttgtgactaaaactatatattagtgtgataaataatttttattgtgactaaaagtgatatttaataacaaaaaatctatattgtgactaaaatttaattatcactaaaaataacatttttggtagtgttcagtgattctccatgacacaatgcttactaaattaatgtagtattgtttcaaattttcaaataattttg

SEQ ID NO: 265099 - DNA, 666 bp, Cannabis indica
acataaaaaaaatattttgaaaatttccttactaaaattatatgtttgatttatttttattttgtctttttaaaaatattaatattatcatgccaatttagtagtgttcactcaaaatttagtcaactgacagtggagccttatttattgttgataatcaccacgtgtaaataataatgataaataataaaagtaacacaaggatttatagaggttcggtccccttggttagcaggtaatgacctacttcctttttagttgtattgatttttgagataataccacacagattacaagcttgaaccttgtaatttctagctatggcttccttcaatattacagtagtgaaaattgagtgttacagatttagaacttttgagaatttgtgaaggaaatagactgagtgtctagtgagtgagttgagtgaggaggcgtgaaagagatgagctatgggcttgtaagacttaaagttcatgtcttttttcatgtggtctaatgccctttatatagtgtaaggcttacaaaatatcctaattcaaataggtaaatatcccctttaaaatagaaaaataactctttttatcttatatttaaattacaaaaaggataattgttatcttattttttgcaccttgacatggcaatgagaatgaatgacacgtgtcc

SEQ ID NO: 265100 - DNA, 2262 bp, Cannabis indica
tataggaatattaattatatatggacatggatttgaacatgagaagtgctaccccatttgttgttcatcaccatgatgatgatcataagacatcatcagaagagtgtggagcaggtgtgaagaagagaatatttagcaatagaaatagtaatgataataatattaacaataaaagagaagaagcaacaaagggtaatattaatagtgatgaaataatgtcatctccattaaatttaaggaacctctcaaagttgactccttccccctttgggagtttctacttctaatcaaaatcagattcaatccaaaggctggatcatctcccctatggattccagatacaggtaataattatttctataataaaaatattatgtatctatttatgtgtattgcatggtgtttttccatatacttatttgtagtactatgttcactatttattacaaattaaacatttatatttttattgtatatatatgttctaaaattgaatttctgtgtgaattggtatggcagattacatatattatacaaatatataattttatgtaagtttaaaatattgttgatatattaggcataagtgataccaaaaagctttcggcggtaataagaatatattattatcccaccttttaacattttatgcaattatgccctatcctgttggaaacatataaagtaatttaaaaagaacaaaattttgtacttgagaattaaataaatatttgtcaaatctataaacgagaattcttttcagtgctatagtcaatttctccgttttgagattattccaagtgtttaagttgaagctagtcccatatatctaataaattataattggtgagacagaattttgaatagaaatatgtacatatatctatttttaaagctaaatccaaactaaccacagatgtacgatgtttataattttatttttaacactgaatttattaatattacattttggggaaaattttccagaacagtaaactctttttgaagtataaaagtaaaattattgactccaccaaatgattgataatatgatttaaataatttacatcacaaaaattataggtaaaagactaactactgtcttttcacccacacgtattaatactataaggttagtatatgtacatgtttagatcatataattaagagaattactattgggcaccagtggtgtccagattagcaatatttttaaaaatttatttttttaagttatatgagaccgactatttaattacactaatagcagcatgacactaagaaaggtgctcggcgccagtagtgtcctttaagaattctctataattaatttaggggaaatgaaagtttgaattagggacgtttttatttctggttatttaaacttgaattaacaatttttgtttatattattcaagtttggattaaatgacattaatattgtatagtatttatatatgtgggtatatggtggcagatgttgggagacatttatggtggttttggtggcgtattcagcatgggcatacccatttcaggtggcattccttggttcatatccaaagaaaccactctacattgcagatagtgtagttgatctcttctttgcaaccgacatcgttttgactttctttgttgcttatattgaccccaccactcatttactcgttcgtcactttaaaaaaattagctaccaggtattttaatctctctctcctctcttctatcttttttctctttttttaaattttattcaagtaagtaaacttatttctacagcagcccctaaattatatatcttttagtaagttggttcttaatttttattagagaattttacattgacgatgtatgaaaattaaataccaaaaataaaatacatgaaatattattttcattgtaaattaattttgagataacgattactttaccatactctcacctaatccttttttctaaaccacacacttttatattcatattcttacatgatatgagaatcaaggtaaagtctaacgaataattatttaaaattaacataaaaataaattaaataatgtaaaatattaaactttacaaaattaccattatttaagaatggagacttcatattttcaagaaattaaaaatttggggaccaatttatcaacaaatatatatatactagtagaaagttacgtgcgaggcacgtatacttagttttatgttaaatattttttattttatttaaaaataatagaataaataattaataaaaatatt

SEQ ID NO: 265101 - DNA, 1073 bp, Cannabis indica
gtgacactttaatgtacaagggaaccttcataggtctactcggctattttaaatgtgctcaaaaataaaaataaaaagtaattataaaatcattcaataaaccttacctaataaatagcacatcaaattggaccactagcaagaccaagagacctttaggctgggctttattcattatttcatgggatcatcactttgacaaacttttacgttttttttagctaaagatatatatttgatttgttccttctttggagacgaatttatacttaccacaccatagaaacatctaaaggaataacccacttatttattaaaagttcaaaggaaaacgtgggcttataaaaacgatattaagtattaataaagggagtaaatacaaagacacaacttaattatttcattatgtaccttctaagtacggacaaatggaccgcgtgaccctatttttcgttgtacgtacggaacttccatcccaaaaattatgtatatattaggtactttttatatatactatattaaagttactgaatttgcacctataattagttatatcaattttaattgttataatagaaattatcatatataatataattaaataaatagtataatttttttcaaaaaatatatatttactatgaagtattaagcaaaaacattcactacttgtgttcattggtgtaaccaacgctgtatgtgtagacgctgttgtgaaaatccaacacgtaagtatacatatcgttttcaagtaataaactcacgtgaaagttgatcccacaaaaattgtagttaagtaccaaataattgaatcttaatttctatttggcaacaaataatttgaataatgattaataaaaggaaaataaataaacaaaaaggcaattaacaatgtttagaaatataaggcatttaatttcaattgcctcaacttcctatgacaaaataaaatttagttatctttaatttcatgtgatagcatattataaattcaatctatattcttattaggacatatagaatctaaatcatatggcaaagtcctactatggttgtacaaaaaaatttgtaaa

SEQ ID NO: 265102 - DNA, 1225 bp, Cannabis indica
tgtttctggggtgattttctgggcaagatcgatcaagagatcgagaaggatctctggttctagggtttgagaaccagagagaaggcagagagaaagagagagagttttgagaaactctcgaatgttcgaaggtgcaaatgagctagggttagctctgattgaacttagttttgttcaatccagaacgacaaatcgtttggtttaaacgatttgtcgtgtgggtgaaaacgacaagcttcattgtcgtgcaggaaagaaacgaccaaggtttctttgtcgttgattgggtttgaaattgaatttttctgggacaagtttgtccctgtcgtttctaactgtaaacttgagttggtgtagggtaatattggaatttcaccaagaaaattcctacagctgcccctggaaatttagacaatcaagctatgtctagaacccgaactgttatgaagtgaatgtcatttcatcataatctttaattagttggtttatttaggaatgatatataacaataatttccacatcaatacttaataaaccttgtgaattccttgaaattcatagttctgacctctaacagttttagcctttctaagttacatacagtgttaaaacttactaagtgttagaacctttagttctcatcaccttctctatgttgatttgaccttgtgtaactttctctctaatgaagtgacaccttatattaatgtgctttgttctatcatgaaagacataatttctacaaagatagagtgcactttgattatctctcatcatcatttccatcatagagtttcaactcttataacatgtcttgaatccataatccttctttgagagcttcagttgcagcaatgtattcagattttgtggatgaaagagctaccacaagttgtatttgtgatttccaactaacacaattttttctaaaattaaaaatacataggttgtagttgatttccttgaatctctatcaagttagcatcaacatagccttccatgagttccacctgaattgtatcctggttcattttaaactttaattgtgtcatcacctactccgttatatttaaaagtaccataaagctccacaaaaaaattggacagatgagtgtcaggatcttcagaaggcaacccattaaattgaacaaatgattgcaccatttgtaaaatagctgatttgatctcaaagttgttagcctcaatagttggtggacgtatacta

SEQ ID NO: 265103 - DNA, 649 bp, Cannabis indica
ataaaataataacaataaaagatgtaaaatagtaaataaatgtgtataaaaatatgaatggtagcctcacaaaatgtgagatgaatatacccatgtcacttaattcttttttacgaagataaggttcacttcaaggagacacaacaagctacctttataaatatatttactcaagttattagctagggacgaacaggatgactaacatccaaatactgacaaaatcatatttggatctcaatctttaacatctccacattcctattaaattagttgcaattcatatgcatgtttctatcatgctcgatgaagacacgtctcatctcagtatcctttctggaaataatagttgacgcctgcagtggttcgtttttgagaaagagtgttctcgaagatagctcctcaacacgatcagttgacgtacatgatcatgacacttcatagtcctatctcgattaacatcctttgagttggaaagagagtgctctaaacaatatactttatttcgcaaatcgttaaggtacgaaagagcattaggagggagttcttttagttcattaatgggattcatgttgtgtgaaaagtgaggagatacactgtgatctccagaagacataccttagggttgatattaacaaaaaaaaaaaaa

SEQ ID NO: 265104 - DNA, 1843 bp, Cannabis indica
atcaccgtcctcccctcactctagctcttagggatagagctcaaaaactttcacggctgcaaggagaagagtgaaatattatccagttgacctctgaggataactttgtgagctacaggctctatcccgaagactttactcctaagtccgtggcgaggaagaagaggaaatatggtgctggctcgaccgaatgaactcatccatagaatgagttaattcaactgaagcgtgaagctaagttgaaaggaggtgcaagggccaagcaatatgctcaggagcccttgaatcctgaagatgaagctgaggaagagcaggtgactccactgaagaggaagaagaaactcccggcctcgcccaggcttgttgaacatgcaattcgcataagggagccaatttcacatgttcggccatctcctcctgtgttcagaaaagggaaagccgtcatgtctgagataagatcgatgtcaggtgatgatggacttttgagtcttattttggcggtcaccttgcattttactttatcttgtttttgagcttcttgactttcattttcatgccttgtgtttatgatggctgtcttggcagatgctcgacgctctgaggaagagaatgggcggaagctctagttcctctcctccggccaagaagtctaagggcggtgaggggtcctcttcaaaagaaaagaggccttccagggaggtcattgatctttctaaggagctgactgctgcaaacccctctacccccaaagctgccaagtccaaggagtctggaccaccaacggttgggtctgaactggtcaggagtgatcctgaacgggtgcgggcaccaactccactttttttagtgcttccagaggccaaaaagggcaaggagatgctggcccattacatgaaccggctggttcctgaggtcagtgagcgactggctggtgctgacaatgactcttcttttgatgtgctggtgggcatagttttgaaggagttcacccgagtaagcttttttgatacttccctttaatcttccacacttagctcaacatgctaaagttttcttttggtgcaggtcggcctgaagttggcatacacttactcccaggctaagtctgctgcttccaagaacgcgactctgtctgacaccctgaaggcggaggcagacttggccaagaaggatgctgaagaagccagggcggaagctggagctattcggttggagttgggtgaagccaacaagaagctgtttgccgctgagaagaaaatcactgggctgaccaaggatctcgaggttgctgaccgttttgaggagaccatcgagatcttatctgctgaggtaagcaatcttcaagatgagaggacttctctacgagcagttcttcatcagatgaaggaggaaaaggatgccaaggagggggagctttcggccgaggtggacaagttgaaggagaaggtcaatgccttggagacagccggtctcgaactctgctttgatttttggaaggctaatcctcgggccaacttcgactacttgggcgatgctaaggacatgtaccctgaaaactgggcggcccaagtggcttatggtggaaccgaggtggctgcttcaacctccagtcaaactattgatgctcctcccactcaaacaacagatcctcatgctccagttggcccagaacaacagaaccaagagcctgggactgcagctgtttaagcacttctctttttatctcctttttttatatatatatcttattcggcctaagggacttttccaagacatcatgaccgtgttggaaatattttaccaggatctagatttactaccaagtatgttttattaacatcct

SEQ ID NO: 265105 - DNA, 1081 bp, Cannabis indica
agaagacttcttgggaccatgtttttttttttttttgtttttcagtttgaggaaaataaagagacacattggtccgatggtcggaccagggtccgaccattggacctctgtttttttttttcagtttgagagagaggaagagagagaggggctgggccaagagaaggggctgggtcgtgcgtggtttggacggtggtcgtgcgtagtcggggtggtgggtagtcgtcggtggccaggcgtggtggtcgggcgctgaagccgtggtcagcgagagggagagagaggttcaggatgaagcagccatggatggatgatttgagtttttgatttttttcaaatgggaggggtatttgtgggatattaggaatgtggtcatatatgaccattttttttttttttgaaatgaaatttattagaaccaaaaacaacaaactacaactcaaatggatgatcagccttacaaaacttgactaaccaatccgggaaggagttgtgaaaagaataggaatttttgttggctagacatttcctagctaacaaatttgcacattcattattggttctttttacatgaattatattgacattagtaaagttttccagcactgttttgatcttgtgaatgatggtgctgtcagcagtaaggctttgattcttgcttgtgatttcttccaccagcagccgacaatcagactggacttcaatgcgactggtctcagtagcagggaggttgttcagagcttcccaaagagcccaggcctcagccgttttgggtgagcagcagttgttcaaatagcgcataccagcggagagcatttggccatcagcctttctccatatgaatccgattcctacaccggaagtattatcaacaactacggcgtcacagttcacacaaatgctaccactagcagggggatccattttttctgatgagaatttagatctgcttcatggtttactgcaggaatagcctctgtatgtccatttggataggcagagaagacccagttcaggagttgctgtctattcatacaagggagttggttccacttcctgtttcgattctcccatattgccc

SEQ ID NO: 265106 - DNA, 587 bp, Cannabis indica
aaatataactacaaagcaacaaaaaataacaaaacaatgatctaattgcaatatgcaaaacaatatcaactcctaaatatgtttgtgtatcacgaattttattttttacttagttttgacaacttaatttatctttttgtactactacattattttttttttcataaaatttattgttacaacttttttttctcccttttttttttttttttgtagttagtagtagttaaaatggtagattattttttaaaagtcaaataagtaattacattaataatagaaataataaaattttatgatttcaaaataaagtatataatataatgggtaatatataattaatatgtgttatagtgagatttctctcacctagaaactcgagaccagacccctatttagaggacacgtatactcagatttccaatgaaaactgagatgtccatgagggactcctcgaagttttaaacctcgcttaagatagaatcagcgagaggcagcgagcttgaccaaagtctgatcgcatatatcgactatgtgcgagtatcctccccatgtccgtgtatattggaaattattttatcaggatc

SEQ ID NO: 265107 - DNA, 1061 bp, Cannabis indica
tttacaatgagcatgcattgaaagatttttgctcagtgtgtgggaccagtagatgggttaatgagaacacaaggggaaaaaagttatgcataaggtgatgtgttactttctgctgactcctcgattgaaaagattatatagttcaagacatacgaccaaagagatggtttggcatcttactgggggcgtgaaagaaaatagtgttatgcgtcatcctgtcgatttcgctgcatggaaaaactttgatagcagacattctgattttgcaagagatccgcaaaatgtttgattaggtttagctgttaatggatttactccttttgaaaacatgaaccaatcgtacagtatgtgacctgtagtgttggaaaattacaattttccaccatggatgtgtatgaaggataacaatttcttgttgactctccttattcctagacctaaatcacctagtaaggatatggatgtattttttaggacaatggtagatgagctgaacgaattgtggactaacgagattgaaataagagatgctacaagcaatttaatgtttaagttgcctgcaacttttctttggacaattaatgattttcctgcccgcagtaacttgtctggatggagtggccagggatataaagcttgtcctacatgcaacgaggatactagttccattcgagtgattggtaagacctcttatgttggccgtagacgtttcttgccatccaatcacagtatgagaaaggactgtgaatttgatggaaatgttaagaagagacttcctccaagacgatgacatattagaacaagtgaatgcgttatcacaacgagctacggacaaacaaaaagaggtgagactaaaattaattggaggaaaaaaacatcttttatgaacttgagtattagagtacaaatgagttgaaacacaacttatatgtgatgcatgtggaaaagaatatttgtgatagtatctgtgttgggttttgtgtgctaaataaagcccatttcaatataatcagatttacttattaataaagattagaaataacattttatgttgcatggtt

SEQ ID NO: 265108 - DNA, 935 bp, Cannabis indica
accattaaagctactactagacagaaaatttagtacaaccccagttaacttattttatttaaatttgctcaaacaacaccaatatttttttaaaactcaaaaaacctagaaaatatggatctagtacatactgtagtcgagaggaggatcttcttcacctcaacaacgatgcgctatttcaaaaactttctccttccacaaattttctggtttccttcgatttctcacgaggatgatcgatttgttgggtttcgagttttctcccttcgtactttctgtatctctttttaggttttaattttttgggtttccttcaatttttcacgaagatggtgataatttctacttcaattttctaggtttcgactttaccctttcgtacttgctttatctctttctaagtttagatttatagtttggttttaatttagttttatgcttttatttttggtgtattttttcatttcatgttttattttcttttaatttaatttcattcgtttctttaattaaatttgttattataaaaaaaaaactattttttttaatttaattttctcatatgttatgtcattaaattattaatggcatgacatttgtcagtctactttgcattggctggactaagccacgtactaagccacgtacgcaaataacagcataatgggatgaaagtgtacttattttgctaacagtacaatatttttagagattttgtcgtcaagatttagattttaaaaaataaatgcaagtaaaataaaatttttaaaagttatgccacaattaactttaaaagaaggaataaattgaatacttttttttttctgtattcatcaatcaaaaatactttcacattatatttcattaaaatgtacctacttttgtaggtgggttgccctatatattcttacctgtaataacaaaaatatttagtt

SEQ ID NO: 265109 - DNA, 1818 bp, Cannabis indica
acctcggaaagataggaaaaaaaactcctcaagctcactatcaaggtcattggtactgagttcctgtcgagacatcccaaaatgctatgatttaaaatgtgtttaaatacacgatcattttgacccagtaaaagcggataaatcacagctgtgtgatattcaaataatagtcgcatttatactacgtgatatgtaattaaacccgacgatttcaagggataaacgttgtatagattacagtcaactctgtaactaattgcctactatgtgattataaatagaagcaagttagactaaaaaagggacgaaaaaaatcataagaaaaaagaccctgaaaaatcatcagaaatctaataagattgactcgtggagtatgcagaattttaactacaaaactacgtaaaaaaatcctctgtgtacatattttccttttctttaccatctttatttttctgtgcaagtttattattcaggctcaaattttggttaacgaaattctgcgttaacatatacatatagaattttttataattagatacagtgatgacatcaactttaaatgcaatggtaactaaaaatgagatacggtgatgatagttgacttaaaattatatgatgagttttttataaatttattgttttctaatttttcattactataatgtatatttaaaaaaaatgtgtattttttaatttatataggaaattgtataataatttttctttttagaattttaaggtttttatataaatttattaatttttttaataaacatatataaagtttaaaattaataaatatccaattttttattcaattaatatttatataataatttgactgttgcacccgaactgcgctctatttactagttattaaaataaaagaacaaaaatataactaatggaaatatttgcaatcatttgtataattaaggagaatatttggaataaaaaatattaaagggacacaatttttaagagacagtttcgtaagtttagacgagactaatcctatttatatttaaattttttaattaatttataaaattaccaaattattttactgattacaaattttgaaaataattgctaaatagtaccttcgtgtttaacaccacatgcatgtgcatatagctatcatactatactatatatattgacacaattctccatgttttaattttacaaggaaactgctaatatcatgactaataagttgtcgcttcaagtagtttggccaccttaaaatgcctaaaaatatgctaatttatttccaagtaataataaacttaaactattatgggtgtgactattggcgtacctattttttctccactaatagactactaaaaatatactttaggtgactctatccaatatcttacacggtgtaagacattaaaagtttgacagtctctaatatatcagggtgcattataagaaaagagatttttgcggacgaaattctgaattagtaaaggtcaactaaaagcgccaacaaactttttacgataacacgtttcgtttactacaaaaaaattaataactatttttatttctgtattatcagttattcttgtataatagtaataaatacaaatggaactcacaagtactataattaatttattattcactattaaatataaattaaaggaagattttaaattgcaattaaatagcataaaaaagaaaacaaataatgaataaaaaatatgattttaaaaacagttaagaaatattcttacctccaacaatcaactaagaacaacaatgataaatattttactgttataaaataatataaagtagatg

SEQ ID NO: 265110 - DNA, 981 bp, Cannabis indica
attgaccgatcaaagcagtccctcaaatattaaagggtcatgggctttgcatttgagttaacccattgggcggtgctcgaataattttcgcgaaccgtcaatccttgtcacacttcttcataagcgtgagagtcttcaatcgtagttggacaaaagtatctttgtctgagtatcttctttgataggctctgctcccaacatggtttccacaaaaaccttcgtggatctttgtcctaagccattcatcctcatcttttttagcacgtcttataggagtcgagagaattctcgcctatatattacctcgtccagaattaggtactgtgcaactttttagaccaagttatgagaattcgattctgttgtccgatacaacaccagttttgagtattccacgatgggtgtcatccatgaggtgtgacatctatcatgttgatttcttttggacgggcaatgtttggctttcgagatactcaattggcataatgttgtttttatacacgatttaaaaaaattatgaaaaaagaattaaaatcaacacaaaaataagtgaataacaaaatccttaccccacccacttccgagtgttccataaattaatatacaacaatactaaaacaagggccaagctccattatgattcatcaaagtgcacaaaattattatccaactattacaatacaatttgccttcttgaaactttaaatggaaaatgtgtataataccatgaaaaagaagaagagtacaagaaacaaaaaaaaaaaaaaaaaaaagaaaaaaaagaaaagaataaagaatctaatatttaattgttttatatataaaaatataattgtcgaatattattaaaacaatatagaaaataatctaatggagcacattttctaattattatgtatttatctgttttatgaccattaaatctatcatttatagctacaaaaacattcctacctactaaatcaaagttttcacaattaa

SEQ ID NO: 265111 - DNA, 1377 bp, Cannabis indica
gaagagtttcaagtctcccatttgcacaaaataacatttctgagaactggtgaccaactttgccagaacacagaaaaagactaagtggtgtcaaaatatcacttaggcatcttaaagtacgtcccttggatgttttttcacatacccaacgtccaggataacgccatatgtcaacttgggcgctgggatgtcaacttggacactgggtcatgaactgtcttcagtaaaacagtcataactcactcaatattgatctgattggtgtgattcaacttgcgtttcaaagctaattcaatgctccatcaattcatgtctccacttcaatcgtaattctgaagttatcaacctctaatttcaccctaatagagttacaaaaataagcttcgggttactccggtaacaaaagctccaactaaggcgtagaccagtgcccatggggtcaactaggtagatttcgacaccttggcagccttagtgaaaggaatcacgactcctaagttgttgaagttcaaacttgacaaaaagcggcactcaccgctctctgaacgaatcaaagctcttcatatccctctgaagctcaagaacccttcctgacattaatacaccaagaagaaagatccattatctaacatccactgcttcgaagtgcagcccgatttgcaaggtgtgatagacagtgccaagtgcataatcttcctttctacactaacaagcctagctcagtggtggtactttaagctctcatctggatcaatcgactcatggaaagatataatggatgctttcggcaaccgattcattctttcctgataatgccagatcgaacccgataatttggtggatgttaagcagaaggaagacagtcccttgaggattacatccaacaattcttaaaggcatatgataagaccaacagtcttaacgaggactcaagggtaatggcacttgcagtcaaactcaaggagatgagtcttctgtggtccgatctttgtctcaaggtggtatacactatgaatgacttcttagataaagcagatggctttatcaagttagaagaagacgtcacccaagccaagggctcaattggtggcaagaagaagtcaccagactctcaaacccctgctactaaagcacagggaaatgggaagaaaggaggatcaaatagagggaagagatccaagatggtaagccagtaaactccctcgctggaaaaagcccaagagtaggggcagccccttacgatagtatgagccttgcttcaccaccaactccatcctcttggccccaagagaggagatctatactgttgggttttgtgccctaaataaaactcatttcaatataatcagatttgcttactaataaagatcagaaata

SEQ ID NO: 265112 - DNA, 856 bp, Cannabis indica
aaaggtttcgacaaaaggaaaaaaggtactgagacaggtgaccaccatttaaagtacaatttctatttctgcaatttgttttatttcgtgctaagctaaaagatcagattagatcaaatagctttgatgtaagttactacggtaacaaacacatttttcaatcaataaatgaataaagatagttatttcaaaattcaaattgagtcgaaattatcagcatgtttctaatttttcatccagtgcgtacaaaaggttttgtcaaatccaaagtaccgaacagataaaaagtatacttttaaaaaacaagtgaccaagagtcataagtctcctcggtcacttagggggcacctatacctgtacaaagcatttggtaaagataaaacagtcacaattgcacgatgatttaaacagagaaggaaattcattagagataacaaaagcacgtaataccgggattaaaagctgcccgatcagcctgttgtctgtaaaatgaaaaataattccaagtttaaagaccccttggtcggtcatgatgtcttagaaaaggccttggtcgaataagataaaataaaaataaaaggataaaagaagcagtatttaaacagttggagtccaaggctcttggttcgggtcctctgggccgccaggagctggaggatctgttgtttaaataagaggtacatcaacattttggccagaggtagaagcagtcgcctcagtttcaccataagccacttgggaagcgcagaactcaaggtacgtgtgttgggttttatgccctaaataaaactcattgcaatataatcagatttacttattaatatagatcataaataacatttaatgttgcatggtt

SEQ ID NO: 265113 - DNA, 1603 bp, Cannabis indica
atgttttgtttagattaccctcttgtagttctggtaagtttgatagcctttggtcaaggaatgacttaattttgaaggtctgaaagttgagtagtttttgaactcttttctgcccaaaatggttttgaatgagttatacttgtcatatgtgatttgtgtggtaaggttcggaagggtagtcctagatagtgttttcaatgattaggtttggggttggtgaatctagagtttaagagctggagttttggttgcttggataggtgtgacttggttgttagtatccttattaagggatcccgaataggtgatgagtgaggtttggatggtatattctggatcaaagtttttagttggggtccaaactgatagtttcaaaaatgtgtgtgtgtgtggttaaggatttattttgggaagcctctagttgggaggtcccggattggaagttctagatgtgaggctccgggtaggagagtcctgtaggaagattctagatggtatttggtggtcgagatgagggatttccgaacatgttttaatagttacaataattcataaattgtcaacactaaatcaaaatattaattttgatatgattgtataaatttaatctcatcgtagtgtagagctctacatgcatgcatggtttgtatagccataattaattaggcaagaaagatagatgtgcctaccatgcatgacttctaaaacatggatgactttaaattttgaaaccaagcaaaaattgttttactataaatcttgttaatttttcattattgatatcactatgttattctaaccctttctttccctcattttttctttttaatattcaatcaataataatcttcatgggactctcatcagtttgtaccttttcatttcaaactaattaccatactttattaaatcctcacaataataatcccaaaacctcattattatgttatcgacaccccaaaacaccaattaaatactcttacaataattttccctctaaacattgctccaccaagagttttcatctacaaaacaaatgctcagaatcattatcaatcgcaaaaaattccattagggtatgtgtgtgtctcttacttctatatatttgtatgtttttttttcttcttaattatacataatatttaattaatattatatttaattagagggtaattataattgtgctttccattcttcaacctaaaagaaaaaaatacacaacaacaacaataatagtaataatgatgtgttaacaggcagctactacaaatcaaactgagcctccagaatctgataatcattcagtagcaactaaaattttaaactttgggaaggcatgttggaaacttcaaagaccatatacaatcatagcatttacttcatgcgcttggtaagtatatattcattctcataattttatttttaatatattaattttacaaattgagaaaaattacaaattttatgagtttttatactttctgtgcaaaaatatggcatttttctcaaatatgaaaaaatcaaataagaatacccttagagttactagagaaataagtagttactttatattatttttttcatattttttaagcttttttta

SEQ ID NO: 265114 - DNA, 924 bp, Cannabis indica
tatgattgatttaagtactttggttcttttagtggtaaaattttatatgtatgaaatttcctttatttgtcaaatcagtctctcacaatatatatgtatatatattactgagaaatacagggaaaatttttgtatgtctcagaaagaaaattattatgtgaacagatatatgttgcatgtgacctatatatctatataatatatatgaaaattagtgtgctgattataattttttaaataatttttatgtttgaaattaatatttatcattatatatgaagattaaaatgtttttttgcctcaatttagccagtccatatatatgtatgtatgtatgtatatagctatatatatagggtatagttagtagggtaattaattagtgccgaaatcattattagggtattgaaaaattaacaacgtatgaagatttgataggaattttctttattcttctctctctgattgggtagttttgttaatttaagattaattattattacatgttttgcttaaccaattagtttattcatctaattatattaatgtaataactaattactacgtgattctatatatatataatatatagaggaatatctatagtatgtttatatatatcattggttttatatatcttgatattgttttaaattaattattaattccttggaaggggccaattaactttgtttattattattatataatcatgagtaaattaataattaaaacaactaaaatcaaatttgacttggatttttacttattataggggatgatatataatgtgattaatttcttaataagcatactttataatgatgataacaatttctaggtatttaaagggttatatatttatttaatttatttttacagtcacctgaattagtacatgacacttctgttaatttgtaatta

SEQ ID NO: 265115 - DNA, 532 bp, Cannabis indica
catttttttaatatttttttttgaactcgtttttttaatttacatagtttttttaggggtttttttatttttacacttcaaaacaatttttttttttgtagttttacgaaattctacataaaactccctatacgtaacaagcactataacctaaatcgcaataaaagatcgtatagcaacccacatagaaatcattgaagaaactacattaaaatccaaaccgtaaatttgaaataaaaaagttaaaagaataatatatggagtaattcttattttttttatccatatatatagttaaaagaatataatatgttagaaatataccaatattttatgttaatagattttgtcatggtccaggccaggcccaatccacagtaactttgcctctctctcaatttccttattttcgccgtttcaccaagttatattgtcccacattgcccctatacaatttctttggagtctttatatattcttaccttagtgatatagcctgtcccttcggcgacatccgataaaattggaacga

SEQ ID NO: 265116 - DNA, 883 bp, Cannabis indica
actgtaaagtcattttttggcaatctagatgccaaaatattttttattttatggtgagatttatttgcattcataaccgatattcttatcttgatttttcggtttttattgctttttctatgttaggaaagattgtattttcagctggacttttcttgtatggaaacttcttgtaagagaagcaattctcttatgaaaagttggtttttaaaggaatttttgactattgcctttttccttattaaattcgattgtgtcttgatacaatcagattatacacactgttcatggcaggtatcaagacccaatacaagatcgaactcgtttatggcaagtttccttttctggtctgatactctgcgtcagaatccatttctgatgctgcagatcaagtttttcttaggaaagttttgtacagctgtagattcgacttgtggctgtctctaggatttctatgtacttaaatagaacctagagagcagccattcggatcaactcttctagtcttcattttttgtatttttcttatttgtgagaagagagttctttttgtgagaacctagttgttcttctaggttctagtatttttcatatatgttcttactctgtcttagagtttgttagaacaacttgattgaacaagagagtggtcttcgggagaagacttgttcaagccttacttcaggaggaagtaagcacacacacttcaaagacgaagggagttctctatttggaggtgtttcagaagtcagattcataaagtacattacaaaggattgcggcaataatttagagggagtctaaacttgtaaaagtcaattgtctttgtaattattgatactttattaattgatttcaatctctaggcgtggccccgtggact

SEQ ID NO: 265117 - DNA, 1188 bp, Cannabis indica
aggatgaggcgtgctccgttgttagcagactagattgtcataaataatattgtagagattctacaggtaaattttttgaatctaattcaatttgaatattcttttatcaaaattttcttatgttttacaagtatgtataatatttacaaaatgatcatattttattacgctatattttataatttatctatcaaagaaaaatgacactaaaagaaaaatgtgcatcaatgaggacaaatttcttggtaaaaagtcctgttttcgtcaatattcctcatcaatgaggacatttcgttggtgaaaagtcgtatcccatttttatttgtaggattctaatgtagaaattcatcaaatgaaagaaggacaacaagacaaggaagcaaacgagggatctagaagcatggatcgtgttaatgatgaaaataaaaaaagttgtagaggcaaacaaaagtgaaaaaacaataattgagagcgatgatggtatttcaaccttcaatcttctatctcaatcatttttggaaaatgagaatgagttgtcgtgtgaaacattgaaggtgttacatagtaaaaaaaaaagaggaagacaaccttaagtcgagcaagtcttgtaaccaatggtcgtgcatttcctttagtgaaattagttcggtaacgactatatccagatgttggtagtgcagcactcttaagttcaggctcatattccaagtcgggatctgtaccattgtcaagtttttccagaaaaattagacacttttggtagtgatgttcaagagtaccacattctatacaccattcaggcaaacgttcatagtgaaattccacccaaaagttgtcctctatttgtcttagtttaatcatttgacccctcatcaaaggtttggtgatattaaaacgaactcgaattcttaggaaacgaccccaaccctcatttaaagagtcctcataaacttcaataaacttgcctatcatatcacctagtttcctggccaaagttctagtcttgcttaggaaagggagatgatacacttggaccaaaaaggagtgtaaattagttcctcaggtgtgacattttgtagagtagttggtgtgtgtaaaactatgtgatggctctaaaaatgtataggttcacgggttagaactcgatacttgtccgtttcacatcaaaaggttagcaaaaataaatca

SEQ ID NO: 265118 - DNA, 1264 bp, Cannabis indica
tttttttgtaaaaatattacatacttctaaagttagttttttttttgttttttttttttttttttactagtttttctataaattcaatacaaaaacaacataaaaaataacaatcaaaaacaataacaaaaataacatatagaataacaaaaaatcaataataaattaacaagagtacaacataaccgtattttctgtaaataaaataaaaaaatcgtaaaaaatatctaaaatttcgtaaaatcgtatttttgtaattttttttattatttttgtgtatttgtgaaataattctaaaattaaaacccatcctagtcaagtatattgcagaataacattttgtaatgtttcaaattttcattttattagtttttaaggtatatatatatatatataatttttttttttaaaaaaaggttattttatgaattttttttagaaaaaggttaaaaaatacagtaaacagtaacttgttatccttacttaattttcctatattttttaattttttccatttttttttttagaaaaaaaaagcaatattttttaacataaagtgtaaaaacccattaagttttttatttcctcatgattttcttttgttccatggcgatcacctatcactctccaacatttctgcatttggaatttttttaagacacacgtttacacattattttcatttaatatacaaaatagtatttgaataattatttgaagaaaataatgtgagtgcttttatgattaaatgatagaaaattttatagtaattatataaaaatcaaacacatttttatgtaggttataaacatgtgattcctagtttcgaattagtttttttagttttccttttttccgaacaatgtcgccaattagtttgtaaatgatatttacaaaaagatctttctataaatgttttgttttgggcaaggattttcataaaattcagtattttcatacatttttgttagttggtacttttgtaaagaaagaaagaaagatttgacattccatttccagctatgttgttcgaagttttcttctcgagccttacaaaaaaaaattccccctgaactttgacatatactaaattgtgcctcctgaacttttttggctgttaaaaatttacctgaactattgagatggttaaatttaaggacttttgtctaatttcattcaattttactatttcagtgattgttcatgtactaaaccatgctccctagactttgatatctaccaaatcatgcccctcaaactttga

SEQ ID NO: 265119 - DNA, 610 bp, Cannabis indica
aaatttattcattaattatcagccaagaatgaatgaaataagctcaaaatagattaatcaacagaagtttaatacaatctaaaatagaaactaatggaatgaaatagtcacattcagatttgagtttttgagatctaattaccaagagagcactgatgatttctttgaaatcccttcaaaagataaattcggaatccctgtagatgaacccacaacaagtccacttgttgattcagtacaggacaatctcattaacatgcttctcaagatttttctttaaacccatcttcaatatttcttcaccaagaaaacaagaacgtaactagaaaaactgtgagcactaacgagactttctattactaaaagagattagtaaacattgttcataaccaatatatatacatactgctctaaaaaataaaaaggacttaaccaaaatgaccaaaatacccgaacaatattaacatataagagcactcgcaacaagtgaggtataatagttagggtttttttttataaatatggcttttttgtaagtggtttagaaatatatggagaaataaaaaaattttataaaatctggaaaaatgaataaaaaatttaaaatatg

SEQ ID NO: 265120 - DNA, 1452 bp, Cannabis indica
aaagctcttgttgatcttcttgcaatgattgatcaagctcaaactcctcaagatcacatcgaagccatattcaatggattgccacctgagtatgatgtgtttgtcaccttcgttaccacaagaaaagatgcctataccacagttgaaattgaagctctgttaatgtcataatctgtctatatagacaagaatgccaaaaatcttgactttcaacaaggttgaagccaatcttactcataccaaaccttttggctccaatttctatggtcaatcaccctttcgtggtccaccagcacctcttggttttaattctgttgttagtcatggcagtccctcttccaacaacagtggtggccctccctctcattcaatggctcatggtggtccctcctatgatcgtggtccccaatagcaatgctccttgaggtagtccccctggctttggtcatgtcaaaacaacacttggggacaaaagctccaatgccaattgtgccacaaggttagtcacactatgaaacagtatttctactgagatgacaagtcctttacaggcccagagtccttcaacaattcctgatatggcccatgtagctgaaatgcaagcaatatgtgctcgtcctggatctatttgtgatgagagtttgtatcctaactctagtgccatacaccatttgacaccagattatcccaatcttggtgtcagcacctcttactctgttaatgaaaaattttacattgggaatggcattggcttgctcataaaacacattggtaattcatcattgctatcttatttttcatccaaacaactcagccttaccaatctggtgcatgttccttccatacaaaaaatgtatttagtgtttcttagttttctcaagataatgacgtgtttgtttaaatttcattcattgtcttgttgtgtcaaggatcgtgctactcagaagatctagtgggcttagaaactttaaaaaggcttatacaatttccaacctactcagctcagtcatgtctcatctccacaatcaagtcttgagtcatttaagctacctagttagtctcttgatcctcagtgttacactcatcaaatgtctgcaaactattctattttttctttgtggcaccacagacttggccaccttgttgtagaatggtaagaatggatctctccaagtataattaccgatttctaataaaaatctcttgatgcgtgcaaagcttgctgtcttggtaaaacttataaacttccattctctaattctactaccagttaccatgccccattagaattattgcatttagatttatggagcttgctcccactaattcatctagggcccgtttggtaagcatgattggactggattggactgaaaatgattggactggactggacaagattggattatgctgaaagtaatcctgtgtttggtttaagaatggactagacta

SEQ ID NO: 265121 - DNA, 1837 bp, Cannabis indica
gttaggatctgaaatatttaagaacaaaaaacatgtcgtgctccgttgcggtttcaaattcgccggtcttttcaccatcgtcgtctctgttttgtaacaaaagctctatgttatctcctcccgaaacgctgactctaacattgtctcacttgaagccctcacaaggttcttcttcgtcgtgttctgcttcttccccaactccttcctcgccttcctccccctttaggcttaggattcccaagcctcccacagggctttccggtcctggttcgtcgtccccgagtactgtcttcaagagaaagaggcccacgagattggatattccggttgcatcttggagctcagctgctcctcctgcgacgccttcaccggcaacgtggagagagcttgtggagattgaaaatgatgggtattctgtgtattgcaagagagggaggagagaggctatggaggatcggtactctgttggtctcaatcttcaaggtgatcccaaacaggtaatggcttttttttttctttctaaagtttctttttaattatcagaatctagagaattgaaatcatgccaatattaataaggtgttgtaatttcttctttgcaggctttctttggtgtatttgatggacatggaggctcaaaagctgcagcatttgcagctgataacttggaaaagaacgtattggctgaattagtgagcaaggatggtgatgaccacattgaggaggcagttaagcatggttacctgaacacagattcagactttcttaaacaagattttcgtggcggttcttgttgtgtgactgctttaatcaggaaaggtaaccttgttgtgtcaaatgctggagactgccgcgctgtgatgagcagaggtggtgctgctgaggctctaacatctgatcatcggccctcgagggaagatgaaaaagagagaattgagaacacggtgagcaattaaactcatcccatcaaaattttgtatgaaaacttatattattgtattaagtttttatgaattaagactgatgtgtacattgatttctttttcttttcttagggcgggtatgttgatctttgccgtggcgtatggagaatccaggggtctctggctgtctctagagggattggagatcgtcaccttaaacaatgggtgattgcagaaccggagacaagagtacttcaaatcaaacccgagcacgagttcttgattctggcctcagatggattgtgggataaggtgtgtgagtttgataaaatttactcaattcttattatatatgtttgagtctttagtttcaaatgaacttacaaaattaattcttttgttttgtttcaggttagtaaccaagaagcggtagacactgttcgcggtttttgtgtaggagttgagaagccagagccattgtttgcctgtaaaaagcttgtggaagtagctgcatcgcgaggctctttcgatgatattagtgtaatgctaattcaattagggtgttacatatgattccatagtgttcattaatagaagacaaccagcctaacactctgatgttgttctgtttttactgttatgctgatgttggtaataaactgcaggctaagtaagatagggatgataatgttggtggttaaattatatgtagtgattattcatttgtaaatggttttaaatttaacttagttttgggcaattttagctccctttagttagctaagggactaaagattgagacgtagtcagatcactgattgtattctttatctttgattaatttattcttaaccattcttttctaatcaaaaaattgtattattgttattgttattcttctgaatctcgtaaag

SEQ ID NO: 265122 - DNA, 4242 bp, Cannabis indica
tacatgtcacttaaagtttaaaaattagcgggtgaaatagcattgttatggaaatattattgcttgaccttacgttttttttttttttaaaaaaaaaataatggagttttgctagtaattatccaaattttattggcagaacaaaaaaagtaaattggttattaaactttggtaataactataaccaaagtttaaaaatgatataattgctaaataaagattagaagttcaaagactttattgctaaaatcaaaattgtaaggtctaacatgtaataagtagtacatttcaagggctaagagactcaaatatgaaagtaacaatacattcatactattgcgcttttaataaatttttttatatataatggtgtacactataaatatttaagacatcctgtaatattttaaaaaataatgttcaaacagtctattttttaacatattaaattttgatgaattttttaaaattttacaaaactacaacataaactacttttaaaaaatattaaaataaaaaattctctttaataccgaaaaatataaaagtgcatcggtgcatcatacaattttccaaaactttatgtgaaataactaagaaacacaaagtaacacccacaactacttaaagaaaattcagttcaaatgtatgaaagttaccaagtgtggagcctttttggattttggtggttacatggtgaaatctttgctgtgaagagtaggtatgtcatctgtttcattagatgtttaagagccaaattaaacacacaaatgattttatataattgatttgcagtataacacacttttcagtgcaacgaagtctctttattttattggttaaagtaagtatgagacattacaaaagttaaggaaagtaaaaacttgaagtttttaaacacaaactttcatgctgcattcatttgatattgatatatttgttcctagccataagaagctgctacatttgattttgattctagcctaaaggcttacaacaacagtatttatgagaaaaaaaaatgaaagaaagaaaggagaaaaaaaagggggtatggttatattaactcttcccagaaaacttctttagttgatccgaaaacacaagtgttggacatctcttcttttgttttgtctcaaaccacttgtttgttttagatggtaatgtatagttaatcatggctgagcttgatcctgttgagccttataaagtgatgaaatatcagctacagcttctccaacagaaagatacactccattcaatccaaacgactccaaaatcttcgattgttgtagcttctcagtcaccgttcccccgggatttgccaagacaagctacaccgaaaaaaaaaacacaattttagcaccaaccccataaaacaacattgtcatttttcaaattgagaaaaaaaagtttgagtattggattacctgaagtgattttttatctaacatctttctgagctcagctaccatttcaataccactggtgtctatggcagttacagctgataatgataattaaattgtaagtgaaagaacatattaaaacatgtgttattattattagaaattaggattaacatatgtacctgtcatatccaagattatggttttcaatgtggtgccattgttagctgctattttttcttcttcttctctaatcaatcttaatatcctgcagttaacaaaaatcaaccccattgagaaaaccatggcaatgaaaattgattaaagtaatcaactttatgtaaaagggtattgaaaagaactaacctttcttgaaggtaagttgaatttgcaaagtacataggtgattcaactgcgagtatgagaaatgaaggaacccttaaagcttctctatatctgttgatgctgtggtatatttgagttccgggaatatttcccaaaaccatggtgtttggtctagtgacatgaaggaggatcttgaaaactgagactccaacctattattatgtacagaacaagtgagaataaggtttagtatatgctaattcatttctgtatcatttattaagaatgatcaaaataagacatggtatcttaccgcgatggcaagaccgagagggacagaaatgaaaagaacaccaaagaatgaagacaaacaagccaagaaatcgagtttgtcaactttccacaaccgccaagcagcctggtaatcgattagtcctatcacggcggttatgatgatagctgctaagatgacattgggagtgtaatagaagaggggcatgagaaacaacagagtcacaagcacagctgaagccattatgatgtttgaaacagcacttttagctccagcgttgtagtttactgccgatctagagaatgatcctgaaaaaaagaaaaactttttttactaaggtgtttgttctaatacaaattattgattggtgcctgagaaaacaaaatccttaccagtggtgacatagcatgaagaacaagaaccgaagatgttcatgattccaatagccatcatttctttatttccatcaacttggtaattctgcaatgatgcaaatgttctcccaactgcaactccttcctgaaaattcaagaaaacaaacataattatgaggccatattgttaagttttatcaagtaacagaaagagctggtgtgtttttcggatgacttacagttagagacaagatcccagttataatgccagttttgatagcaagagcaagaggattcaccactaaagtataacatgttagcagaaggtggattaaggcccttaggcagatgaccaatctgttacagaaaaacataaacaaagattattataatgattgaataacctttgatttatgaaatgaaatgaaaaattgtaataagttcttacaaatgagatgtggggtgattttgatttcagtagaaaggaagtgttgaaagaataactgatgttaatggggcagctgccgacaaccaaaagagttttggccatttcatgctctgcaacagttaatttagatcaataaataatcaaaaaagatttcatctttatttcactaatatattattgcactgttttgccaacatagagatacttacaatatgtctagtggtcaacataaacagtaagaagctaaagcccattacaatagtttgccatgaccactgcaaagaaataaaaaatcaagcatagttagttcttgacaataaatgtgaagaaaattttaaaaaaatatatttatgtattaaataaaaagattctccaaagataatgtaaaaagaaaaaagggattggcacttgttaatttagaataaagggcaatcaagaagtgtacccaatttataagatacattaggaaccttttgattgaaacataaaagcatccattggagagaaaaaattaaaatctaacactaaattaaaagcaatgatactaatttggacatgttatcaagcaccaacataagttgatttattccatgatgttgcttattctgatcaattttctttatataaaaaacaaaaataaaaatattagctttaatttttttattttcttacctcatctgtgtggctgaaaacagaagacataacagcaggtaattgcatcttgctagtgaaatggactatgccaagtaacccttttaactgttgtaaagacacaatcacagcagcaccagccatgaacccaaccagagttgcctttgaaagaaaatcaattatgaaccctaacctgttaaagaataaaggtcacatgaatatagtaaatactaacaaaatatatacatacatacacacacaaagttccttccttttttcatttttatgaataaatgaaagtaccttaagatacccagtgaagcttgaaagacaccagcaaagaaagtagaagtgaaagccagtttaagatagagaattggatccccagtgggagaaactgcttcacttaacattgatcccataactaaagaagcaattgaaactggtccaactgcaaggtgtcttgaacttcccagaagtgaatatatcagaggaggaacaaagcttgaatctgcatgtatggagatttaaagtcataattaaatcaacttcagctaagtattttaagttagtcaacacaaattgagtttgtatgatttagatactaacatagtccaacaataggaggcaaatttgcaagcttggcataactgattccctgaaattaataataaaaagaaaaaaaatgtgattaattaagacgaatttgaccactaattgcaa

SEQ ID NO: 265123 - DNA, 4649 bp, Cannabis indica
atttttttaattttttggtatatattttcaattatttttttctaaaagtatattttatatgcatttgataaaaataaattatagtatttttaaattatatttttatcatatataaaaataaacagaaactcaaatatataagaaactctaagttgatgtagaatgttaatattaaaagtataaaatttaaaatataaaatatttttttaagacaaaatgaaaaatatgagactaaatattatttattttaaatattttttaatacataataaataagtaaatgtatttttagtacatataaatttattatagacttttaatcaaaataatttttctaaaagttgggttataccaactataatttttagctgtagttttttttataaattcttcacttagttattttaaaattgtttaccaaacattttttcttcacaatttttttaaaaaacaacttttaatttttttaaaagttgtaccgaacaggtccaagatggaatttgagagtcaaaattaataatgctcctatcctaactcacctactgtgactggttgggcttaaaaacttgggccctcttacaattggctcatcatactcttggttatttatttatttatttatttattttgtctaaactaatataatgagtgattatgatattaattaatagtcatttcatgttagctagccaagtattttggttaacaaaatagaatggctatttttttttggttaatagtaagagttttgttcggtttgtttagcttcctaaatgttaatatatacaagaaaagaagccacaaaattgtaattaattaagtttggtatatacaagatcaatgttggtgtcaatcaatgtgtaatttgtttagcttccctaatattaatatatacaagatcttgtactaaataacaatggtaatggtgtgcctttaataacttccaactttgagtctcttaaacattaggttaaggttcaatatgccatttgtgattcatccatgctaaataattatcgcaagaatttcatggattattcatattgaaagttgttacttaaaagtgttgtaatttgtgtataaatgagattatgaaactgctagggttggtaccttaggagctaatataaagacaaataactatgtgataaatggaaatgcaattatgttatatttgaatatataattaattccattaaaataaaaataatatataattgattaagttcatataaatataaaaaaagatctaaattcagaatctcttgcaactacaaataattaagattatatataataaacaaaatagttaatatcatataaaaatatggaatagctaagctaaccaaccggggaaaaggattggggctagatttgggtccgaggccgaggcttgggtttgaggttgggatcaggtccaagtttaaggttaggtttaggtccaggttcagatacgagcctttagtcaggtcaggttagagtacagggtttgagtcgaagttcataaatctgagatctaggtctaagtttaaaatgttgacgattgaaaatacaaatacgaaaaaaattttatttaaataaattttgaaagttgctttgttttcaaaatttttacattttgatttatatttaaaaataataataaaaaaagtgaaaacaatttgatagtgctctttgaaaatatttataatctttcagtaatgacacaaaaactatacaaaatatttataaatatttttgccactccttcacaaacacagtatatgatattttccttttgccacaatcaaactcacatgcattcataaaaaagataacactaaaaagaaaagaaaaaaaaaactaatataaatatataatcactgtacatcattactactctttggttgaatctccaagccttgattatgattttcatgcttaggatctctactaaaaaccatctccatctcttccaaagttcttcccttagtctcaggcaaaaagaaatagaagaacaaccaagccaaaacagctatgcccgaaaacataaagaaagctcctccaatagttatagcttcatagatagaaataaaagtcatagaaattgtagcattcataatcctattcacagctacaccaatactcataccttgggcccttaatctcaaaggaaagatctcagaactataaacccaagtaataggcccaagcccaatagaaaaaaaggccacgaagacataaaccgaggttatactaaggcccaaagcccaaaccaacttctcagtcgaatgttccactacagttaagcaaatcccaaggctagacaaagcaaatatcataccacccacactagtcagtaacagacgtcttcttccaactttatctagcaaaaacgtcgccgttaaaataaacagagttttggttaacccaacacccacagtggctaataaaagcttgtctttactaacaaccccagctttcttaaaaatcctagggctgtacaaaacgacagcctcaatccccgttgcgtgttcgaagaaatgaataccaacggctgcgattaaaatccatcggacggctggtgatggacgaaggattaaatctctccaaacaccttggccacggctattgttcgggactttagctaaaacgacgtcgttacaatcaggatcaatacccgcggcgatttttatatcacgaaatcgaaaatcggcttcttctctagaattagacacgtgcgataaaatgtctttggcttcacccaaacgaccttgcataaccagccacctcggcgattcaggcattttcagaatccctaatgctaaagcgatggaaggaatcgccgccactccgagcatcaatctccatccgagctccaagctcagctttccgaagaggtaattagacacgtaaccggttagaattcctaagctgatgcagagttcaggtagtgacgtcagaaaccctctcgatgccggagatgaaatctcggcggagtaaactggagcgatcattaaggcgaaacctactccgattccggctatgcatcttccggtaaggagtacggggtagtttggtccgtaacccattagaacagctcctagtaggaagattacagaggataaagctattgtgtaacgacgtccgatgtagtcggaagttctaccggcggcgagtgaaccgaagagtgcacagatgttgagaattccggctaggatttctacttctacatcggtaattttgagatcttcttttataaatatcatggctccactcatcacaccagtatctgaaaaattattaattaaaattaacgttaaaatttaatcatatgtaattaaaattaattaaaagaaagaatgtttacataccatagccaaatataatagatatcatagaagcaacaatggcacatgcacatgcatatttgttgaacttttctttggtttctccaaaaccttcttccatatttttactatgtatcaacttattttgtatattgtatatatatgtctatatgtgtatgagtaatggtataagtatattttatatataagactcttttggattagcaaaggtatttatagagtaagatcatatcaggtatggaaggtatttgtatgagtagtatataggttgtgtacagctaagtatcttttgtatccacactgtgtattgtttggttttttttttgttataataaataaaataaacatgcctaattaaacaacatataaagggtttatatatatggtagaaatgatttatttttaagaaaaaaaagaagataatattcaaaagtaagtgatgacacagctatagtattagttattgaaaagataaatatgtatgaggaatagaaatgggaaacaaaaacaatataagcttaattaggtaaaatgacccgtccttgtagaatttcaatggcacaaacataagatgaggagttgggccaattaactgccacatcttatcttatatatataaatatatttattaataaatatcacttattaactaattaatttgttttgatttaaatttatttatttggataaggtgtgatacatggtgtgtgtgtatatatgtatatcgatccaagcttgtatatttgaatgatcatccgatttatttgccactggccgaggcatagtactctttgaaaagctttgaacattgaattcaatatttttattatgtatttaaataattaataataattatatatctattctatataaagtgtgtctatataaccgaattcttggtttatgagaaattcatgggtgaatttttattatcattaaaaataaaatagtttatgagaaattcgtgggtcactttttatttatatataataaaataaataaaataaatcccattaaatccaaaaaaaaaatacgattgggtttttgctgttgtatatctacaatttttctcttcttcttctcttctagaattaccattttcctgtaaaaatactcattaaaagaaaaagttatattttagcacataaagtataattaagaagccataaaattgataatttcgtcttctgttaaataaaaataaaagcaacttaaagcattataataattatgctgctttgtacatgctgcgacaaaaaggaatgccaatcttattaatttctccatgttctagctatt

SEQ ID NO: 265124 - DNA, 520 bp, Cannabis indica
caaaataatactatgttaaaagtgagagataaattaatactagtatcaaaagtgaaggacaaatccttcataaatatatattttatatataaaatatatataatgaaattatgtagttgcagtactcgctcacatgcatggacctgcataaaatagcaaattttgtgatggggctcatacagaataagccaaatacatgaaaacttctgctgacctcatatgtatgagtagcttgattatctcgatgagtgttaacatcaccatgctatagctgtctgagactaaatggattcatatccctccgtacgatctaatataattaatcatcatactacctcatttatgcaaccacgtgaggcaatcaatatatatgatagataaattcaacttcgttgatagccttgaaactaagcatatactttgaaaaattaagagacattagcgagaagtccaaaagcaattttgacatagaattcccgtgctggataccaatttgaataaatggaactattatatgaac

SEQ ID NO: 265125 - DNA, 2249 bp, Cannabis indica
taagccaaaaaaaatcataccaatatatttttgaggaattttattacttgtattgtagatgtagttgtagatggtgacttgaaaaatcactgctaaatagtttttcgggtatggatgtatacgcgagcttataaatgtcctcgtaaagagaggacaacattgtcacagaaaaaaactgaaggaatttcctttccatttacatctcatatttacagaataataatgtgccttgcttcctctacaaaattctttaactaaccaccccaaccagtcctattctagactgcagacccctttaccctatcaacctcctttacacacagtattactataaatacatataattaaattataatttctaataagcaaaccatatcaattaaattttattttatgttctcttgtccgcccattccccctcctttttcctttcccgtttcttttttattgggtttccctgttcttttaaattctcttcttttgtgttccacatcatctgccaacctcgacacttgctttgaccagtcagatcggagagtttcataaagaaaacatgtttctgccatgaaccagctcgagaaagataacgagccatcatcaaaagaacccgagtaaagataattcagagcattcttctaatatgttttctcgccaatcctgacaacttcaagaacagtagcattgcagaagaagcatctttggcaattcaacagatgtcttgttatgcatccataacaagacatgtgagaacaaggcacaaatctagcatctgcttcactggtataacagatacagcaaatgctgtcattcacatctgtttcttcttcacaacccatctcaccaactttttcagactcactacggctgataaggagagccaagaaatcttctagctgttcaagctttgtaagataactatcccctctaaaagatccaccctggaaagcatgaagtaaacaaaatagattagaagatattggtaaacatgatgtgataattctggtggaaattccaaagttgaacctaatttaagaaccttgaatatccattcaaaaaaaaaataataacaatatacgtgcatttcaggaaggagcattttcaaaattgtggtgtcagttcacattttaattagcaagacctaatacctatatagagggaataatctaaaatctaacttgatgttatattgcaggatatgttgtctgctcaaagacttgaaagttacacgaaattaggaattttaaagagagattattcccatcttagaaacataagcggaaaggaaacccaataagataaattaaaatggaaaggaacaaacccagttgtaatccaataggaactggaatccacaatgaactctagcagggcaatccatacttgcaaaaatggccaccacatcgttgttttccgcaaacttcatatgttcgctagcatccaacaagtttaaaataatcccaacaagaggtgctagtatcattcctctgtttactttgtctaaagactgaccatttcgtctaactgacctgcaaaaatttgttgcaaaggcagtaaaagaactaatatagtagacactaaattctttcttttttaaagttacactaataataaataatatatacatgaaacttgaaccgtagacccacccgcccaaccccatgactcaaccacaggtggaaacttcaaaataaaataaaataataggacaaatagtaatattaaaaagactatcctggttttggtggtttagggaagaaaacgggaatatatgccacaacgaatgaaattaataatcccaaagaaaaattggactagacataatagctagccatctctagactctacctttaaatgcagctggactcacaaaggctaattaccgattcatattaggatgtacgcaattttaagacaaaacaaaagataaactagagaaagaaaacataatttaatagataaaagtagagtgaatcgctagaatggaacgtacaagtcaaaaaactcagcatctgctgcacaagttatgtggtttagaataaagacaatcaattctattaacctccggaggttcgtgtcagttcctctcagaaatgcttgaggtatctcatgggaacagaattccaaaacccttgtaagattacacgagaggtcaaatatgaaactgcatttcttttgatgaaagtctaacacctgcaaagatgataggcagcaattacacagaaatatctcatggcagaaaaagataacaa

SEQ ID NO: 265126 - DNA, 1446 bp, Cannabis indica
ataacgattcgacccctctctcgtcaaaaagatttggtcaggaagttataacagttcgaccccttttttgtcaaataggtttggttacctttaaaaagcttcaatttttaaagtgtgggtttgcattatatcatgtatttccagataaatttcggttaatcatacatatatgcccctcaagtaattttaaagggccatactttataattacttgtcgaaagaaatgattactttattcacaactgaagttcaaaatattacatcagcgatggagtttacaatccttaatttgccatcgatttactcccataaggattttcccagttcaattgcttattttatcaatcttccagaagcatctagttttgataaaacaggttttaatgttcagcgtcaatctctaacatattcccacaattgtttcgatatccaaggtccatccctgccatatcccaggttctaggttaattgatcctagtttcagttatttgtcctaactgccactggttgacgacgacttttctatgttgcagctctagcagccattgtgagctgtatttgattacttcgcaatacttttatgtaattgcttgtccagactaactgccccttgtccaatttttcttgtaacatgttctcctcccgagataaccgatgtatcctttcctcctacaaaggaaggttatggtccctggtcgcttgggttactggcagatcagattggtcatggacattgtcctgtcccttcacaaaattctggaagtgtcctcgcgctatgagaccttctatctcatcttttaattgatgacactcttccgttgtatgcccaatatctccatggtattcacatcgtctggttgggtcccttttacgtctcgcgtgtttcatgggctttggtttattgaaaacgacctcctgttcatgcgtgaggtagatactttcccgagtttcattaagctcggtatagatagtataaatgggtacgtatttgccgtgcttcttttgtttcttatctttggacgacctcctagagtcgtctttcctctttgaccctgaagcttccgactcgaattcttcaacagaatcacatcctgattgtcttcttggctccccgacttggtgtctcctgaacttattctccaactcgtctattcgcaaatggatcgaatccccttgctttggaccaagttgttggcgaagatcaggttttttctagttcaagcgttctcgtaagtccgattggccatgacgactggcggatcttgttccacccatagaccgtacttttcctttttgatcatcgttgcgatgagtattctctcctcctcacattaatcgattatgatttatcgtgcgccttgcagtacactcacctcttcacgccctactcttctcccttgggtttgattttcttgttccccctattgggatttgtgcgagctcctt

SEQ ID NO: 265127 - DNA, 837 bp, Cannabis indica
ggtgaccaaggcttcggggctttcctgttctgataaattaaaatttttgaaaaaaaaagagtgtaaatattataattaaataggttaattgttaaaataattaaatcaagggatttatatataaataaaaaaaattatttaaaaattttaattgctaaaataggtctttgttaaatatttatttaattacttaaaaaatagttaattataattaattaattctaaaaatagaatttttatctattggtaacctgctattgcaggtaaaaaaaaaaatgtaaccatatggttacaataaaaatgtaaccattgaatagtcacccatctttatatatatatatatatttttttatagttttactagtaaattttttaactattttattttatttagataatattgtatattttaaattattaacacatataatattttattttttatttaatttattttttatttataaattataattttatttgttttaaaataaaggaataattatatatggcaatttttttataaaaaaaattacatttttacgtttaaagaaattttttttttttttacaatttttataattttccataaaaacaacacaaaacaataagaaaattacataaaagtaacatgaaaataacatctaaataacaataaaaaataacataaaaataacaaaaaatcaaaaacaaatgaacacgagtacaacataaaaaaattatataaaataaaaaaaaatacctaaaaatattaaaattacataaaccatattttgtaatttttttttgttgttttgtgatttcgtgaaataatccttaaaataaatgggtcccagt

SEQ ID NO: 265128 - DNA, 2107 bp, Cannabis indica
caaaatcatagtcaaacaacaaaatcgcatcaaaagcacaaggatacttcagttcgcgctatgggagcatcagtagcatagaatttcaggatagcctaactagtaaagtatcaggataaatttcacagcatccactttatttatgaaatgggcagacattgaaaactgggatgtcaaacgagtacgggcatattctttccaccaacataaatcacttcattatcaaaagtcatttgaataaggcatattaattattacatgattaaaaaaattcattaaatatttgatgtacctcattccgatcacttgggcaataatcacctatgacactccttagatattcttcaaattcttcatcaggtgcctgaattaagaaggatagaacaactatgaattagtacagcaaaaatgatatataatgctagaaattagagtgtaggtaacacaacaatgagcaccattcactagtaactgaagtctgttaatgaaactagattaattaatttttttttttgattaaagattaattaatttaatttatgtgagaatgtgccaacaagattccaaacaaggcaatagtgacaataatttgacaaacttgatgaaagaataatatgcgacattaacatagtgaaatgcagttaaagtaagttaacacaccaaacgaacaccaaaagcctttgcaacaccagccaaagttaaatcagaatgcagtgggcctatccctccataaatgaacacctataattgaaaattatatcatgtacagatcattattagattcaaaatttcgatagacaaaattgcattcctttatacccttcctgaaaactacaagaagagcacgagaggaaattattttcatgaggatttaccaaatcattagttgagcttttccgttcaacttcctcagccacagaatctacctggtatggaaagtaagcattgagaagataattataatgcaatgttgaaataaaaattctagctccgtaggtcaactaatatcttcttttcttttcccctttttttttccaagtttttccctggcagttggaccgggatacctcctagtggccccaaagtttttgagtctgtgaggattcgaactttggaacaaatgcctaccagcactttctaaaactcatccataccactagaccaccccttggggttatagctcgactcatccatcatttactaaacaaaatatataaaggtaattacattgacaaatcatcaaaaaagaaaactcacatcattccgaacgaccacagtttgtgacattgaccagccgattgaatggagctttttacacagcaaaggccccaactggtcctcaacaatgccaagcctgagctatggaacagatagatagaatattaaaaacttcaaacaactgaaaaggcaatggcttaaaaatctatcactcaagttccaaaatccccacacccccataccccacatcccatctccacctccctcttttttcaactgattagtttccttatcatgtcagtactattccttttctttggatcattaaatgttaagtgaaaaaagctacaagatatcatatctcagtgattttaaagttatattactaatatgcaacttagaaattagagatctaatcaaaactaagatgtgatgcaaagacaaatcactgtatcaaattcattgacttttaaaagtaggaatatggaatgcaaacataagaaaggccgtgtagagacaagggacgcacaggatctcatcacccacagctatggctgaggccgtgagtaagctatttttatgcaaatccgcactgattagaccattgctaaaggaaggtgaatgcccagaacctgaagaaaatttgttcactctcccagctctctctaatcttccatcagaaagtaagtatgcgggtctaaatttttctccactgctcaaggagttgctgacactcaatagtgcattaggaactgtgtcatgtatgctcccaattgaagtgtaactgtgaagatgaagacagaacaaaattatctggctgaatatgattaagaaaatgggaaaaactccatgggataaggatgaaaacaattcactgagaaaaaataga

SEQ ID NO: 265129 - DNA, 886 bp, Cannabis indica
tttggtttaatgttgcaattaagatttttaatttcctttccttagaaaagaatgtaatactaattatgggttcattttatttgtttttttatatatctgtatattcttaatttattttaatttctaaattatatatattaaaaaatacaatcgagcatggtgctaaatcgcacaaggaacttggacaagccgaaaggatgcacacacagattaggacaatccctgtctaaagacacggtgcccactccgttcagacacgatgaggccctgctactcgcccactcgaatgctgcatccgcccatgtgtgtcgcatgtccccctgtatccttcttcctttgcgcgcgtaggaggttgcatggagccttctcgtgggcaacaggtgctcatgcaccaaaattcgaattttctaatttttttcaacaaattttgagtttttcaattttcaaacactaattttaaaattaaataatattttttatatatttaaacttaaatatcaattttgtaaattaataatatttattttttaatagattattattaattttatgatattttgaggtttaaatttaaaaattgattattttgttttaaattatggtcatattttaaaaatttgttaatttttttaatttatatattatttaattataagatccgatatttcaatattagccatgttatcctaaattttgtactctgacgtggcatcacgggaatggttacacgtggagtccacttggaacatctgctcaggaagacacgccgagcaagatgccccgctggcatgcccagagcaagatatccagcgatccgcgcacagcaatcaacacttagcgaattcagttttcgcatcatgagtcatcagctcaatccctataactc

SEQ ID NO: 265130 - DNA, 572 bp, Cannabis indica
tcctgtctgtagcagagtatcaccaagatctgagcccgaatgtccttctcttgattctggattcttcacagccttacacaatatgattgagataccgcttgatgtgtgtgggcactcactctatcactcaaggtatgaaaatatgatgaagaagagagagacgctggttcgaaaatagaaggaaggatggctcaggaaatttttttctgaaggcaagaaatttcatcatcttttaagtgtgagccatcactatctatttgtagacaaccacctaagtttaggttaggatttattacgcattaaaataatggaaaaattaagtggaaattccataggagtggccggccatagtaatgggccccactttggaatttttccatttctgacaaaatttttccttatttctcaaaaatgtcatttttctaattctaaccatttaaatgccaaaagtatttatttaataattaaaataaattatcaaataaaattgccatttaatatatatatttgttaattagacataataaagtctttcaattattaaataagacttagaatctcttttcttcaca

SEQ ID NO: 265131 - DNA, 538 bp, Cannabis indica
cacttaagttctagggttagggttctaagattttctttgttctcttctaaatggcagcaatgaaatatggttcttaaaggtactatttttcttaaagctttttcttttttttcttattctaatggcagcaagagttttatgggttattctaatattttctttctttctttgcagctactacccgaaacaagaacaaccccaaaaactcactcactcatggctccactcactcaaacccgaacccagaaaagtgtcacaacctcacggccaaaacacaacctcacggccaaagcccaaaccgaaaaacacaacccaaaaatagcaagaacactcaatgcacacacaaatacaaataccagaaaagtaataagagtgagatgagagaatgcaaacagtgattaagaagatgacaccaaaactttgatctcggagttcgcccaaaacaaccggctacttctccgtcaagccctcagcttgattccactaatcatcaaacaaaggttacacttttgatttacaacagtttgtatttctctct

SEQ ID NO: 265132 - DNA, 5914 bp, Cannabis indica
agagtctattctctttcaatttcccacctcctttacacaatgaatcaaaccccctatttatatgtataaatagaataatttaattgccagctaggatctaaaaagaattaataaaaacacaatcctctaagataaaatagccagctagataaaataacaaaacaattacagctggaataaaaaattaaagccctatctttaagtgtatcgtggcctcctagcgtatactaacttgactggaggcttatcagaaagcttaaaatcaatgacaagaagattgaagctctctcatgagttgtcagtcatgtataaacacaataagttacagacctgtagctctgagaaatccaagtagacagtgtcagtgcttcaggagttccaggtggcggacgaagaccagtatgagtgctcaaaccagaaggcgagagagccagtgccactctctgaactgatgctataatactccgaacatactgcctagccatagctgctacgctttcttgaaggtgcatttcaaatgcaaactggaatgctattgtcatcacagactttctactgccagaattaccagcattatcaccagaagctctgttcgcagctggcccaacttctagagcagacgcaagatcaagtgttcggttaggactaggggaatcctgaatgtaatttgagcttacagtcagcaattttgttttcaaacacagagacagatatcacaccacactagctaacacgtgctcaaactgaaagcttaccgtcccagaatctagagaaatgatgcggaatccagaaggtaggataggtgcatcatcagagaaggaggcatcaatgggagcaaagacgagttcagcacagttaccaacagcgttctcatccactccactacaaagctgcggagaagggaaaaagaaccttcttaagaccacaaccacaacaacattgctttgattgataacacaatgttgaccgcaacattagactaatgtgcaagactatactgcttcttgtattaatcaagagatgaaaaataaacaaataatatactacctagaagaaataaacttacttgcaatagaaagatgtcaacaggcataatcatatcatcccgataatgacccatattttcgagcttaatcacctccatgaactgttgaaaacaacccaacttagtgccagcaaatccaaaactgaaaaattataactaatattcaccaatacataacggcattcattttttttttcaaaataatgacaaattttctcacctcttcatgctcaattgtgtgagccagaggaagaataacttgacccccgaaacttccagctcgagttcctggtaagctacatggaccagctttaatagcagcagctgagtaagcatcaatactgctgtctgcccactctgatcggtgctctctcagaaatctcaaaagtacagctggaggaacattctacatagagaacaacacataagcacaaaataaaatttagaaaactagtaaaaattcaagaagcattgttgtaatattgtatcatattaaatagttgatggtttattctatgatctgcagtgccattaacaattcttacaaaactatcaaaatctctaacctgcaacaacatggatgctttggcgcataatactgagttgcttgcagatgggaatccattggcataagaaatatttgcacccataatcttgctaggagacgaatttacaagaagggtaacatcatcaatgccatcactttctagcatagaccacccttcatccgtaaatccattcactgcttcattgaaacccctacattatacatgtaagattttataagataaccacaataaattcaactaatagaacgaagaaaaaatgtgaagattattaaaaataaaaagcataacatacttgcacagtttctgactaagtgcacgaagggctgcaggtcttctcccccagcctgttgcatttggctgagaaacttcttgagaaatctgcctcaaatggcgtaatgcctgattcagaaaatgtaagtcagtttattattagcattgctcacttgggacttactaacgtgacatgtttaaaataaataataaggaaatactcacagccattgttgtgttctgcgcaagcaatgttgatgactcatagagtgggcgtagtacttcaggcacactccatggctaatagaaacaaagaaacttgtcaatacaccaagagagtggctgagattgtttcatcatacatacgtacaaaagaatagtaaagcagttttgtacctccaaatccatatggtcaaccacatgaatgatggacccaccaccttcacaaggtcgtatcagatatccacttggtagcatctctgctctaacaaaattctgtaccactggcatgctcggcccattctgagtgttgttaagtgatctttcacacacctaatagtataatcaaatatatgtctttacaattaataatgccaaaataaatacaaaaaatgagaaagaacaaatgggaaagtgaagactggctaattattattatacataccacgagactaccatcttccaaaactgatgtgtagcgcagcaaccagaaatcacgagctggagccaaagtagttggtgcatagagctatataatatatatgtcaaaggccaaaacattagtaagcaactgcaacatcaatcaagtaactctaaataataatagagtatagctaaatagcacaagtgtcccccataatactatatgagacatgacaagtaattcaatatcagattattgtacttttattattgttgtaattcaatatcagattctacattttaatttaacaagtaatactaaaaactgctagtcataaattcataatgtgtcacctcatgtggtgttgggtgttgggtacgcagaaataaggctaaagaaatatagttgttctacctgcatataaagcagttcaatagtcccaccatttccagtagacaacacattaataacatccacagcacggcaatcacgaaaccatgaaggccgatctttgaggatttcagcaacctgtaagaaacctctcagtcattagtatttcaccaaatcgatctagctactaactaaggcatgcaaaagaaaaaagaaagggaaggaaaatattgttttgaaatttgatgataatagactttttctaatatatatatatatatatatatgtctactattgctctaaatttcataaagttgtattggatttaactctatttttctaaaaacatattttaaaaattgttttgtacacttatttcttccaagagatgtgactaggacttactcttgtaggttttttgagcatatatatacatatatataaatatatctacaattgttctaaatttcataaagttgcattggatttaactctttttctctaaaattatattttaagaattgttttgaacacctatttctgccaagagatgtgactagacttactctagtaggttctaaacccacgagaccgcatgcacgtgctgccacaccagagcaaccgtgagaaatagcaacgattccaatggaatccggaccaggctgcaaaacacatacacaagaaaattttcggtcaccaagcatttataaagagaataactccaattctattcttttaattaaatgaggaatcaacgaagcatgtcaaaaaaagaaaaagagaactcttgaattagatagtgacataactaaggaaaagaaagcaaaatgttcttcgttcgtacgtttccggttcccccaggccccaacccaatattttaagcaagaaacgaaagtatgtcgagaaaggtgagaaagagaaagaaaaaataaggcttgtcactagtgctcaaaaacatttttctggaaaattacgaagaataatcaatggtgttgaagacgttgaatcgtgtgagaaaaagagcagtaaccttcatcccaggcatttggacccactccacagcagttccagtggcctttgaaagaaactctgctaaagtttcatctgcaatggacagaagtctacaaaccaacaaagaaaaacaaataataattcattagccaagatatatagtaatacaagagttacataacaaaaataaaagaaacaaaaacaaaacaaaacaagataatgaacaatgacatatcaataaggctctctctctctctctctctctctccattcactaaccctgcagggctggcatcccttgggggatgctgaggagtcaaatggtgttgaccactcgtcaccaccgattcacaactcgtatccgtcgtagcaagggtcgcctgaaagtgataatacaattattgataaacccttaattaatcaacaaatttaaataactatgaaaggaaaaagatcccggttggtaaatattgaactaataactgaagggtttattatgctaatattatcagttatgtggagtacattttgggtttgttgacgaaagtaactgttctcgtaaaccagttgagagacttgcttctgcaacctatcgttctcctccattaaaagcttattcatcgctgtgagtttcctattcacagcctgcaatcttgacgcttctttccgctgtttctctctacatctacacatccgaattgaaaaatatactcttcaaacaaaaaaaaaatatatatagataccaactttatcggaagaagaagagaaaaacaatagcatattaattactattattacgtacgtaccttcggttctggaaccagaccttgatctgcttaggctcgatattggagaggatgggacactctcttatgagctgctggcggcgcatggaactgggcttcgggcaatcatggtagagcctctcgagggcttccacctgttccggcgtatacctcacgtacttgccattgtccatggcgattttggtcccatctttgcaggatgaagtcacagccatcatcgatccccccaacttcaaattttcacagaaatatacaaaagtcggttagaaaaaatggggaattaatacattatcattaaggccatttctcttggaaaaataaaccatcttgaatttccattttataacgaacccagttgtgaaaagactctggaaacgccattatattctcatccaaaagagaggggtaaaaatcagttgcgaaaatacatcccaaacgccattaactctcacaaaaagaaaaaaagtttgaatttttttaactacatacagttaagaaactacatcataaacttcattgacttttgatcaaaagaaaaactcttttacttttgtttgatatagtacttcaagtgttcattctgttgcataaagtacagttagtacgatgaacatatcttaatcttaacaccaaaagaagagattgacggtaaaaagaaaaattaccctttatcactctctcgttggctgagaacctttgttggttttgggggaagcggacgagcttaaaaaccagaagctaggccatataacactatggatagtaacttcgccagccacatcaagccaagaaatttttaacttataaatcaatccaacacaataagtcttctcctttagaaatcgaagagctgatctttatcgcatggactgtaatcaaagtatagattgttgagaatgggaacccagaaaaaggtagctctaagataagaaaagagaagttgagtttgtgaagcttaagccattaaaatcgtactcgaagttgagttcgttgatgggatttgtcaattatgcccaagtgtacatatatcggaggtgatagtgatacataatagatttatacatatatatatgttcttgtgtgtgtgacaaatgaaaataagatttgtacaacaatcgaaaaagggaatgttaaaagtttcttgtgttgttgattggcaacgaggaatcgaccaatatg

SEQ ID NO: 265133 - DNA, 866 bp, Cannabis indica
aattcgctaccgacgctgttctgacgctaaagggttaaaaacaaccgacgccataagacccctatggcgtcggttattatgtgatatcaccatctcagcatttgaaacatccatcaacatctctgaaaactctaccacaataataaaagaaaaaccttccaaatgttaagaaattataagaaagccaaagccaacaaatgatgatcccattaagggtgtactaataaggaaccaaagtcattatattatatgaacaagtactaatacaagaatataaaattatggttttaaggattcgaaaagagtgatgaggactttaccatttgagtatgtccagtgagtgtagatgctgagcatttattatccaagttcacactattttccaaagtacagaatgttactcaaagaaaattagataaagaaaaaacttactggattgagcaaagtgcaagtttcacaaccccacatatatagtagttttctgtctgttatttttgcaaatcatattttgttatgtatttttttctttttttaatgagtaaatcacatttgaatagtagaaaaatttgcttgataatgttttttactattattaaaagagtactcttcatttctaatataagtacactactataacattcaaaatttatttcttggaattaatataaggggaagtttcatatttttagaatttttatcaaagaaaattaaaattacataagaaaaacaatttaagataaggagtaactctttacaagtaaaataaaaataccatttattttgtatcacgtatattaatacaaagataattttattcttttattattattaaagaaaacacacagagcttgaaagacatggctgat

SEQ ID NO: 265134 - DNA, 493 bp, Cannabis indica
taaaataagttttagagtggttaacccagtatgaagacagtgatgactgcaagagagaaatgatggcatatgaactagggagcaaaaccttaatgataatgatggaaaaagaacacgagcgtcttagatgttgatggattagcatcatcaacgggagactcactataagtttgtatggtaatttgtaccaatgggttatcaatataacaaagaatatacttgaggtaggtatatttttgggtatgttgaaaagatcatcaagatctctaccaaacatagaaaagaaatttcatgatcacggaatgatctttgattaattgctattagttgagaattcaggaaatatgtattttcagtttagttatgggtatctagtatgagcaatgttgcctctactgtataggttacataaattcactttataatggtagttaattgtaagtgattaggaaattttaaagttgtgtcaactcaagagaaattgatgcatgtt

SEQ ID NO: 265135 - DNA, 1149 bp, Cannabis indica
cgccgctaaagggcaataccggcaaatttctggattattaccagcggactattccgcccgtaatattggtatttgttgtagtggaagattctaatgttttttatgcccttcaagcagaagaaaatgatttactaactaatattttttgagctgatgtgaaaatgaaggaagcttattcacattttggtgatgttgtttgttttgatacaacttacaaaaaaaatcatgaatgcagaccctttactatgtttgttggtgtaaatcatcataaacaaaccacattgtttggagcagcattattatatgatgaaacatgtgaaacttttatgtggttatttgacacattttcagcagcaatgttagaaaaaaagccaaagacaattcttacagatcataatgcagcaatggcaaaggtattagcttttcagcggccaaaaacttatcatcgtctatgtatttggcatttgtatcaaaatgcagcaaaacaccttagtagtgcttttcaaaaattttgtcagttctcaacaaactttggtgattgtatataggaacatgaggaggaagatgaatttatcgaagcatggaaaaagatgcttgaaagatataatctcaaggataatgaatggttggagcgtacattcaaactaaaggagaaacgggctttggtctacggtagggacatttttttgtgcaaatatgactactactcaacgaagtgaaagtatgaataatgttttgaagcattatgttagctatcaacataatatgttgcgacttttacaaaattttgaaagattagttgatgatcgtcgttacaaataggtaaaaaaagacttcagagcaattcaacgtaagttaccaccatctcttccaattgaaattctaaatcacgctgcaactgtatacaccccagcaattttgaaaatatttgaatttgaattttcaaaagtatataattgtgttatggatatttgtcttgagcatgagacaaaaacagtatacaagttgactcctaatgagagacgttttcatcatactgttaactatgattcattaaatgacaaaattacatgcagttgcaagaaatttgagtttgcaggaatattatgctcacatgttctcaaagttttttcttctcgtaatatgggt

SEQ ID NO: 265136 - DNA, 1956 bp, Cannabis indica
aaggcgttataacgattcgaccccttttccgtcgaaaaggtttggtcagggagttataacagttcgatccctcttccatcaaaaaggtttggtcgaggccctttaacaagttttcaaaaaaaatttaattaattttttttgaaactatgtatgggtttgcattgtactatgtatttccagatcaattcgggttaatcatacatatatgcccctcaagtaattttaaaggatttatgctttgtaattacttgtttgaaagaaatgattattttattcacaactggaattcaaaatatttcatcagtaatgtgatttacaatcattaatctcgaaagaacttccccagttcaattgcttattttatcaatcttccatgagcatctggttttgataaaacggattttgatgtcgagggtcaatatccaacattctcccacaattgtttcaatactcggggtcgatccttgacatataccggggttccaggtagagtaatcctaattttagttctttgtcttcaagtgctactggttgacgtctagctttccacgtgatagcttgatatggcaaccacagtgggccgatatctactcatgttattgctttaccgtagtaactgccttttgtactcttgcgactcgctccctctcgagataaccgaagtgtcccttcttctcgtagaggagggttataatcttcagtcgctcgagttattgggcagatcgaactgatcataggcatcttcctgccccgttatatattgttgaaggtgtccttgcgatatgagactttctatctcatctttcaactggcgacactcttctgtggtatgaccaatatcatcatggtattcacactgcttatttggatccctcttgcgcctcacatgtttaataggtcttggctcaaaaaaaatggcttcttgtatatgtgcaaggtagattcttttcccaaatttcattgagctcagtgtattcggtataaagagggatatacttgttgggtttcttattattaggtagccttttggaatcgtcttttttctttgatctcgaggcctccgaatcaagttttccaatagtatcatgcctcggtcgtctcctaggctttgtgatttgatgcactctgaacttattctccaactcgctcattcgcaaatggaatgaatccttttgccttgaaccgagtctctgacagaggtcaggcttcttcaagttcagatactctcgcagatcactcctgtcatggctgcagttggaccttgcccttcctcttagagtttggtttgccttattctccctatatgggtttatgcaaatttcttcctgttgaatctgaagaaagggttggtgattttcatttgatgttccacgtatcccaagctatacccccaaactttgctcagtttcctcaggttgcatctcctaagagttctgagcatatctctgggtcatctcctaccccttgatttgtgggccgcgaggtttgcctcgcaaatctcttctcctgaggtcaggttgatcttgggtaccatcctcatgcgctgcctttattgcagctattttaggctctaactcggcattacgccagtttacttcctccaatcgactcataagatggtgattttctaattccacgattggtatgaatctggttgggtcgtaagcgccatcttcatcaacctagtgtgaccgatcattgctcgtccaaagttcgtcaagccaggggccccaatactgggtcctgttgggacttgcagtttgttcatgcgatgactcgatagatccctgaagacttaatggttcttttctgtgacgatgattgattccttcttgaggattattatctttggtgtcatccatgacttttatgtcaggaggtttctttctgagcttttttcacagaggctctcaatgaaagcaccaaactattaacgcaaatttttgttaaccaaat

SEQ ID NO: 265137 - DNA, 525 bp, Cannabis indica
ttgtgttggtgccaagtttttgtggtgcaacttcaagctcttcaaaatgtgaattcaaagcaatctttaacttcggagactccaacactgataccggtggcttttgggctgcttttccagctcagtctgggcctttcggcatcacttattttaacaaaccttctggtcgagcttctgatggcaggctcatcgttgattttctaggtatataaacatatatattaccattttttatttgttttgttcaaaacacaaaattcgtaactctattattgattttggttattctactctgcatagttagtatcgaccattttcgtcccaacataattaagtgtaacggctaaacttatttacatatttattgcaaaatttatctatttttatcatttcaattgctcactctcgagatcagtatggtactacttatttattcaaaattgaaaataaataacacctcgagataaaggagacgtttgtgttctgcgttgtgtcgtacagtcctatagggcactatatattact

SEQ ID NO: 265138 - DNA, 1216 bp, Cannabis indica
tccctttcatcattcaatcaaactgtcttcaggtggttaagtacctcaagggagatttcaaagcaaaatctgattgggggcgctgctggaagaagttcgtgaatctccgtatttcatacactgcttggccgtgactcacatcagcagacaatgcaacttggttgcccattctttggccaaattggctaactcttctaattgtaataagttgtggttggggaattacccttcttgtgcgtctgcctatattttggcggacttgccaaaacttttgtagttattttttgattgaatatatatcttacaaaaaaaaaaactccaaatttatatcacaataaatacattacttttatatttacttttaattacttttaatattttattattaaatttagttattacattaaattataaatcttttacatttaattttattgtcttatataataaaattaattgtaaaattatcattataagttttttttttattatttttgataaataccatattttttttctaaataaagatccaaaaaatattttttttcttatggcccattaaattttcaggttcgaccctgctttgtgctgtagaaattagttaatgaaaagccctattatgtttttattacattggcctcgcaacgcctgcaccactaactgttgaactatacaatcatgctgattgcaattgaaatgggcccactgatgtatctctttgaaatgccaatattaaatgagtaagacaagaggctagttaatagcagaaatatctactcaatcatatcatctcatgcctaactatgagcttcaatattgatatttcttaggatgatgtgaggcaccagttaggattggacaagatccaatccattccaattgaactgaatcaattcaattacaaaaaattgtatatccattacaattggattggattggatgtcaaaagttaaatgtataattagattgaatcagttattagatgtcaatctcaaaatccaattacaattaatatgtattaaaagttaatttatgtataataaaaagtatttaaaaaaaaactgatccaatccgattataaataatatgtttagttttttccaacttttagttaccttaaacctataaggatggtactttttttttagaattttaaacttaaaagggtgataattagttttaatgtattttttttttcatgtttttaagtttacat

SEQ ID NO: 265139 - DNA, 659 bp, Cannabis indica
tatgtatgtgtataaccatttagtgtaatttataaattataattaaagtatattatataattgtataattccaggtggctatttaattatattatatatatatgagattcaatatataaatcaaattattttataaaatatgtatgtataaccatttaaatataatccataaattatatttaaagtatttttataattgtatggtaattcaccattgaagtacattatataagtctaggtgactatttaataacattatatatatgagattcaatatataaatcaaattattttataaaatatttatgtataactatttaaatataatctatagattataattaaagtatattttataattgtaaaagaattttaccattaaagtatattgtataagtcttggtgactatttaattatacattttaaataactcaattattgaatgacatagtctaagttaatttttaactatttaaaaaattagagtacacactatataagtgtaatttcaaggtagagcaaagttaagttcttatcgaagaacataaaagaccatgatgatagtgtaaattcaaggtagtttatggtcgttcagagaaaattcaagtttttaaagtttgttgaagaacataaagaccatgatggtcgcatagtgtaa

SEQ ID NO: 265140 - DNA, 556 bp, Cannabis indica
atgggtaatacctattaagagtgcacctatatatttatatacgttagattttgaaatttgaatgttggcattcttcttcgattagactccaatataatctttgctatctcaatttttttaattaatttaatttttaataattttaacatgtatatatattattgtgtttcaggactaagaaatcaagggagatatactattgttagtggccttcttaacaacttgtatgtcgaaaaaattggttcatttgaatcaaagttattagaaatcgatgctaaatctcaggtgattttcttgacaaaatatttcattctccttctagatgctttttatgtagtttgataataataataactattctcattctctttattttattttagtgtattttacttctcttcttctttttattcaattaattttatgtaccgtacaaaataaaatttgatgtgtaaatatatatagtgtactcctaccacatatatatggaatattttttaatgggtaatacctgttaataggtgttgatttcgcttttaaccaacgacaatgagtc

SEQ ID NO: 265141 - DNA, 869 bp, Cannabis indica
aaactgaagagaaggacattcagactcagatcttgatgatactctgcgacagaaaggatacaagggttagagacctgagtggaaggagacatattattctgctgcgaccactgtaaggtttctcatactttatatgtgtttattatcgttttagaagttcatatttaggatgttaaacaacatacttattagtaaatctaagatcctggtaaaatatttccaacaggtatattctcctgaacaaaagtacgtaagagaattcaaaccctaatccatgatattagttgggtatttatagtggttggagaattacattaaagttttctctttttcttctattgggaagtttacaactgaacaatctccatgggctcactcatgaagtccagcccatgaaatatacgatctgctgactaagcgaattgagcttgagttgatcaggtcaagaccatatctagttatcatggaaaaatactctgaaataacggccttaggcttgttatgggaagtttcctctttaatcgcgatatgatattatttcccaatccgccagctgttgtttccttatttataggagggaacaaatagggaaactagaagagtcttccaggaatgatgcatcttcccccttggggctcacaactccaaactgtcttttgggctcgatctgtggaaagcagaaggtatcgcgagcatgaaaccaagataactctcgaaaggacacatctggaggggcttgacccacttttccattaatgagggtcccactgatgggtctggaatgctgatatggaatccatgtgtaccattccagaaacgcaaataacatttacaccaagctttcaggatgctgttggaattattttacc

SEQ ID NO: 265142 - DNA, 521 bp, Cannabis indica
tgaggaacctgtggctgagcaacccatggccgactagggtgaagaagcctcgatcgatcaggatagtgagtttgaggctaagcagactgaatctgcttctgggtgaggtattgctaggaggcagtataagacttgtacagtagtcttgggcaatcccttgggttcttatgatgaggttggacgacctttgaatgcttggtcaaccatcaaaagagaaaattggagctaaactttccttttctataaaagaaaagttgtacttactgcccacgattctgtaggtacacaaatggaaattcttgggctgattgaagatttattttagggaagtttctagtgggctgaggtcttgtttagaccgtgtgtaagctgtcaataaggtgtatattgattataaatacaccttatagcagctaggtttagtatctttttcatacacttaaaattgtattcatatcttaaggaaatagtgtcttcattttgtagagaagagttgttcgactcttactctgtttatttgt

SEQ ID NO: 265143 - DNA, 1263 bp, Cannabis indica
taagaaaaaaaaaattaacatcctaaagccccacgtcactaattcaaacatggataatacgaaagtagatgaacaaggtttctaggcagttaaagggaagaaattcatatcgaagctcctcctaaagtggaaacaagcaatgtgtttgaagctttataggagataatagttacagaggtgtaagttgggaaagtgttatgtaacatgaagttcattattgataaagagggagcccctccaccaataaatggataagctcttcttttaaaatgttcgagggataaaaaaattaataaacaacaagagggcatgcgaatgatccatcacaagaatatttgttttgttggtcttctcgaaacaaaggttaaagcctctgaattgagagctttataccttaatatgtttcaaggttggcgttttgcttctaacatttttcatcatccgaataaaagaatcttggttgcttagaatcctattagtttttatgtgaacatagggggtacgagtcaatagattcattattatgtgaacccaaaaagaaagaacagttttactatcactgttgtgtatacttttaatgacagcaaggatcgtgacagcgactttaaaatgatctaaataatatgatagtgattaagaaagatctttggatagttgtggtgattttaactcagtttaatcaatggaggagaggctgaattataaaggaaactctagaaagatggtaccttttcaaaactgtgttaaattttgtggtttagaggatgttaagtttaatggtagttttttcacttggagtaataaaatttctactaaaatgatatccaatagactcaaagaaatttttccaactctcatctcaaagaatcaaagtggttttgctaaaggcaaacaaattgttcacaatatcatgatttgtcaggatgtgataagagagtatgacgggaaggctgctaagtctgcttatatgtttaaaatagatatataaaaggcgcttgatacttttaatttggaagttctcagagaaatgctagatgccttaaaatttcctcaaaaatttgtggatctcatcatgatttgtgtgactatcctcggctctctcactacaagaaatccagcttttaccggcgcattgttgcgccggcaaaagtacactgactgcgccggtaaagctttgccggcgcagttgtgcgccggcaaagcttatctgggaagcttggtcggtaaggactttttaccggcgcgtacattaactgcgccggt

SEQ ID NO: 265144 - DNA, 637 bp, Cannabis indica
ttttgtcataacacatttatatcagattataattaaattttattttgaaaaaaatcaatttagggttcttgtattattttgaaaaatacagggtctattttgtcatttaacagaataagggtccaattggtaacttttacaaaacacaaggttcaaaataatatttacccttaatactaggggtgttcaacaaaatttataaaccgtccaaactaaattccgaataaaccaacaaaaaatacaactcgaaataatataatgaaaatccaaatcgctcaatgaatatatttggtggtttaaaaattattctaaatcgcctaattaacccgaataaatcgaattaaaccgatttatatcttttttaataaaagtttatatattatattacataaattatacttattaattaaactattttatatttaaagtttggacatttgtatgtttaacttaaaacttatactttatagttaataacttttattgtatttgaaaattaaagttaaagtttaaaatctatatcatattattactattttttattattttatttaattattttatgtttactcaattatatttatcctatgctaaaatttttaaataaatagatataaatataaaaaatatatatttt

SEQ ID NO: 265145 - DNA, 1347 bp, Cannabis indica
tttagaagtgttaaacaccactggtacgttgggaataattttgcatgttattcatggagatacatattatactgaaccatttttagtcagaagttattgtttatttgtgggttttattagctttttaataattaattaatgagaaagaaattaagaaagtgggatatttaaataataataataattcaaaaaatgctttaccaaaggatgatgatgatagtgatataagaacaaatcggaaatcatgtatcacaatcccaataaatgctgacaatgatggagaaactgtctcatgctttacccaacagtactattgggactggtctttccttcttttgaaaattaattcaagttgaaagaacaggtttatgattacacctttttcacgtcatctttacgtaatcataaacattattattacattttacatgaaacatgttcatatcgtatccacacattctttgtttttattttttatatctttattttatttttctgattttcaaatgacatatattcttaaacgttgggattataaactcatatatactgtcccaaagtgtgtctacatattattatctcttcgctttcactttttctttttctctactttagtgtgtcggatctgcaatctatactacattattaatcacctcctttacttattgtctttctctttttctttctattcattttaaattattacaaaaagaaaattaaacacgtatttgaatatatttcctatttgtttattagcatatcagcatccctaaatgaacactacttatgtagattttgttagccttgatttatgttaccaagatttaatttccgaattacttgggatttattcctaaaataaaacaaaaggtttaatataactacaactacaagattttttgcaaattatttctgaatgttcacttatcttcatttaaactcaacattagttagtccaattaagtactcatacgtacaacattattttatatgatccaatcaactataatatgtgcaggttcccaccaccctgtgtataagcgagttaagtttgtgctaaggacccacctagttcagaaacctaaaaaaatttcttattttaaaatgaaaaagttacaaaaaaatattaaaatttgagttaacttttacaaaaatattgtcacacattttttttttttcaaaaatactatatttttataaaacaacagtggaacacaaaatagaacaactaaaaaacaactgtagaacaacattgaaaacttaacacaatacatagtataaaacttatacagtatttttgaaaaaaaattctaccataaagtataaaagtaaaaaaagttagaaatt

SEQ ID NO: 265146 - DNA, 1336 bp, Cannabis indica
cactagcataaggcacattgtccgtctttcttctttctgtctctatcttgggagattgctcttgagacaatttgatgtgctgagctaaacgagttacaactggtttagcatcagtcatcctgaatttctcgattaccttcttgaggtagctatcttggcttaacatgattgtatggggtttgttcctctttatctcaatccttaaaatcttcttggccttacctagatccttcatctcaaactcactcttgagttgagacttatgcttatcaatgttggtcctatccttaccaataattagtatgtcatctacatacaataagaggtaaatctgattgttgaaatacacgcaagtgtcataattgcttctggtatagtcaactttcatcatgaattcatcaaaccttaggttccattatctaggatcctgcttcaaaatatattgagacttgtttaaaaggaaaactttatctggatcatcattctcgtagccttctagaatctgcatgtagatcttttcttctaaattcccatgtaagaatgcgattcttacatccatttgatccacctcaagatcaaattctgtaactaagtaatgaattattcttattgatgttcacttgactactggtgagaaaatatcattgtagtcaatgccctctttttgtgtaaatcctttggcaactaaccttgccttataccttgttccttccactcttgaaatttcttctttccacttgaaaattcatttacatgagtctcttgttcagtggtctcttgactataatccaggctttgttcttctcaagtaacacaatttcctcttgaatggcttgcaatcattttggaccatcttttcctgttatggcttctaggtagcttttaggttttgtactgtcatcatcttaagctactaatagagaacatgttgtaaactcaacatatccttacttgtctggtgctttggtgatcccctctctatccctagccaattgatagcctcttagggttgtttgagcatcttttgtggttttagattcatctagaatgtcttctgtttcatcaattacaaatttggacattaaatccacaacaatctgaggtcagctactccaagattcttgagcttaagtgatatttgtcttctttacccgaccatttttttcttcattaaagatgacatctctgctaataatgcacttcttgtagctaggttctaaacaccatactttataccccttcacaccatcagaatagcctagaaacaagcacttgagtgctctaggctaaagcttgccctacctaatatgagcataggcagtgcatccaaacacta

SEQ ID NO: 265147 - DNA, 662 bp, Cannabis indica
aaagatgaattgatcggtcttcttaaagccaaaagagggaagtcatcatcatcggtaacttctatcgattttcacccacctaaccccttggaagttgcaatgaagccttacccaaaaggttatatgagtcctgtatttagaaagtacaatgggaaattcggcaatgctaaagaacatatcatccaattcattgatgatttgggagtgtacgcccatgatttcgaactaaggatccgagagttttcaaaatctctcactgatcgcgcttactcttgatctgcaagcttgccttcaggaagtgtaaggagttgggacgatatggtctctcaattctgcgccaaattcttcatgattgaagataaatggagcatagctaacttgtttggagaaagacaaagcttcggagaaagacttgttaattatgctcaaaagtttcgacaaaaagctcttgattgtgccgaaaccatggctgaaaaagatctagtcaaaatgtgtatcaaaggtatgcttggtgaatatcgcttacatattgaaaaccatgctatatacaattttacagaggtcatcgccaaatcaaggaatactgaagctactgtctgtcgactggccaagccgtctaaccaaaacgatcaaaatcgcccatggaagggttcaaaacgtgg

SEQ ID NO: 265148 - DNA, 737 bp, Cannabis indica
aacactataaataccccccaaaatcattaaggcatgggtcgagaattctggggtccataagaactagaaagaaaaaccaccaagatcattctctgtaataaatactcccataaatacatagacttgtggactaaggcttgttaatgccccaaccacgtaaaaatctcttgcattaactctttacagctttcctaagatattattattatattggttgccgaaaacctcggtcaacagttttatttatatataaatggagatgaaaataaattattattggagattaagaaacaatagtctttttttaaattttttttctatgaaatattaaataatttatcattaagaaaaacaaccaacccaaaataatcgatccaatccgcactattgcagattggatttaaactgttatggatatcgaattagatccaaaatatgaaatccgcacttagtgcgtattggatgttgtttgaccaaaaaagtgttgttgcccctgattttgcccaaaatacgtggaccaataggatgctgacacgtagatggaaagggtttagcgtttgaataaatcagctaagtctccttaagcgtgggattaaccctagacatgcctcccggagaaggcatgtgagtctcatatgctcccggagagcaaggctacaacaaagcatctccaagaaggtgtcaggtcttatctgaacagtcatctcgcatttaatgccgcatgggaggaggcgtat

SEQ ID NO: 265149 - DNA, 678 bp, Cannabis indica
ttatttttctacctaaataatttatttttatctttgtatatataaatatttatatctgtataataagtatacattttatatctcattttttgacactctatttttctacttaaaaaaaaattaaaagcgctcttatatatttctaccttttatatgattaataaaaatagtatattttgtttcacgttttgtagtttatatcttcagaattaatttatgaatgatttgtatttttaataagactaatttcttattatttttctcttgatttatagttgtctttttattattttatggttgtttttatgttgttgttgatatattctatagtttttttaaagtattttttgtacagtcgttgtttagtttatgtgtatttttatcgtgtatatttttagtttatttaagataatattttcgttgtatatatgtgcatttattttgttatttttatgttgtgttttaattgtttttcaatttatagttgtcttttaaccatcactaactcaataggaaaagagaacgaaagttataacaataaattctatgaaaaaaaaataaatgttaatagtacaaaagttatcaaaatgtaacgtccccgcttcaagcctccattgggtccttacaccccatagaataatgtctcttatatacacgagtacgccactctggctgctt

SEQ ID NO: 265150 - DNA, 543 bp, Cannabis indica
ttgtttacatgttagtttttgtaagatacatctttgaatatagtgaaagttattaccctggttcggggaacccaagcactagccatctagaatgagtttccagggcagatgaagcttgtaaaattctggtgttgaatctttgattttgttctttttatattcaagataaaatcaatctaaatatgagaaagataggttaaacaagaacttggggctttcaattggtatcagagccacctatttctgttagaaatattgatctttagggttcttgcaagattcgttgttctgaaattcattgttgctgtaattcttgatttttcagcattttttttctttctacaacacctagttggaactaaccccctctctagacacgactatgggagtatactgctctctatctttgtttagtttttcttcgtttgtacaagaatggagatgttcagagaaggagggtccacatcacgacccccaatgcttgaaggtgccaattacccatactggaaaacaaaaatgtgagcattcttgagggcagtgaat

SEQ ID NO: 265151 - DNA, 1316 bp, Cannabis indica
atttaactaattaattctatgtccatttagtttagcatgttttttctattgaaaagagttatgctagttttcaagtacttgttacaccaattataagattgacttcataaaatacaaaactaaaaaacgaactgactgaacttaagttcacttttaatagaaaacaattttggtattaattccaaactatacctatccacatacttaataatattataagattcatcatcttttttattcaaatccatccctttaatttcaaataaatcaagacattctaacacaaaaaactcgtattttcaaaattgtaattctataaataacctattaccaactttagaagagagacataactatttttgaaaacctataacatgtcatagaagattattttaaaccgcaattatttaagaattttattttatattatagataattgagttaacatctcaacagtatagttgtctatacactttgatttcttttctacaattactttatatgttagaaaaattaataaacaatatactaatatcaaagaattattacttgaaaatcatacctttgataatatttattttttgccttgtttttgccttttggtggaaaaatttagtgttctggtctccttcttgtagccattgtattctagacttttgtttccaatacacttcctctttaaatagcaaatcattcaatttttcttccaattctcccaattcctttgaatatgttgaaagttgttgaagattatgcaactttgcaatctggtcatgagtctccttaattttttcagttaaagaaccaaatttgacacgactccataagagagatttgtggaacatctctgaatgttactggtaatggcatttatagatgatgtcgaggaggaagaccaactgtccttgatgatgctttggcattcagattccttagcccacatattttcaaaccgaaaccgtggtcttttcctcataatcttcaaggaattatctgttctttcttgcatattaactattaaagctctatgatctgaatggtaataatccaaatgggttaaagtgtttatgggaaacatctcggtccatgcttcatttaccattacccaatctaatctttccttgattagatttccatttgtatttttagcccaagtaaagcgctcacccgtaaaaggtaaaggatgtagagcacacaattctaatgtattttgaaaagcttccatttgtgaaggtcttctcatgttccctcattccttatcttgattacttaagatttcattgaaatctccacctaccatccatggtccagtagcc

SEQ ID NO: 265152 - DNA, 1814 bp, Cannabis indica
gaaatcgttccttaggtagaggctttgtgagaatgttagcaacctgatcaacatttggaacatgtcgaactaaatttctttcctcattatttgttcacggacaaagtgtaaatcaatctctatatgtttgcatctagcatagaaaaataggattggttgcaaagagcagctgcaccttgattatcaaactcagataattggaacatcttgaggtgtaaggtgcagcttagaaagtagagaaagaagccattttatttctgttgcagcattggccagagctctgaactcggattctgtggatgatcgagcaactacctgctgctttttcgcagaccaagaaattaaatttggtccaaaaagtactgcataaccaccactagagcgcctgtcatcaagtgaacttgcccactcaatatcggagtaaacttgcagagagagtctagatgcgggcttgaggaaccttcctggaagtatttgaggaacaaggatagttgatcagtgttgcgttcgcaaaacatggatttgtcaattatagtttgagattaaccataattcatacttaatttttttgagaaatattaaagggcacttatcgtgtctagcacctttttgaaatatactataattgactgttgattctgatttactctggttggcttggcttttggggcactttcattggttttttttataatcaacatttcaatgatttggttggttgtgtaccaatcttgaatttgtattgccaaaaatctgttatctactttccacttgttggactgtggtgttgattttgttgtttattacttaatacttggcagttggcacaaaagtgtatgtttaccaaaaaaggtaaaaagaaccaatttttttctctcctttttgtttgggtatagtaaaagaacttactatttaagttaaacagtatgtttttagttcataaacaaacacatttccataccgcccacttcactcactaataagtggttaagatggtcctactaaactattcagtagtggtcagtggccactagttgacttaatcttaaatttaatgtgaatggggtctctagtaatattttgatactattattgtactacaccaactgcatggaagcataaaacaaaacttattattagtattattattatctatttgaatcatcacatgataaaaatttcatttttttcatgcttggattgtgtgataaaaattagtgcttgtgatgaaagaaagagctttcccatactcttgattataatatcttcatcagtacattataatatattaatgtgacatttcattaactaatttcatagcatgagtttattagtattgttatgtattggagcacatatggcttaagcattacatactaaattactaatactacctaacattaaattaaatttccatgcaagtctatctgaattagttgtggtgtgctgacatgagatgttcctttaatacttctcataatttaattttttttgatgaatagctctttatatttagtttttgctcagtaaaaaatatgtcattgttaaagataaagttataactcccatggttttggaaagagcaaaagaaaacgacttcgtatgaattggtcaactattaaaaatagagttacccgcttattcccataatgtatttcttcatatttatcaacatgtttggtggattatcatacctacgcataatacatatacatatatgatatatttatgagtctataataaaatatatatacgtcatgtatattgataatcatcatgcatgccagcataaacactacacatctatgcacatc

SEQ ID NO: 265153 - DNA, 757 bp, Cannabis indica
tataaatatgttttcaaatgtgtacatttttaaaattgtatttttttgcacatattttgtaattatttaagaaaatgtatacatttatgtaaaatgcccataaaaaaaaactttattttatatttgtatgaaaaatgtacctaagatataactctttcacttatattataaataattagttggctccaaacccattcctgtgcataaatgagctaaaatctgttctcagatcctcctagctgaggggaaaaaaaaaaaaaaaaaaactaccctttaaaaatacacatttttttttattaattttaaaatatcatattttattttctaagtaagtacttaattttttttcttatgacccactaatatttagggtcaaccctattatcgataatttagttttagtaatatttttagctatagattttttaatcacaacataaaaataataattaataattagtcacaatttttttacttttaattataaattttattgtaattaaaaataaaaatttttagagtgaaaattaactccatatctctcaaatctaatcatataagggacaagtttttaacaattaatattccaatgtaacaaattcaactacatgtatgcattacttcttccgaatctttcgtaaaattataattataatctttacgattaaatcaatctgcatgcataattgtaatctttacggttattctattggcaagagtagtccttaatcaatggagacatgctcaacaaaggaga

SEQ ID NO: 265154 - DNA, 536 bp, Cannabis indica
actctatttttatcaatttttaattcctaataattcaaccctaactctattagaaaatagtataaaaggaaggctatggtctcattatcgaactaatgcttccaaagataaaaacgtatttttctctctaggtttatgagacctcttccttcttcttcttctttctctattcgaaatactatagcctctcttacaaataatttcaagccttagtgattgagtgcatacctaggggcggagccacagccaaggaaaaggtggctatggcctcccaacaattttaatatccctttatatatatatgtaaatatttatatatttataagtaaaaatacatatataaatagaaacatactaattaatatatatatatagatatataatatatacaagagtaaagtgtatagacaactaataatatatatagtgtaaattaagtgtttaatttattaaaaataaaatatatattaaattttaataaaaatactatagaaattgaattatttttagaagtgaattgacataaatttaaattt

SEQ ID NO: 265155 - DNA, 557 bp, Cannabis indica
tggccaattttgatcggataatatcatataaagaatcataaggttctatcttaaaactaattggtcgtaaatagagatactcgtgagagctgcattcatgcattacatttatctgctaacatcataatgtttcggccacgtgttgggctccattcatcgaacttgttaggccgtaaattcaccttaacttcgacactagtatggtattatctgttttggcaccttcccaacccgcctcgagtaggtgaatactatatattttaaggcaattcttgtctattcttccgttatgagacttgggttgatacccaataccacacaaaatggaaaactaatttctcttctttaacttcttcaacttaaaaactttaatacaaactgtgaacttgtttggtgatttttcttgctttattgtatatggtattactgaagttaaattctagagccatttttaccttaagttatatcaacatgcttgtatattgacatttttctgtttgtttatattgacagaaaaccacaataaagttctaaatgaaagaaattgcaccaacaaa

SEQ ID NO: 265156 - DNA, 667 bp, Cannabis indica
cgtgtgatcaatgctgaatgcaaggatcgtgggattgagactgaatacactgatagtaggatcgtgtgtatgctacatccacgtaagttgatccttgagttgtagggattgagctgatgactcatgatgtgtcaagctgaattcactaactattgatcgccctgcaggacttgttgaatatttcaatctggatgtgccagggaggcgtcctactcagcttatcgtttcgagcagacgctccaagtggactccacgtgtcaccattctcgtgatgccacgtcaaagtgccaaattttggataacatttgccccccaagcctgctcgggaccttctgaggttacgtgtagacttattccgtgctcgctctgcctttggatggggacacgtgtcgagcatgaccgttcgagactcgatgtgaagcagattgggggtcccttcgattttcggctaattaatgctctgacaattaatattctgaaattccgaatttctctctctatggctgacggttgcactcgattacttttgatttcctatattcgcttttaaggcgggaagccgaggcgtctaaggttcctttatgtacagttacccttttgcctataaaattatactttaggaagatttgaaaaataaaatttattttccatagtataaattttccaa

SEQ ID NO: 265157 - DNA, 2882 bp, Cannabis indica
  modified_base (1971)..(1971): a, c, t, g, unknown or other
tcaccgtgctttccgctaggaagatttgtacacgttacactaagcttctttactctttgggaaatttttaacagaatctattctacgacgtgagatttagtataggatattattctctccaatggaacgtagatcatttaattattgatcggttcaatgttggaacatatatatatctttcttgttattctagtctttaaggaacggcacctagcatacgtgatccgatgaggtgtagtactgaagattaatacagaagtccaaatggtccaaatcacacaagaattaaagatttcttcagatttattgtcgccaagttacacgtgcttgttatacaaatgtttttctcatgacacaacacatgcatgaacgaacacgaatcttttttctcataacataactactacgtctacgtatacattcatttataggttttctctatatacaactcttgcccaatagtataagccagctcattattcattagttttgttctttttcttaattaattaaaattgataaagggtacatagtatttattggacattgccaccttgtaagcactacaaggtatatggtgttagacacttgagtgtccaataacaacgctcattttctctctacacacttaatttggtcttacagattaaaattcatgccatagtcatttataaaatatcaactcattgtggtgttgatgtgggataacttaactttataaggtgctatatatatatatatcaagggctttataatttgtcgttctaagtatctatatataaccatactacgttattttaatgcaagaaaaccctggctcaaaatcttataatcgactcaccaagatctcttcttccaaagtgacgcgtataaatagtctttacaacgctcccagctggatgctgtctatgtttatcacttcaaaaagacatgggcacatgcatgcacattatattaatatattcataataaaagtttaatattggaactccatgcatctaatagataactataatacacctcgtgtgtatcgtggtatgttttctttcacccacttgtatacctcgctttcgattttgttatctagctatatatatatagttactttaaatgaagcatattcaattgaaaatgtagttcttatgtagcttaaatttatatatataaatatatatatatttccatttataaggtaacagttgtttgtttgatcatgattcttgtcctcaataaaattcttcatctaattatgtaccttgatttggctaaattgatcactgtacgtacttataggaatatgaacttattatactcttgattaaaaagcttgcttaattaacatgcgcaaaattataagaaaaataaaaataaaaatggaagaggattaggtactgcttcaaattactttttcaattgtcgcaagtttagtcacaatacgattctttaaaatgtattaagttattagtagcgaaacacttttatatattttacttctgtctattaattaactctttcttctttactactagaaaaatagtgtattttttcagttttttacaggaggaaaaaattaaacctgaagataaaagtaaagagaaaaatgaataaaaattgcggacctacatctttggttatcaaaaagctaggtctgtaaaatcgtattctcgaatttaatctcatttcttttcttcttcaacttttttttcaacaaaataacgttgacggctcataaatctccattttctccataaactaccatttttcttttaaatcttctagttttctcacccaaaaatatatatattctacaaaaataaatttattttaggatttgagaataaatgtaggagtttaggtgatagtctaattttagtcttataagtttcgggtcgtattttcgagtagtttttgacttttatttctagttttaggattattttacgctttgattcttttgtttaggccctaaangtttaaagagtatcacaagaatgaggacaagagatgaaaaagttgagaaaaaactgtacaaagttttttcaccaaagcccgtcgcgacgggcagaattcttcgtcgcagcggggaaaaagcttacgccgcgatgggacttggcagaaaattttttaagttgagaatgctctagccgtcgtaacggggaataagcttcgtaatttcacaatttttaaagagaaaacttggctcatttaaaaggaaactcgtgattttttatcattattcagaattggagccctagaaacaaaggagaagatttcaagagcggctagtggcgatccgaatcgatttcttcaaccagttctttcttctctcttaatttttctatgttattttctgtttcaattttaattatggatttgactatggagattatgaactaaactcctaatttagagatgatgaatgttgattgacattaattatttcttaagttaatgataattgttatttctcctttcttgattgtgaatttattcatatttttgtttaattacatgtttaagattgatcatcctttgcatgctttatgattctaattcaaaatctgaaaagtgagtttggaaatgctaaaattggataattaggttttgatgtgaaacgaaagtatttgcatagcctttgtgacattgagattattgcttaatgccgattatatgttagtctaattcagagatgattagataacatgtgatttagggcctaaaagatctgaaaagagttaggttaattcttataatctgtcaattacattaagaaagagagtattaattaggattaacaattgagtaattaaatcaacatgattcttttccctaatttgtcatctttaattaaatctttttattgctgaattttattttattgt

SEQ ID NO: 265158 - DNA, 931 bp, Cannabis indica
actttttatggtataattgggctaactataggtgttcggtaagatccggcatatctcttatttatgatttgatagctcattatgtagttgtcaattgatgtatgagcatcgtgaaatcaaggtattatgggtttaaacccttaaacacatcgattcagtgtaaggtgttggttgttcttctccatgttacatttaatgtgtatatggtgatataacatcgagtggtgtgctacacttcgcctgtcctcccatatcctctccaagtcgaattcactcgttgagagtaagagatgagaatcatccgtcgtccaggaagaccctcctggagatgacaaatttgtttattattcctttgaaataatacactctgggagtgatccggattgcatgtcccatagtgtgggtctcattgccacctgacttacttctaaattgccaagtattttaagaaaagttctaggcaacaagtcactatagcaatattttccatttctgtatttttgttaattaaataattgaaatcaaaaagaaagggaaaaaaatgttactaagagcctctatatagaaaaaggtaaccataaggttgaaagacacgtacatttttactcaacctaaaggctctcccttttactatacgattgaattccaaagctctatctttctctctctttagaaatttcaccgcaagtattaagaaaaattgctcataaattaggtgattttaaggccattgtagaaaattatgaagaaaagcggtttggattccttataatacctgacatcaaacaagaacaaaaaattaagaaatctaaaaggtagaatcaattacattcccctatgtaattataattaagtatactttctatttagggtaaattgcggcataaatacttaatgtttcagattttatacacttaaatacctaatgttt

SEQ ID NO: 265159 - DNA, 629 bp, Cannabis indica
taagcgggctttacacttttgcgatgctattggggagcatgcctcgacactcgaagatcaattttaggatattgtgtcttccttgatcgatctcttatctcctggaaattaaagaagcaacccacaatgttacgatcatccgctgaatctgaatacggggccatggcaaatgcaacttgtgaactcacttggctccaaaacatcatcaaagatttcaacattcaaccacaactctcctccactctcttttgtgacaattctgctgccatacttattgcagaaaacccagttcatcacgaaagaattaaacacatggaaatcaactgtcatattctccgagaaaaagtctcaaatggcagcatcaaaatgaaccatgtcttctccaaaaccaacttagctgatgtactaactaaacccgtgtttctaactcacttcaataaaattgtatccaagatgggtgttgaaaatttttacactccatcttgaaggggcctattaaaccgttatgttagttatttcagttggctagttagttgggttaggtaggttagttcagttagttcaagatactctgttctggtacactgctgcctatatatactgcagcttcattctcttgtattcattca

SEQ ID NO: 265160 - DNA, 894 bp, Cannabis indica
actactgtaatctaatttctcatttttttttttgaattataccgtaaaaggacatatcacattcaatagtgtttttgtcttttaaactagatatttgaaaagtcttagcagctatcatagcatagttattttgtgtttttttagatttatcacggtcttgagtataaaattaagtactatttatatagaacgattggtatttaagtacatcacacgaaagacctcgtaatatgtataatagtgtgttggatatgttgcttgggttttcacacattttcgcatatacctaacattcacaagtgaattagggatcgtacaagtgtatcaatatgatatgtaacaaaataataaatgcatacaatcttttttctgtaaccatgtactgaaatttcgataatgttcatcttgtaccaattttttattcgttgacttagtcggattagtggtcttgatccaattaaaatgttcccttgaacatccagtaaagcattataacattttagtttcaattgaatattttgtaatgctaagtgtgaaaagttaacttaaacttactcaatgtacgattagaccttgtcaatattttgcaaaacaagcagatccgctttgtcacgatcagctcgactcacaccgcaaacaaaaatacccctactccccctacttctttcattatcaaccctagtagggcaagagccaacaattttaacctcagacaagtagatctgaacagaattcaattgtccattcaacgatgtatgattcaacaatacaaccctcgagcctacttctacttcacataccacttcaagattttcatgtatcgttcaaatgagtacatccatctcgattacacaggtccacacaacttctcctctttcactaaatgtattgtta

SEQ ID NO: 265161 - DNA, 601 bp, Cannabis indica
aataaaatataatatgagggtatatttttattaatggatacaaaaaaaagatatttttcaacttatctcaagaaaaaagaattatttcacaaatacacaaaacacaaataaaaaaaattacaaaaatacggtttcacggaattttaaatatttttatgattttttttatgttgtactcttattaattttttgttgattttttgttatctgtatgttattttttgttgttgtttttatattttttaaatgttatttttatgtaattttcttgttatttctatgaaaaatcgtaaaaatgtaaaaaaaaattaaacataaaaatataattttttttttataaaaaataatgccttatataattattctaaaaaaataattctgaaaaattgaaactttttgaccattttgtagtaataatgtattatccacctgtcctatgggcacacacataagtattttaaaactttctagattctagaattttataactttccaagtcacatttactagtctatactattctgtagaattatcgatacatattttaagtcttttggtagtatttctccaacatataatatttattaaaaaaaatttatat

SEQ ID NO: 265162 - DNA, 2962 bp, Cannabis indica
cctatgataaaagtgttttttttatacaaaaaaatgatgattctctattttatttgacacatttttgtggatgacatgaatgtacaagctagtttacacaccaagaatatttaggaataccattacctatcatcaagaaactttttttagcaagtggttttttgtattctaccatctctcaaacttgcaatttgttgattaaaattcagatattgcttatgatttttgaatcatggtatttaatcaacaaatcaaagttttacatgttgggttaagaacaaaatcagtttgttctttcagaaatcggtcaatgatatgtccattttcaatcaatataatatattatgttggctaaaataaaagcattaaaggttcaccaatatacaataactaaaacaaaagaacctatgtcaaccaatggggggttatgtgaaattaattcaactcagaatatcatgcataataaaataatcttgttcacattttaggaatcaagatttttaatatgtatataattatacatagttttggtcacatgagaaacgcctgttatgggacaagtacaatcaaaagcctataacctcaatattatagtacttaattatatgagatattcataacattatttgaagaagaaacaagtataaacagatcttcatcagcattaaaatagtactttatgttgtattagtttgggcaaatttccatgccagtatgcagaatttacaaataattaatcaacaacacacacacacacaaattacaaagctagaaatcactctccattatcagattcgaattttcgagttatgaacatccctaatgagaatgctaaaatggctgttacaacaagtgctttgtttttgttcagcattcccatggcacttttaagataattcgtttcgcgctcccatctcctgatactctcgtctggaaaatacaaaggagactcagaggcctctttctctccctcggttttggtttttggtgctctttctcttccttttggtccttattgtgatgatttataccatcatgatgatctttctttttcaatttctcatcagcagacttttggtgcagattttgatcattattttcgtgggatggaacaagtacttttttctttgggacagttaagtagagaatctcaccatcaaattttgctgtgatgccatccaaatctgactcttgtggcgccttgaaggtttggttgaaacgaatgtacttattctcattcactttcctttcaccataaatctttatctgtccattgtttacaacttgtatctttacctgctctttttcttaaaatcttttttttccgtccaaaggtaaaaatagaacatgttaatatcaccatatggtaaaatttaagtaaatcatgcataatattatccctgcttgttgtaacatattatcacatatatgtaacataaaaaattcatgatttgtagcttttaaaggaaacaaatgaaaccgtgtcaagaaaacgaaagacataacaaaattcaattgtacatagtttattgatgcagtaccaggaagatcaacaagaagataatggccacccaagtcttctgtccaatcagaagaaggtacaatctcatcgaaaaccgcatttcgcagcctagaagtactactttcatctcctaagactcctgttcctctaacattggccattaataaatgagaaagtctctggttcggtaatgaatattattattagcttaaatgtgcgtatgttatatatgatgatttatgtggtttatatagaactagcattatttcaataggtcaataattaatgttgttataataaattagatgatggcacttctaagtgtgaaaatgatcaaaataggtagcttttcttgtagatttcttcattcttatattccaaactttccctgttgggactgtttaacttggcctcttctaagcgctgtggggtggcttgtttggtttggtaatacaggtggaaaataacaataaggaccacatattctttgctttttctatgaccaaatgacatattagctctttcatttaccagagcatacatatctgtattgtataatagttttttatttcttctttttttgtttggtcattcccaggcagatgccaagtcctcgaaaaaatcatatggtagaaaccttattttcttcttttgtgcaaaaccattgcttatatagtctaagctttcttcccaaaaaaccaagttaattaatacatatacatcttaataagcatttttcattattaactcagtaattaaacaattaacaaatcccaacatataataagtctactttcctattcgtatagctcttttcgaatatcgatattcaaaatttaagaatcattttatcatttttgtttaaatttttcattagtactcttttctcctttaagatgaaatattatgaaagaatatttgtgaatttcagctcaattaattatgagcatgagcactctttttatatatcaactaggtaagtataattagcatttttgttctttgaactttcaaaactacttgaatgtaccctttaaaatataaggcttgttataaattctcgagttacataattataccctttatgttaggtaatatttcttttactgttaaaaactagtgtttttactcctctaaactttgactaatacaaatttcgcccatttttattaaaaaaaattaattataaaaattataatattctatcttttttaaaccaattataatattgtattaattcaaaaaaaataataataaaaactattaaaaaatttaataaaaatattaatttacttaaaaaatattttaaactttattttatttatcaaccagtatcttaaaaaatcaaataaaaattattgagaatattctaataaataatttaaatacactaagattttttgaagaaaaaatcaaacttatttatatttacaaactcat

SEQ ID NO: 265163 - DNA, 1419 bp, Cannabis indica
atttggagtttattggcctttcatttttttaaaaaaactcctgatacttgatctacaagaataactaaaacattaagtcaaataccttaaaataattcagaggacgtttccagtgaaacccttcatatgatatgggaaagaaaatatgtaccacaagtatagcaagagttatgccctgtgggaaaaggaaaacaaaatcactggacaaattaaaacatacaccattaatattcagctatactggaataggtactaatctggtgcaacaacttcaaattttctacatattgtaatacatctgaagttcattatcttacctcataaataagtgattccaaattagacaaataaggaagctgcccaagaaagaagtaatccctgtcactgcaagcattactcttgtaacaccacaaaggtttctgtacatagttaagcaactaattagcatcaaccaaaccttctcaataccaatgttaaacttaccagaagcatattaaaagaatgaaaaactatacaaacctctaagaaatttaagattaagagtgcaaaataattgagggtccaaatgaaatccagccgaacgaaaaagaaatagagctttgcagcactttgaaagttagattgatcaagtacttcctccggtaaaccaataccatcttcagcctgcagaatgaatgaatatacaactaattaggatatcaaatcatttcattgaatttccaattatagtaaaagaacttatactgctacagtacaattaattcaaagaaattgtgaaagatatatacattaattcaaactatatataattgttgtaacaaccttccgtacattcttcctttttgttagacaacttacagccaaaaaaagagtgagcgagagagtaattcaaacatccagaaaaacatttctaaatcaattaaagaaatgcaaaacaaaaactaacaaaataacttccaaaggtcagtgatctctcctccaaaagtcgtaagaccaaaaaaaaaaaaaaaaaaaaaaaaacaagctcaaactgtcttatcttattgttttacttttagaaagtacaaagtatgttgaagaaaatccaaagaaaaaaaggcctaacattttgcctaaaaaaacttacaattgaaactaaatttcacttcaattaggcatctccgctcaatacttcagtttaattagcagcacaatcacatgagtttactctaataaaacgataacataaatgcattttctttcaaaatcattacctccgatccaaaaacagagcactagtactaaaaaaatcaaaatcactaagaacaaaactgaagaatcacacgcaaacatgatctcgaaaaaaaagcttaattagaaagtaaccaaatcgacgagggcggcagctttctggtacgaagagccataagcgatggcatc

SEQ ID NO: 265164 - DNA, 762 bp, Cannabis indica
agttttctacaaatatatagtagaaaaaaaacacaataattttttaaaacaaataaaaacaaaaacaaaaaaaaaataaagaaaaccggtttcttaatacattgtaatttttaactaacaatttttcaaatactgtgtacaggaatggactcaataatgtgtgtggtcaaatatggagggcaatggaaagaggataaaaagtatgaagactacataatgactggactactaataccaacaaactgtgatctaaaaagtttgttggaattagtaaaggctgaaatcaaatgcaacacaacaatagaaatgcattaccagttatgcccagactcaccaccaatgaaaataattagtgacaactcactgatgttctacttacaactgagaaagacacaaaatgcagttagtgagtctccactctgcatcacaacagtagacgagacaagactccagatcattgctcaacaaaaaccagaaagtgaatctgtaagacaagatacagatgttcagaaactggttttacaaataaccaacattaacaagcttcagatcatcagcaaccctaggctcacaaactttatcctaaataaacataaaacaaaatacagttaaatcaaaatgaaaaaaaaaaaacaaaactattaaattaaacaaaacaaaacaacaaaaaaaatataagaaaaaatgaagacataccaaattagaatgctccccaacatcctttgattttcttttcttttgacgcactagcgtcatcagaaa

SEQ ID NO: 265165 - DNA, 503 bp, Cannabis indica
ctgcacccaatataaggtttcttaaactttatatgtgtttatttcatcgtttttgaaagttcatgtttagggtgttaatcaacatacttgtgagtagatctaagaccctggtaaaataaattccaacattgtcccccaggtgtgacaagggcaattcctgcgccggatagctgatctgtggccgacccatccacatgcagcttccaggttggcttgttttcagtgttgctcggctgcggtgttgactcgagaacgccttctgggatgcgttcagtttttcctgtacattccaccactaagtcggccaaggcttggcctttgatagttgttcggggttggaagttgatttcgtactgccccaattccaccgcccacttgactaatcgtccagaggcatctgacttttgaagtatttgtcgtagtggtttgtcagtgtacatccgaacatgataaagcttgaaagtaaggtcttagcttccttgttgctaagatgaggcagtagg

SEQ ID NO: 265166 - DNA, 2211 bp, Cannabis indica
gtatataaggggatttgtcccaacagtcagagatcaaatagctgagaagctttctctgttcgatatgttccatcccttgatcaagttacggatgtccttctccactgatcggttcaactatctcaagtccaaacttcaaatggcctcaacccctttttcgtttaagggagatgttagtattgttaaatcaaggtttggtattagttttaaaagtcatttaagagagttagttaattttgttggcaattatgaattagttagcttaacaacttcatcttcttgttttctttgtaatcaatggcttataaataaatattagatcaagtgaagaataagtttttgctattctcatttttacaaaaacaaaatgatttattttctttctctctttctgtctttctctctctcattctacagtaaagtggggcactaaagacctaaattttagtacattgatttaataatattacaagaaaataaaaaattacataacttgagagcgcaaagagactaatggaaattaaataataaaataaaattggtgatttccttttctatgatgacatatgtttgccttaatttattagttaattatattgttctcccccttctgcgtagcttagcaccgcaaaggggtccattgctgatctgatcctcccagttgaattttacgtttttttttaaaaagacatcacaagaatttgcttgtcttttggatatggaggcagacctggggttcaagggtttgttggatacagtgatggggcaaaacattctagttttaaggtggtgatgacaatttgggagcaatggtagcatcgggatggctatggctcttttgctctgttttcaagttatgctatcgtttgtttatgctccatgtgttattttttttcaataatggtattgcaataccattatactgttgatattgaaactagaatacaaaaaaaatgcctatgaccatccttatgaaggattgatccacaagacatgtggtcaatactaatataataattctctatatctaaatatagaaagtatacccatatcacctacacaaaagttgagtcattcgagatcgagcacacaagcaacccaatgggagacatagttaaaagaccttatcacaaacaaaataaatcctactattgaataatcaggttataattattcaatttttatagaaaaatctttagctgataatcattgattagttttaatgggaacttatacattaggtataggaaatctagttctctctaaacttttattgatgcttcacagctgacgacttataggttaattaaaggtgttgttagaactttcttttctaattaatgtaaatgacttggttgaccaattaatgttgagtatgatatttgagtgatatcgtcttttaatggaccttgtctaatttatatataaataaatatttctattttgttctaagaaaacaattactacaacaaataggtacttttagtgataactttttagtcataacacaatcttttgtgactaaagtgttgtattattttataatataataagtatagattagaatgtgataaatatattattatgtgaataatatatattaagagtacggtaaataaatgtgtaacctatgattttaacctacacttttgtaacctgcatgttgtaacttggagaggagttataatttgttatcacttgtaactcatgtgttgattatcaatatgaaagtacctattttttattgtaacaactatatttcataccatttgaatcctaaatctgaccactcactctttattcatcacacaaacacacaaatctaggcacattaagctattttcttgtgcctattcttgtgacagggagtgaccctcttgctgataattctctcattactgccttgggtgatcggttctccctaaaaaatgtaggcacattaagctattttcttggaattgaagtaaaatatacttccattgtgccaagctaagtatgctaaagaccttcttgccaaggctcaaatgacatgtgctaaatctcttcctacaccaatgaccagtggtcttagattgtcagctcaccaaggggatcctatgcttgatgtttaactttagagtctattgttggtgctcttcagtaccttactatcactcgacccgaactgtccttcagtgtaaataaagtgtgccagtttatgcaaaaaccttt

SEQ ID NO: 265167 - DNA, 434 bp, Cannabis indica
tagtatttaaaagtttttaggtagtgtaaataaaattttactattataaaatattaataaaaagaatatagaacattaaatgggttagttgtcagggtggagagtgtcatccctgttcctgtctcgtttaacattgaaaaacaaaaaaataatcttcgtccttgccctgttccctatttaaacgagtaatccctgcctcactagggttggggccttgcaaggccatctcaatgagaaaaatgtacacccctatttaattaaacttattaaaattataaccctccaaatttagtttttctagagttcttaattatcatcttggcgaattgtataaaacttatgaatcatattatggacttgtgaaaccacatttatttatttagagaaacataaacattgctaccaaatgtagttgatatagttggcatatatat

SEQ ID NO: 265168 - DNA, 822 bp, Cannabis indica
ttggtaaaacttcattattccattatgaaaaaagtaagaccaaagcataaaatatagcaaaaagggataaaaagaaaaatgtccattacttcattacctcttcctgagcagcttttctcatattctccttggctttcaaattagcatttctcaaactcactctcaagctgataatcaaagacaataaaataaattcattaacaccaaaccccattaagaattcgacaaaaagatttgatttttgttacctctgagatcgattcgtccatgactcgagcaaggccttagccgattcaacctgatcatcgttgggcaactgaggagcgagtagatcaagcttgaattgcagggaattaagcaatgccaaacaatcttgagcaaccccattcatcctgggaagagaatctttggtcgtagtaagattactgtcttgttcaatcgattttgattttccatagttctcgattgccttaatttggttgaccaacttagcgaaagtctcatcccactcgttcttggccttctcaacctcctcttctacaatgtccattcaatcgatcttcttcaattcaacgccaccactcacactcacatcacaattacgtctcgctctgaatcccaagtgaagtgtgtatattaaaggtgcgggtcgggtcggtcttttggcccgtgacaatcgatttggttctaaaggtgcttgatttctttatcaaaattagttttttagtgctggggtttctgtactggttcaaatctccgaacaatcataacctcagagcatggatttggttgtaaaggtgcttgatttcatctgggtttagg

SEQ ID NO: 265169 - DNA, 942 bp, Cannabis indica
ggacctaatagaatttataatcatgaaataaatcatgtgaacaatgcaacataaaatgcgatttctaatctttattagtaaatctgattatattgaaatgggttttatttagggcacaaaacccaacagtaggggcattgaataccctcttttatatagtttgccttcgatcattgtgtagcgaggcactgtatacaaaagtttttgcacctcatttttgtcatttggaagttacccgtcgagtaaatagttaataataggcgtcatccatgttggagagctatctatcatctcgatgttttcattttcacatatacttggctcgctcagcattttgaccagaaccaaaattagttcatctagatcattctgtgaggccagtttttgctaaggcatcgacgtttgagttttgttctctcagaatttgttcaattttaaagtaatcgaatctttccaagttcttctgaactttctttaaatacttcaccattttcaagccttcggcctagtattccccgaggacctagttcacgatcagctgagaatcactatgaaaaatgagattttttgactttcaaggcctctgctatctttaagccgacgatcaaggcttcatactcagcctcgtatttgatgagtcaattggaatctcagagcatagtgaaacttaaagccttttggcgatattaattttacccctacacctgaaccctgttcgttggatgcgccatccatatataacttctaggtttcggcatctcactaatgaggtgggatttcttctggagttataccttctatcgagaattcaactaaagcttgacccttgatggatgttcgaggatgacatgttatgtcgaactgccccaattcaatcgatcattttattaatcttctagaagctctggtttttgataaaacttgtctcaagggctgatcggt

SEQ ID NO: 265170 - DNA, 1039 bp, Cannabis indica
attggcaaagtatggcagtatcgtttgtatggagtatacattagattggatcgaaattgaacttggataagatatcataagcttaccgttatatcttatcactggttgatcttaggtacttagtcctgatatagttaggttcaatcttaattgtattatttatgttcttcaatttgttcgttaaagcctaccaattggttcgtgtcacacatacagattaattaaggaaacggtagtttaattaagtgggagcgctaatcattgagatctcattttagtaattatattagtttactgaaatatcatttataggtatctaagtgttttaatgataaaatatattaaagggtagaacagtaaatttgtccctattcgatgtagatcacctattgaggatctttgactattttgattgtaacaatggataatcataacgtatctatatcttggtacatatagagtgttctatataattaagagtgcaattctaaatttataatggcccaaggagaaattaataagttaggaaatttactttgtaaattctagttctacttattggaagcttgattatataggcccatggtccccacactagttgagataatactgcttggagactcagttaattgggtttaattaatcaattataatcctaaaattagactatgtcttattcatgaattttcattaaacaagggtttaattgtgaagaaaagaggttttagggtttatttattaattaagagattttgtatggtctaattaataaataatataaatggcaatttattgataattaattataatcattaaataaatagttttgacatttataggattgagattggaaaatatatgctattattgaaagaaggataagtggttgaaataaagtggcaaactagtgaagcccacaagtgtggtcggccaatagagttgaattttgcccattattttattcttttttaatccatattattaaatcctaaaccctagttgaaatactataaaatgaatatgatgctctcatctcatc

SEQ ID NO: 265171 - DNA, 569 bp, Cannabis indica
aaaaataaaataaactattgaggtacccatgatactaattatatactgattagttactattaaattatattatatattaaagaaaatttaatttgtaattagtttctactttttctacaataaaataaatttgaaagttacttaaatgtattttaaataataaaatattatcatataatatgaaaataattaacttattattaagatgtatacaaataaattttagagaaaactaaaaatgtatctcaaattatatacagattagttaccattcagtaacttttatttagttaacaaatcaaatttatttttaaaattaaaaatgcttatataataataataaaaaagtatatgagtgactaaatgtatattacataattttatttgaatattattatgaagtatactaaataaaattgtttcatatatatacttacttgttatattatatgaaaactaattagtttctactataaacttaaaaggtaattaaaaatataattttcaaacaattttagcaatttatatatttaaatattttactattaagttatgtgagtttttttttc

SEQ ID NO: 265172 - DNA, 602 bp, Cannabis indica
tcacttagcaaagaaggatagtgaaaatgagtttatgtgccaatgctggttggtatttataggcaagtcacgaaaagaggtaaccatttcaaaggaacctcaggcgcatcagtttccctccttaaaagcaaatatgggaaatcaaaaataatgaagtgcagtcgttagccgtggtgagagaaaatcggatttcgaaatattaattgtcagagcatttattagccaaaaacgaaagggacgcccagtcagcctcacatcgagtcttggatagtcacgctcaacacgagtcccattccaaaggcagaagcagctcagatgaagtctacacgcaacttcagaagtcccgtaagacttgggcaaatgttatcccaatttttgatctctgacgtggcatcgcataatggtgacatgtggaatccacgtggagtatctgctcggagggcatagtcttagcacgatgcctcgctagcatgcccagagcaaagcaatcagcaatccgcacagagcagccaacacttagcgaatttagctttcgcattgtgagtcatcaacgaaatccctataacttggggatcagattacagagatatggcatacccatg

SEQ ID NO: 265173 - DNA, 921 bp, Cannabis indica
ttgtaaagtttattttgaacatgtaaacaagtttaaaaagtgagatcccaacctttttgtataattatatatttttagttataaaagtttaaatttaatcaaaaagtttaaattaagcacgatttttgaaaaaactctttaattagcaaaagtatgcacggtaattaaaaatcactgtagcgtatctaattattaaggtgttacagtccacatcttctattgttcttaaagcctataaaactccaattaattaaggtatatatttgcttcattagagaatatttatgtgcaatctattccctcactttgtgtgtagtctttgactactaatctggtcttaaacattgctttttccactccaagtatgctctcctttgggcttaataacccacttgcaccctactatcttcttcttagcaggtttcttcacaagaatccaagtgttatttctgtatggaactaaatttcttctttcataacagcctccaattcaagcttataatcactcttcacagcttcagcataagttcttggtttttaatagttgagatctgtttagtgtatagtgcaacccaaaatctttctggagccttaagtatagataagcattaagcaaatgatatcgggtcagggttaacctcccttctagaacaaccttcacatttctcttttatatatatatatatctattctatataaagtgtgcctatataactgaaattcttggtttatgagaaatttatgggtgactttttatttttatttaataaaatattatttatatataataatataataataaaacaaatcatattaatatttgaactgatatttagcatatttcaactctatatataatcacaactataactctagaaattaaaaatatatatataaaataaattgaaccttaaaccgcat

SEQ ID NO: 265174 - DNA, 1168 bp, Cannabis indica
aagaagcaaggggatcttgacttcggaaatctaaagggactttagatccgtaaacttgattttggaatcaagtgttcgggtaacttttatatgaattcatttctgtttactttgattgattgagctgtaattagaactggatattgtatcttgattgatttcataattaagaacccaagcaatagtcgcctagaatgtgtttctagaattagatgaagcttgtaaatcgggtgttcttgctttactttctgttttaatattcaagttacaaatctagattcaatcaattacaaaacatcaacagaagaacacaaaaaaacaaaagataggaaaaagaatgtgtaaagttcatgagacaacaatccaaacgtatatattatatgaaacattaaaattgaaaacagtgactaatgtaattaagaaaaatgtattacagattattccaaatacacactggtaataggcagtggcaaacgcatcctctacatcttgatttgattgtatatagcaaacacattatcttctcaatctgcattcattcatggaaatgccaatacaaaaaatgcataagcaaataagtaataactacatatatatattgaagatattgtttttgataattgaaaattttaattacacaataatatataagagaaaaaaaaaacaaataaagtaaattgtgtaaaaatagattcaaaattattcatataaactataaacttcatagctatttgacattactcatgtcaaattatggttctttgacaccatttaggatatgtaattaagtttaaatccaaaacaaataatataattacaaaagatagctaattgatgattagattagatatatatgtaccttcgagatcacattcgatgaatacacgtgacggcacgtgcttaactttgtggaaatcgtctcctccttcatccatcctttctttgaatttcttaggcatataagatatgaccaactcattgagtgtaacaatgtttcttactccatttggaactctcctcaatcccctgcatctctgaatacgcaaataggcaagtgtaggcaatgcactctcctccactttccactctttcaagtgagatagaccaataagctgaagagattcaagtctgagttttggtagcttttctaatgttggcattggatcat

SEQ ID NO: 265175 - DNA, 606 bp, Cannabis indica
gaaccaactcaaaataaataaatatgacaaacaataattgtgccaattgggaatataaatgttttgtgcatgagacacgaaatttaatgagttctgattaccatatggtacagtatacatacagggacgggacatataataaaggaagagttgaagagaatttaaatctattaatgtacgtaatgacagtacaactatatttctttttttttttccttgataactaactatatttctcctataatattttattaataattgtgtcatatgaatttatgacacatgtaaatatcctaaataattaatattgaaaagtttatttttaccacggtaaaattaattcaatgattacttaaaaggtgcgtagcttaataattattatacacgtgtatatatagagaaatgttggggctagtaatgcctatcactctcttatgtgtcaatattgttattgtctaattaagtatcgggtaccatataatttaatataataacttttagggtagtatcgctaaccaactcgctacgcgacatgtcgagaaattgatgattgtatataagtgaagatttgtagaatatagttactggtaaattttaatttaattt

SEQ ID NO: 265176 - DNA, 582 bp, Cannabis indica
acctgagcgttcccttggtctcctggagtatgtggagcctttacctctcctccggggggcgtattctcgttagtactcctgatgctaaaagatttagttgattcatctaatagtcgtgcttctcagatccacgtgtcgttgtcatattggttcacgtattttgggcgaaattaagggcaacatttatccccaagccttgtttggtgcaaagtaaatgaggcttgccaggtgcctccaactgtctcattgatttcttggcacgtgtttcagacgcgtgggctgcatttatgacagtcatcattaaaatttattgctttttgcaggcaacgattcacttcccgtccattaatgatctagcgtatttaattggtgtcagacaaatactcaagcgtttccatccgccctgaagaacatttatcccaaccgctagatctgcagaatgcgaatcgattcgattcccaacgttcgatgacgcttgatcatagctcctgttggatattattttaccaggatcttagatctactcacaagtatgttgtttaacaccctaaatatgaagtttctaaaacgataaaataaaca

SEQ ID NO: 265177 - DNA, 542 bp, Cannabis indica
ttaattgttctgttatattatttactgttgttttataaaacacagtattttgtaaaaatttcatgtggtggtaaaattataaattttacctaaaatttataaaactcctacaattaaatgtggaggcagaagcccaaacccaaacccaattatgtgggcttccggatatgtggtcagccttggactgatccttagccacttaccacaagcctgaaaaaccccaaccctataagaatgtggaaattacgtgtctatggtgtattttttaaattatacaaatatggtggtttctcatttaatatgttttaatggtattttttttaattacttttatataggaagtaatttgtcatattttggtagtgcttagttttaaacaccatattatatatttaattaattttttggtaaccaatttgtatttatatatgggtattttcgtcaaatatctttataactatttatttttaggggaggttatatttacaccccaaactaattataagtacacctcaatacattaaatacatttttatccttta

SEQ ID NO: 265178 - DNA, 534 bp, Cannabis indica
acatgaacataaggacgacatcagtaatacaaaataaggcaccaacctcgctacgtatgaagagatgtatacgagacatggtgactgttaaaacatgtaacgtataatatgcattatacaaactacgcataacaattgaatgaacttgaacaacgaatagcgaggcatccatctcgctataaaacggcatactcatggtgccttcactaaccagctttaaacatctttcaatgagattcactgctctgtcgagtcagctctctcagataaaagctgacattcaaatgatgttgactactgaagtttatcttgtcgccaagaactgcgattgtcaaatggagtgttatgtcttcaatagcagaaatgacggtatttacatcatcaatctcgggaagaatgggaaaagcttcagctcgctaccagggttattgttgactaccctagtgagataactctgcaagatacactttggagcgtgtttaattccatgtcaacattgacccggtaaaaacggataaatcacagctgtgtgat

SEQ ID NO: 265179 - DNA, 1385 bp, Cannabis indica
aactaccaaagaatagtttaaaaaaattgattgttctcgttatgtaataatgaataaaaatagtcatgaaatgttaatcggctaaggcccctacgtttgttgcagtgagtggatgtgaaggttttcgaggatggttagtacaagggtccaactgatgaatgagctattcaatgatgaagtagtataacattaacagatattatgatattgatattggttattaattcatgtcttattccagaatcctataacttaaatttaagattgagactgggaatgatccattattttgagatatattatacagttttgatattggacagaatgagcttcattttggggttaaagccatgttgatcataatattcgtagtttggaaattgcaggttttgctaatccactcgaagaatgtacaaaattgttgaaaaatgtcgctacaaaatttaacccacttgaccttcttgtccaaagtaaaaaaatattaaatagtataaaaatataaaattattttagtacaaaaacagtttgttaaggcaaaaagccgacttcactggggatcgaaccaagaatctctggttccgtagaccagcgccttatccattgggccatgaagtcctgatactcaattatattaaatcataatttactttacaaaacgacagtatatgattggaaagatatattatcttctgaggaattgtcactaaagttagtaaaaaatttcagagatcgtgcttgctttggtagtatatagtatttgttataatttaactaaagaaaatctggtatgattttgtctgtgtcatcttcatctaaagttagttttgatttggtccgaatctcctatggtttgcatatatacaaaccccagagtcggatcccattaggcgtcacgccagcctacaacccaagcccaaaggaccaaaaaactaaaaaaaaattttttttttaaaaatacttatattttttaataattttcaaaaacaccacattttcatttaaaaatgactcaataattttagggataattagataaggcataacttttttgtaaaaaaaattacatttttacgtttaattttttttttttacatttttataatttttcagagaaacaacacgaaaataacaagaaaactacataaaagtaacatgacaataacatctaaataacatcaaaacaataataaaaaataacatacaaataataaaaaatcaacaataaattaataagagtacaacataaaaataccgtattttctgtaaataaaatcaaaaaaatcgtaaaaatatttaaaattccgtaaaaccataagtttgggggcccaaaattgaatgaaagggaactggtcgtcgttcggaaaggagctccaaaagactagctt

SEQ ID NO: 265180 - DNA, 748 bp, Cannabis indica
ttttaccgaaaggaaaatcatcacattctaatatttttatattttagatagaaaaatatttcctcaaaaaaaaaaaagaaaatagaaaaatatcatctaaaatgtacaaactttacactatttctcaattttttttggaattttaacatatttagtgtaattttctctagtctgatttctaattttcttttgaagaatactactttttgggagatgtcgtgtgcaatcaagacctgttttcaagttttaaaattgggatatcaaagacattgtattttatgctgaatatatatatatatataaaaaatttggttaaatgtattagtcacaaaaattataatttgttgtgattaaatatattttttgtcacaataactttttgttataactaaaagtgatatctagtcatacaaaatttttgttgtgactatttttttgagtgagattataacataaaaataaaataaaaacatcaaaaaattatattttctgtaaataaaatcttaaaaatcataaaagtatataaaaaataaaaacaaacacacacagttaaagcattatttatttatgccataaaaatgttaattcttaaaatattcctgtgtaatttttacaaataaataaataaattgccatacttcttaagaaaaaatccttaaaaatgttttaaatggtattgtaaaagaggaaattacactctatatcctttttatattgtcctctttttttaaagtctattatttttacc

SEQ ID NO: 265181 - DNA, 809 bp, Cannabis indica
cgctctattgtgtctgaccgggacaaaaaaattttgagcttattttggaaagaactatttcgtttacaaggcacaactttgaagcatagttatgcttatcaccctcaatcggatggccaaatggaggtggtcaatcgctgtctcgaaacttatctccgttgctttgtcagtttcaaacccactcagtgggtcaaatagttgccttgggtcgaatattggtacaacacttcccatcacacctccactgggatgaccccctttcgtgctttgtatcatcgtgatccaccacccatcatccggttcgagccatctagctctcgtgtttctgcagtcgaagaggtcttcactgatcgggatgccattttagccctactgaagcaaaatcttcttcgcgcccaacaacaaatgaagtcccaagtagaccgtaagcgtagggatgtccatttcgcagtgggtgatctggtgtatgtgaagctccaaccgtaccaccagcggtccctcgccaaacggcccaatgaaaagctatctccacggttctttggtccctttcccgtcttagctcgcattggaccagctgcttaccgccttcagctccctcccgactccttgatccatcacgtgtttcatgtgtccttgctgcgtgcggctttggggcctcaacaacaggcttctcctcttcccccagacctctctgcagacctggagtggctgctcgaacctgaagccttgctcgccatttggcctggaactcacaagaccagccctcaagccctcatcaaatggaggaacctacctgactttgaaactac

SEQ ID NO: 265182 - DNA, 632 bp, Cannabis indica
tcgaagcggtttgggtattttggactgaaaaaataaaattaagttttttattaaaaaaattatcaatcaatttcttataaatttaatttttttttcttttgaaacagcttataaatttaatttaaaaacatatatacttcataaattttaaaattggtaaaaaatttaaaatcatatacatttgaactgcaaaatattattaatttttttaagtgaatatcaaaataaatatttattatattatatataaatggatgataaaaaaaaaaagtcttgatataaaattattgtgcttgcaatactttaaccttataatgaaattttgataatggtataaacattatatttaatgtgattatatatatataaaaaaaaaaaaggcctattaataataattgttctgatattgtcactcttttttatatttttacgagttttttaaaggcgaattactttatatattgtttttaatttttttaattttacggtttgggtttcaatagtggttgccgcgctagttgcaataggagtttttgtacaattttttgttgcaatttaggttgcagcggtaattgcagtatggatttttatgtagaattccgtaaaaatacaaaaaaaactattttaaagtg

SEQ ID NO: 265183 - DNA, 1388 bp, Cannabis indica
atgctccaaatgggtcattgactctagtgccacagactaggactggtaattctagcctcttttctactctttagtctcatgctttcacttctactgctacattggttgatgggtcaccatacttgagaacttcaaagttaagcgtgctcgacctaaagtaatctcataaaaggtgacctcatggaaatttttcccagggagcattgagtgtggacaaaacatggtggaaagactgatgttggttttcagggccaatcgtcattccaggaagcaaccaattgtgacatacatgtgtataagagccataaatttgtgagcggatgcccaatggaggcttgaaacaggggcattgcaatttggtatcaaagccttaacccagccggaaatgttgccgacgaggacgtcggaccccaaaagtgggtgattgtgatagtcaaaactcgtgatccacaagggaaaggttgggttagttgtgcaatcctacatcacgtggggaatatcaagcgtgatgactataacactgtaggtatgagactacacagttgaagagggcttatatgaattaatgggtactacctatgccaacaagatacattttctttttggtagtccatcacttgaaaactccaaagtcaagcgtacttgacttggagagtagtctcatgatgcgtgactacctgtgaagttttcctaataagcgtacgagtgaggacaaaacacgctggaaagactcgtgttgtttgcagggccaatcgtcattccaagacgcaacatagtgatgtacacgtgtagaaaaatcataagtctgtaggtggatgtccaaaggaggcttgaagcaagggtgttacagtgttcgtccacaggtaattaaattagagcccaagtcattgaagtgtgtatgactgtatcccttggttattctcgccttcacaaagtgtgcgggtgttattgtcccaatcttaacaaatatcttgtgtttattgatgttactttcatggaacacaaaccttattttccgtctccatcaattcctactcgtctgggggaggatgatgatttgttggtatattctatcacgtcttttgaccttgacgcacttccagacgaggtgttattgtgcgctcttaacaaatgtcttgtctccattgatgttactttcatggaacacatgcttttcttttccgtctccatcaattcctacttgttaggggaggatgatgatttgttggtatatattgtcacgtcgtctgacccagacactcttccagatgagtctcttgttccataacccgtctcagacacacttccctaagagtctcccattattcagcctgtctcaaccataactcttgacctgcttcctattaaagtgtacttcaggcgtccac

SEQ ID NO: 265184 - DNA, 1446 bp, Cannabis indica
gaaaaacttttctcacaccgatcagtccaaacaaacttcaggttctttcgggtcagctctgttaagggtaccgcaatctttgaaaaaaaaaaccctcaacgaatcgacgataatacccagctaagcccaaaaagcttctaacttcagtagctgactctagtgttggccaatcccgaacaacttcaattttagccggctccaccatgatcccatctttatctactatgtgccccaagaagaagagacgagataaccagaattcacacttttgaatttagcatacagcttatggtcccgtaatccttgcaaattcgatctgaaatgcaactcatgttctttatctgattcagattacaccaagatgtcatcgataaacacgatcacacatctattcaggtaatcctggaacgtcagatttcatatttatcccatatcagatatactacgtagccttggccaatcatttaccctgatggtgattcttacatttcggacattcaagatatgacttgaaagaggatccgtgaccttgacggccacctcaatttccccgatgcttttcaattacccactgatactccgaaagcctcagccttccgtttgtgatcagggttgccactatcagtccccttactgacgttaccactagcaggtggattcgattccatgatggcatcctttgcggtctgctcttttactacatattgctcagcctcctcagcaattaaggctagctctatcactttcttgtacaaagtgtcatgtgaagtggtaacctttcaagtcccgactgattgtggcattcagtcctctcttcatccactgctcggcctttaatatgtcaataccccccagaaaagttagaggttgcagcttcacgaaccactcaaataccgagtctcgatacggcataacaaaccccaggttacccaccacttgcacaggtgctggtggtaacacttgatcaacaggggcagccggttgccttaatcttcgcaactcttcttcttgacaaagtatgacacttcacatttcttgaaacatctgctgccagtcagtaggaggattagcattgctaacccccacattattcacttgattatgcggaggtggaagtagtgccggtggattggttttgtctacaccaggctctactaactcgccctgtggtttggatgattaaagagggtccattatcagtacccgtgtaatcaacaactccagcgagttaagcaccaataccacacttatgcacttattgacctaaaccctaactcatccatttaccccatataaataaacacttaatcatatggcattttaaagcatggcatcacataacacataaatactctagatgcttgcatactgcctaaaatggatagtggtaaacagatgatcacacaatgagtaaagtatttactctcaatacttactgcaccatga

SEQ ID NO: 265185 - DNA, 1181 bp, Cannabis indica
ttatcagtttttttatgcattttaaattttattccatttcatttctattcctattctcattcccattcccattcctatattttcattcctcccaaccaaacaccttaggtcgcgtctagttgaaggtaatgaaatggaatagaatggaaatgaaactatttttattctatttttttgtttggttgcatttaaaattattggaatactattccgatagaatggtctttccatcattttggtggaatgacaattccattttgaaacagaaataaagaccattccaatgcaagatttgaacaattttaataattttttttattaattttttttatgtattttaaatttattccattccatttttattccaattctcattcccattcctatttttatattttcattcctaccaaccaaacgccacctaataaggttaggctgaaatgaatataacacctgctctttatagcagcaattcagcagcaattcactaaagctaaaaaccaaaaaaaaaaaaaaaaattaactgtacattctcagagttgtaacaatgaactagccagatgctactacatcaagtatctcaaacccacttcactatatattccaccttggtctagatactgatgcagcagcaaagagaacacttgaaacttagttctctctctctctcttattgggtgattgaatatttgttatagtaaggctggttatgaaaattatcatgttatactgtttacgactagattagctatttgagggcttctattaggctggttatatttactcatcgtaatattcaagtttgttttccaatttattttgctccatttatatattcatgtgtcatatgatgctttacgttggtttatgctcaagtcaccatttattaaaatttttggtgtgtaatcatgtaaaacaagtctttccctcacaatcgtccttatttatagtatttatctaatttcaaaactgtattttgtttaggaattgattgagtttaaaaccaaataaaaaaaaaggtatgttggattttggtgtttgtctagaaaattatatcctggtaaaaataagtttattattattattattattatttgggaaaaaatgtgtatagctgaatttggattttgaagttggagaagctaacttgcgttaatgttagaaagtctactgatgagatg

SEQ ID NO: 265186 - DNA, 686 bp, Cannabis indica
aaatctattatatttatttttaatcattttactaattttacacgataatttccattcctctctaaccaaaattttactcaaacttttccataaatctacacattcatctccaaaaaatacaatttattatgtttgaaatgtgttttgattatgtgagagtgtgagagtaatttgagtacaatactcataaaaaaagatatttgaattcaattttatttgaatgtaaatttagataatgtataaaaaaaagtattattcaacttctcccgaataaaaagtagcgacgagttggatttctcaagaaaaacaatgtctccttatttattttataacttatatgatagttttggaattctacatttttttttaaaaatagtaaagaatattggaagtaaatgactatttccaacagaaaataattatttagcattatctatgaaaatacctttatgctgtaagggatttcttttttttttggtataagaagacataaggggatttatttaagcataaagctcaaatttaacccacatatattatatatctatatttcaatcaaaagtatgcatcatattctactataaaaagcacaatttatttactcattcaacttcatcataaatataatgctttaatttcatacctatatatattggatcattcccaactttgcttttgtaaatgct

SEQ ID NO: 265187 - DNA, 1117 bp, Cannabis indica
ttcaaagactaaaaatgcagcaacatttactcagttaaggctatatcagttccaactaagctagaaagtccctatccgcacagacatttgtacaagaacttgggggcaaatattatcccaatttttgctcacctgacgtggcatgtctacgtggctgatatcagcaccacgtggcagtacaactcactaacaagaaggccaagtcatctattcagcaccttaactaacggggggtcttggcattcaaatgggatgacaaatgacagatcagccacctcaaagaggctggccaaccaaccctggccggccctatggctggccaacttctagacagcgcaaggctggctagcctgcatcctgcagatgcatggccagccagaagtaggcctggcagaactttggtgcacatcattacacgtggacagtaagctaaactgcaaattagaccttaaccgcccacgaagataaaggaaaaatatatattttaaggggcattttattcatttgtattttactaatttactatgtaaatatatacttattttatcaaataagaagggtgtaagctctcctatataaagagccttaaccaaactataaaatcgtaagctaaaaaccgtaagtcattaaatgctaagtctgaactctctccctctcacacgcccatttcttctctctatgcttgagattttccatattttattcctacattgtaaccttaagagagctatctcagatctcacgaacctctataaaatctttgtgctcttttaatttctagttcttattgtgtaaaacatggcaaatatcagtgttaatacgacttcactgtcggttagccaaatctgaggtcaacaataaccttacccatttatactcttaacatacttattactccatattttataaaataggctttagtaactcataattaaattttcaagatattacacgacccatgcaaagatatcttggttatcacgaaggaattggataagatacttttttatttccttattaaggtgtttaccaacctttacgatctaggttgattcttctgtatttagtacgactttttcaaactcttcaatgggaccaaggtcagccctatcatcac

SEQ ID NO: 265188 - DNA, 584 bp, Cannabis indica
ggaaaagtcatcggcgccgaaaaagtcgttggtgtcagaaagtcaccagaagtagatgtctcagatataaataaaaatagaactggttctataacataatgaataaaacaaataactcaacccgattataattgaaatattaccagttctgtaacataataaataaaaacatataacacaaaataattcaaaccagttataattaaaatagaatcggttctataatagtgttataatgaataaaaacacataacacgaaataactcaaatcggttataactaaattagaactgattatataacataataaatacaaacaagtaacacgcaataactcaaaccgatcacattttaaaaaaccaaaagaaaatacagttcctaaaatactgaaatatataaattaaaacaaaattagtttcacaacaaaatacctcatgaaaccggttataatttattttttttaaaaaaaaaatggggatcaattctaaaaaatattgagatataaataaaaaaagaactggttccataacaaaataaataaacacaaataataacacacaataactcaaatataatataaaaaa

SEQ ID NO: 265189 - DNA, 869 bp, Cannabis indica
aaaagtaaaaaattaaaaaatttagtatgtagtgtaaaaacccaaaaattcaatatacaagcattacactattctctcttttgaagcaaaagatgattagaacccaaccattatgattactcttacttttcttgtctacaatttttatgccactgttttctatagtttcaacactttaatttttttttttctttcttctattttcaaattttcacaaaatggttgtttgctttatgattcaaatattcttttttataaataatttacgaataatttacaattacattattatgaaatcttcaagcatcggaaaattaaattaatatcactaacatattgcattcagcatttaattttagattataatactattatttttgtgtattgaatatataactccacaaaatgtttacattaattattcttgtcttaattactttatattaaaaaacttcaattagaccttaataataactaaaattatgaatgattatttcttgtatcatattaaattatatagcattaacataaaattatgcatacgtgctttgtacctaactttttttctatatatatataagaggagaagttacagtttgtgagaagaatgaaagtgatatatataaatatatatataagatgtttatataatttaaaatataggtagagatatttatacattaacttataaatagaattaaaaataatatttttattaattgatataagatatatatatattttaaaaaacgtgatcattgtttaaaaaaatgtaatcattcctcttaatgggtattactcatgaatgagtaaaattagaaaaaattgagtttttatgcttaatttttctatctaattagaaaaatctc

SEQ ID NO: 265190 - DNA, 734 bp, Cannabis indica
aagaatctaaattttaaaaaacaaaaaaaaaaatcacttttcaatattttttttaaatatttttttaattaatattttgattctgatcccaacttagatcttgaaaaccgaacccaactccaaccccggacttggaccctcggtcctgaccttagacttgactccgaatctgatttaaaataaaatcaataaataaaaataggaaataaaatttacagaacactcttttgttttttatatttaaacttaaaaaacaaaagtggttatataatacatttttgtttttcaaaattaaaattttaaatttttattttgtaattaaaaaattttaaaataaaagtgttactaaaggccacctaaatatgtttacttttctaattcaaaaaacaaaaaattgtttcagcagttattacatgaactcaccctaagtaaatatgacaaaccatagctcaactcggatatactttagttattataataataggaatcctagcttaaataatttaaattataaaattatcattcatgatatatcataattctaatgaaaagcgcataatttgttttacccatacgtatacaataaggagagggagtcaagaacaagcaaattaattatatatatatctattctatataaaatgtggctatataacagaattcttagtttatgagaaattattgagtgactttttttttaaaaaaaaaaataaataataacaaattattagatg

SEQ ID NO: 265191 - DNA, 1665 bp, Cannabis indica
gtagcagagcgatgagtgtaccgaagacaggttttcctgaacagatgaaagtgcagattcattggaatttaatagagcttaagaccagtacgaacaatttagcaagccaaaataataaaaataaataaaaacactatgtatttaccagttataaaactttttgtcccatctattggatctaaaacccagacatactctgaatctttctctttgcacctccaccctttctcttctccaaaactgcaataacaactcgatcgtcaacactctcagcaacaactattaataaaataaaactcgataacattatgtgagacattcagcattcaaacaactatatattcgacttgtttcataactagtatgataaaagacacaagaactaaaacaatatctacataaaaactacaacaccactgatcttaatctaatataaccatattatatcacatttaggatttatcaaatacagcctcaaattggaagggtctgcaatgatgtcctaagttctaatcattgaattacaccaatttgattcgaactaaataacttacatagcatgagatggaaaagtttttcaatataatagataccatagattcctcggctgtttgatctgcaatagttacaggacctgtagtgaaccacatagaacatctggttagtcactaaaatccatttaataaatagatatattatttagattacgtgaatgcagttgattttgaagcatttttagagcagaaattctaggcttagtacctgatttgctctctatattcctggtttatctggaaatcaaatcgaaataaggaactacttgaaacaagacaacccagttaactcttttctttatgaaactctttcaacctcaacaatatggaaactttgaaatcactcaaattaagctctctatattcaaatctcgaatttcctactaactcataataagctctctttattgaaagctcaaaagaatttcccattcctatattagaccattcatatgaaaggccacattctactttctcagtaaccaaatagagccagcaaaagaaaaaaacaggatctttcttcccaccgaaatgttaaatcttttccaactagctcaataaagctctctccaaattgtacaacaaaagagaaaagttctgatgaattaaaatgatgacaaattataaataatgtatgattcccacattatgagaaatgttttctcagcaaagaaacaaaaaagacttactcaaatcttccttatctagaatctcgaacttgctacgaaagtattttcgaagcacaactccagaggcatcagcagcctcattagcaacctcagcaaagcgatcaacatcgagaccccaggaaagagcttcgactccattcgagagcttcgaattacaggccatggagatgttggctccacgagtgagtgagagggaaaggcagcctcccctagtatcagtgaaattgagagctgaagcacttgaaatgggaatggaaggtgaaaacaaagtgctggggaagtatctggctgtggtggccgtctgagaaaagcactgagaaagcatggtggagactaaaaacaaattcattcaatcacattttccatttccaaaattgaatcttcatcaaacaaacaaaaaagaaaatttatgatgattgaac

SEQ ID NO: 265192 - DNA, 562 bp, Cannabis indica
cttacaagcagtttgtctcaactagtatggggtagggctgaacattaggaccagcacacctaaaaaacccgaacacccaccccgacctgcttccaaaaaaactgaccacagagaaacccgtgtagttgggtcgggttgaatctgaaaagcctaaaacaggtttcgggttcgggtgtggataagcactttttttgggtcgggttataacccgtaacccaaaattatttattttttttaaaacaaaattaatattaataatacttaattatttattaatcagtaatcacattcagaaaaaaaaaagaactgttcattactaagtctaaaacgctgactattgacctgcttaagtatacattaattaaattattaagttgtcaatttaatattatttatttttttaatcaaattgaaaaaaaaaagactcttcagttcaatatcaatattcaatactattatatttcatgtgactcatgatcagtcgaccactaccagaagagacccgacttctcactttctcagttctcagttcatattcatttcttttggttcttacttctca

SEQ ID NO: 265193 - DNA, 1193 bp, Cannabis indica
gaataccaccctcttgatcactgcttgccattatctactgattactgcccttactatattagatcactacccttataaatttcatttattccctaattaccttatatatatatatattgagataagaggcacattcatatacgttaattaggcaggccttttaagttgtcaattttaattagctgcattaatatttattaatgtgctttgttaccaagtacaccactatgtttcgatactcaacttttatatataactcctattctacctaattggttgtctttctttttcttttttcttttgataagctttgctacaaacgttttacggattaaccaacaaagccattaccattttacgttcataagacatagcatttagttcatagcgctatggctttttgtaacaaactttggttgtgtatgctgcttaaattgtatatatatttgacaaaatttgtctcatacatacatatacatatacatatacatatacatatacatatacgtgaatgaacacttctcaatgagtattacctgttaataaatactaaacaaatttaactatattttaacaacattgatgtcatgatatttttcttttaatttatagttacattataacaagattttcttaatatgagattgaatattataataattagtttaatttttgaatttttttgagaacctctattttactgtagggttttttttttttttaagtctgtcatattatctttttatagggttaacaccaaatttataggtttttatgagttctatttacactccataaagtaataagtacatcatattagaaaaatacttaaataattttaaaaatttctcttaatatatttttaaaatctttttctcgcattattttatgttaatttcaatacttattttgatttttattttcatatttttttttttaaatcatgtatatattttttttctaagaaaattttatataattttttgtcataatatttaaaatataatttatttttattttaataggtatatatttaagaatatgaatcaagaaaagttaaaaaaatttaattaaatatataaattttatataaaataaaaattattaaaatatggtgtctatagaagtttttgagctgtagataaaattcctttttttatagggtcgagaatgatttaataaattttatatga

SEQ ID NO: 265194 - DNA, 2982 bp, Cannabis indica
ttattaatattattatatatatttttttttgaaatctttttttagagttatttgggggtatatcatatattgaattagtaacttttttttatttttacaaaattattcaaaaaaaaaaatacaaataatataataggaattaattaattattagtataacacaatagtgacatataataataaaaaaaatatctctgtgaatagacgttttttttttaactctacttacgtattattcaatatttacatgttctattaagaaaacaaaagtataagtgttaatagggctgaaatataagtaaaagtataattttttttttccaattactatttctcattaatttattaatctatgagattaatttacttctccaatccaacaacgtgatcttggtcaatcaaataaattgatagttgaagttgagttttcaatgttgtccctaactcactttcaaattgattaagcattaatatttcattactatcatattttcttatcaaaatctaagaaagaagaagatacatatacatgattggagcttacttggaatacatgggaatgaggaaacaatcacagagacaacacacgtgcacatatataaaatttctcttgagataataatttagctagccacatacatacatagtccaaaaagggtggaacaaagaaaaaagagcatctatctacaataaagagatcatttgaaacccacatcattaaattttcttactattaatctgtttagttgatttatttttcagaattgggtagttgacattaatggatattgcacttatttagaataaacaaataaataataattaaacaaacacttcacagaatatatatgaaggcattaaaagaggtggacagcataggaaagaaagaaggatgcagttgtattgtatgtactccactccactgtgggtaatagtaatagctggcttattattattataatttgaaaataaaagaaagaaaaaaccttttcgtttttggtactttaattatagaaatccattgacttctttccagtttttctgtaattaatttatttcccaatcatcatcatgtgcattatattgatacttttttctaaaggcaagagtttttagtgttctttttcattaccaaccctcaaattcgtgcttaaatatggttttgcaccaacatctatattacttctttaataaaaagagaaagaaagaaaaaaacaatgaaatttataataggtttaacgcaatttataaaatgagttgtcacatttttttgtctgatttttgcactaataataataataataataataataataataataataataataataataataataataataattgtctaccttccaagttccaaacccatatccaactatcattgtctctcacgaattttgtaaagaaaaatgtaacttttgtagaaattaaaattaaacctaaatttgttcacgaattgaaacttggttgttgtctctctcgctagtaatggttttttagactctcaaatcaaatgtgtcttattcaactttcatttttcaatttttgtgaatttttttgtacacaattgatcggtgtcactttattattatgttattatttatatacaatgcatatcatcaaatagtcacctatcgtatgtaatataagtgatgatgatgaattttttttttttgccttttgaacaatgaacaaagtgatgagattatgataatagaaataggggtgagtaacggtaggtttgatcagttttttagacacaaaaaatttaaaattcagttttcgattctcatggttataatttgaaaaccgaccgaccattatataaatgtaagaaaatcgaccgttttaatctacggtttggtcggtttaaccgagctttttttaaaaaaaaaaaaacgaaataagtttttaaatttaactattattaaaaacttgttattattttatgaatgtgtgtatataatacctaaatacattaaattataataaaataaagcaaatgaataattgagattttaaataaaaaaaataagaaagtaaaactagtttaatagaattgtatattaaatatgtaaaaaaataattatattatatatgtatatgtatagtgtataatatatatgttcggttcttgatttaatcggtcggttttccattaatactaaaaccgaccgtgcaaatgcagttttaaacgacaaggtacctacttagttttagaaatatcacttagttattattacctttaaaatttaagcttaagtatttatttataactgagagttaaatttaaatattgatatagtaaattacttttaaaaatatatcattgtaatcatactctactattttattgggtaaagtatcatttattcataataagttaataaccataatatgtaatgtccaattagtaacattttatctaaaattgctattccagttggcacaaaaacatggaacacgaaatgaaacccacaaaagggatactgcttttttttcttttagtattttctaaaccaaaaaggttaatacagattttagatttacaaaaaagaactaattcattaattaaattgctaactctcactttactttaaaaacatgttagaggctaaatactgaaaaaacaattttttaaaaaaaaatttaaagaagtattgaaataaaacatcccatttttatttttgatgtaggataataaatatggttttagattttttagtaaaccatatccaagtaatgatgggggaaggaaacactaacccaataaagataagagcaagaaggacctttaattaaaaataaagatgattttttttttggtaacaaaaataaagatgaaattttagacttaaaagaaaaatgggtttgttcttacttaatttctgttgtgagttaaatcaagcggtgggtgcagattaagcatgctttttttggaactagagagagagagagaaaagaaaagaaaag

SEQ ID NO: 265195 - DNA, 476 bp, Cannabis indica
agagagtaagggttggggttggccttcggtgccgcatgagagggtgggggagagagctgggttggggtttcatcagtgccgctacgagagggtgagggagagagtttaggatttttttttttttaaaaaaaatgtgtttataggtgttggtttataaccgagaccaaatgatcttttagtctcggttatgaaccaacacttatactcaatctatgtgtatattttttttaaattttttttggttctcggttatactagtgtcggtctactaaccaacactaaaattcattacaggtgtcagctataaaccgagaccaaggagttggagtggtctttattgttaatttaaaaaaaaagtaacttcagaccgacactaaaagtctattttgtagtagtgttggaacaaagagttaagtatctattttgttgatatgtatttgatttaattgaaaagaaaaaaaaaaacattattatta

SEQ ID NO: 265196 - DNA, 916 bp, Cannabis indica
agccgctagtcatactctagcctaaccgatgtgatacggtcacatagcactgtaccaccaaccgtagtatcagcctatactaggtatactggtcatactccagttgctagtcatactctagcctaaccgatgtgatatggtcgaatggtacgaagccaacatacatatctaatgtaatctaacaggcttcctacatgcacgctaaacatgtaatctacatatgcatactgttatactaatcttacctggattccgaattcaggtgtgccggtcaacctgagtggaactatctgcgcggcggattacaggctcctaaaccgtaaaaatcacaacaccgataagtgacacgctaaatcacaacggggacaaaggttttaaaaccaaacttaacctactgtaacttaatacaaaaatacccccaaactagcagagaacaaactgtctgaaaacccgaaactagcacgaaacgacaagttgagaaaaaccggtttctcaccctactgcaaaatccgggtaaccggttttacaagcagtgtaaaaccggttagccggttttacccagaaaacccacaaaaatcaattctccaaccaaaacgtttccaaactcaaccaaactttccagacctgctaattagaccctaataaacattttccaagtgataaaacaaagcttcatgcataaaatcaaaatccaccattaaagctccaagctttgagttcaaaactcaaacttggttaaacaacactaacatgcattcaaatcaatcccaacctacttaaacatgcataaaatcacctctgaaaactacagcaaacatcacaaaacagcagcaacagatttcaaccattttctttgaaaaccatagttttgagccaaaatttcatatcttaataaaatcaagtaatcaccagccct

SEQ ID NO: 265197 - DNA, 1183 bp, Cannabis indica
atttagttaaagaaaagaattaaccaaagcaaaagtgagcgcgtgacactgaaaaaacaataccaaaaattaaaaatgaaaactttagacaatgacaaacagctcactcttttttgacagttacctctttccctttctcattgcaatttatttttgcttttgtgtctgtcctatctgttaagtcaaaacactcgtcaaaatcaatctgggaaaagactggttcagaacttggccaacacagcatttcatgatgatgatgatgctattctatacctatatttgtgtatatatttatttatttatttattaatctataaagaaccctatacaccaaaagtctcaatgtcccatttgtaattatgtaccatacacactcaaaacatttgaatgaaaacaagggagggtcacatttcatttacattacaaaacccacaaaagagaaagccatagattacaagagaaaggaaaaagttggttcttttaattttagtagataagagaatttataaaaaaaaaaaacctatatctatgcaaaaaggaaacaaaagtaaaatttggggtagtaaagaataaggagaaaaagggaaaaagaatacttttcttttgcttatactttcttaacactttttttttgttggtttttgtttttatcttggacctgatagctccatagcataagaatccaaggaatgatcatcatcatcatcttccattgttgttccaaacatgcttgaacgatcatgttcactgcaatcatgttttaaggcagtgggggtggcggtagtagtagttgttgtagggcgggaagtgcttttgttgtgaggattatgaaagaggttcatgctgggattagtatgattatgtgaagctgcccacttctcggctaggccatcgccttcgagcatccgaacaacctctgacatcttcggtcggtgggccggtaggtattgagtgcaaagtaaggccacttgtagcatctcccctacttcaatccgatcataattattcactagctccctatccactaatagctccactttcttttctcgttgtattttcttgacctgtaacaacagtgatatctctgttacttcagtattgcaattgaacacttactattattggatttaggcctaaagtataaaattttggtctaaaaaaaacaaaaggacattcatactaa

SEQ ID NO: 265198 - DNA, 1264 bp, Cannabis indica
tttcctttcttcctctttggatatatgtttaaaaattattgagcaattattagaatagtagttataaatttaataatcacattttatttttaaatattagttgtaattggatataagggagtgattatatatgaattttttattttttattggacaaaatatttactaataacatagaaaaataacatttgtccagtaattaatatttaaagtgaatttttttagggggtgtgtctgtaaagttttagtaattacacaatattttaaatacaaagtgaattttataatgttgtaaatataaattgacttttttgacacgacacaaaatcaacacaagtttaggaggcacgagcatgacaagacatgaaaaaatataacttggacacgatacggtacgaaaaatatagacttaagtgcaacacgatcacgactagactaaaacacatgagcacaaataatctagcccgatggcacgacacgctaaaaaccttataatatgataaaagtaataataataatttgactatctgttagtaaatatttaaattttaattattataataaattttttacataatttttgcaatatattattaaaaaaattatataaaaataattaaaaatatatatataaaaacacatatcgtttaataattatctcattaattgtaaaataaaatgtagaaaaatagagaacgaatatgagctcgtctaagaaaatgggattggcccaagtaaaacttggcacgaattcgagcaagccacaattcatttatagtactacgatcacttgacatgcatgattcatacttttttatagcacgacacagtacggctcgactcatattattttatgacacggtacaacacgacacaatccatatttatggcacgactcttatttacaacactaggtttggatataaaatggtaattcctaatgtcttcttcaaaaaataaattaatatataattattatacagaaaaaataatattttttaataattaatatttaaaatataaattttttaataattacacaatgtaattataattaattctcatgcgagttatgaaaattaaaaagtctaattgggaccatttataatttcatggtcaaataaatgtgataatatgtgtataattacctctaatattacacatgaatctaatttcatcatgattttctagacaagtcttgacactcaatttttatgagggcaccataaacagagttgatcctgagatttttttgaactttagg

SEQ ID NO: 265199 - DNA, 705 bp, Cannabis indica
ccttgtcaccaactggcataattgtaccttcatatgtgctcctccaatattctgttgtgtaatatggcgatcatagtgcgtacatgctaatactttgttgtgcagctgcagcacatgcatgaggacaaggaaacttcatgcactggaacaagccacaagtgtaagtctattcttgcaagtccactatgccaccagtctcaactgttcgtctagggtgaacctgcaacgtgtaaggtccacatgtgtcaacgttcaaatactgagatttttcaaattgcaaggccaagtcgtcctccatttttggtgctagggtctttgcccacttgttagctatttctttacgtgtagaaaaccattgttggactttgtgttgggctttgtgccctaaataaaactctatttcaatgtaatctttatcattcaattattaataaagagaaagaagtattttcatcacttatttagtgtgtcatttggttcatgttatcaattatatgtttatttgatttataaattcacccaaatccttatcacattgatattcttgtttattatgtcatgaatacagtggaaagtaattaagattatgtgattaaatgtattcctagatttatcagtacacagggattaactgatatgataatctacaacatagtttacttgcaccttggataagtgctatgtcctttccagggcattggttaa

SEQ ID NO: 265200 - DNA, 1295 bp, Cannabis indica
aaccacatttaatcacaataaatcgtaccttttgtgactgatacctttaaccacagacttttagtcacaatataggaatagtaattaataattaatcacaactttttacttttagtactttattgtgactaaaaataatttatggtgatataattaatcccccatcacttttggaaaattccacatacatgtcatccatataatataagataacaattatagatgtatatatatatcatattacaacttgggaaattaatttgccatatgacctagctatgtacaagtacacagatccatgacaaaaaaccatatattattattagatcttttatttgatgaatttgagtacacttttataattaaatcaaactcacatactcagattaatggaaaaaaaaaaaaacaaaaattaaaatagaaaatataaatatatataaatatatcacttaattaagcttattactaaaatgatgagagaaagttattataatatatatgaaaattctacaatacaaccttctggatgcactctcatttatttcaacatctaaaggaattttttaatctaatttttttatagtgcatgtcgtgtacgttgtaattatttaagatatttagtaaaattttgtgaatttcagaaaaatttaacatactaaaaatagagttctaacagcttgttgtacacgtaattcttttattttatacgcatgtaaaataaactatttgaatactattttttatattgtaaaatatttcaaatttcttagaattttgtagaatatatcttaaataattaactataatttacatgattatgaaaaaaattaaactaatttttttttttcaaattaaatatcgaaatagataaaaaaatgtagccgtacattgttttttttaaaagtatgtattgtagaaacatttatatataaatcataaacacttttagacacatgcatgtatttcgtaggagacctaaaagtacatataaattctaacaaatatttgacttgttcaactcatatatttttacattaattaatgataacacaaataattgccacacaaatatgtatggtgaaggttaataattttataacattattatattatatatatatccctacactacacatgattttcttttcttttttctcattgatttcctcatacatgaaagaaagtttcatcaactatactatagctaggttttttatttctctagatatatcgattgggaaatcaaatcttgacccgttttttatcccattgaacacaacatatatatatatata

SEQ ID NO: 265201 - DNA, 556 bp, Cannabis indica
gaagaataagtggttgaaataaagtggtaaaattgtaactagagaatggtccctttaagtggccggccttagtgttttttgcccaacatttttttttttaatccatataattcaaacctaagccctagttgaaatactatataaggaacaagatgctctcatctcatccatctctttcaacctgccaaaatcttgtttctaactctgtctgacatctagtagatgagagataccttctatgcagttttcaagcctccttcattattcttcatagttggcttatagtgatagagtgtcatgcccacacatagcaagtgttaggctatttttagcttacgtttcgggtcactttttctagttatttttcttctttgttattctttttggagtagtattacgcttgtttttttcggtttcaagtttcacacttggaatatatctattgatcaaattttggaatataacaatctaaagaataaagaaaattttgtaagaaaattgagctaaaacttcaagcctaaatttgactattttctgatccgattttggaaaaagt

SEQ ID NO: 265202 - DNA, 661 bp, Cannabis indica
aaaaaaataaaacaattacagttaaaaattcatgaaaaaataggattacctttgacaaagacaatgtcggagttgggtggtgtggtcacagtgattcgtgggtcgtgagggtcgtgtggtcgctaggtcgaggtagtccgtgagtcgtgtgggtggtctgattgtgtgctcctccgtgtgtgtgtttacatagatcaagagagagaagggggaaagagcgagagaggattgttcaaatggaaggagtagaatggggtttaggaaaaaatgacctattcaaccaatattgaatagcttaggtttaggaaaacaattttggcccaataaatacataattaatcaaatttcccttcattaatcatttttttatttatttaaatcatttattcaaattaaattaaattataactataattataatttaaataattaattttacactagtttatgttggttaattatttctcttaatttaaaaagaaaaataaatgactaaagtattataaaatggtaccattgaaaagataaagagcataacattcttcataattgatttagtattaaaatattataaaatagtacaatttaatagagccttatgttgacctcacttttaaccaacaacaacgagtctaattttataagtgataagtgatttata

SEQ ID NO: 265203 - DNA, 1888 bp, Cannabis indica
tgttttacaaaaattatcaattagaccttcaattttattaaatgacaaaatagaccatatattttctaaaatggtaaaaataagacccttagcttaataattttcaacaattttattttttaataaaaccaactttaagataatttctaacacaaatagatacagaaaatataaccagttttgtcataacatatttagattacattattattaagttttattttgacaaaaaatcagttcagggtcctatttgtacaattttaaaaaatacaagattcattttgtcatttaacaaaatagaaggtttaattagtaacttttataaaatacaaggtccaaaatagtatttacccgtaataatataataaattaattaaaaaagaaacataatataagtgaaggaaattttgcaaccaattttataagactgatcataaaattttgcaaaggaaaagaaaaacaaaaataaaatacaaatattataaaactctacaagactacaaccaattaagaacattgttactaggtgtcggacaacacactaatatgtaatgtattataaataattaataatttactatattatttattaaatcaaactatataagaactaatattaaattatacaacttatcatttttttttttcatcttacacttgtctgatttatactgaaaagacatacagctttgcccggttttgttttaattccaatattgtccctatttctgtcttgttcccttttctcaataaaaaaatgaattatattaatgtacacttttttttttcttcttgaaagaggttatataaatacactttacaacgttacagaatgtcaccaaactccaaactgtcatatatattacctagcacccttgatttttgggggataaaatatttatataactaataacagtcaacatgatctggtgtcctatcttatcctattcattctccttcactttctcactttttttttgtttgtttgtatttttgtgtttattaataaaatactttacagtattcttttaattagttaataatgggttttgagcctcccttaacactaaacaaaaaaactaattattaaatagtaatctagctataatttaagcacactgagagccacctttgattttattatattttataagcaattttacaaaattatgtataatttaagctgtactacacacatttttaaaacaacaacaacaacaacaacaacaataattataataataataataaaataactatcacactaatatacactatttgaatagtattcaactaacttatcttcacaaaaaagtactcttaatcttcacatttcaactagaactaactaactattaactttctatattgaaatgaatagaaaaattaatgagcttatttattattattattatggttcaaggttcaaagtattgttaccaataagtgtggtgtggtcataatttattagtttctgcgcgcgagaacaataatatgaattgacaagccatcttacatttcatttctagttaaatataattttgattaaaaaaaatctatgtaatttatgcaatcagtaaaactaacaaaaacacaaaaaaaaaaaaaaaatccctaaaacaaacaaacaaacaaatataaaactaaaactaaaacacacaaaataactcatcatactctagtcaaatttattgatattttggaaagatgtttaattaacaccataattaatataagcatatataagtacttaaatggagtctaataattattctttttcaatttaatgtccaattacgccgattttgtagtccaatatatgatatttatatcttaaaatattaaatataaatatttttttttgaatgaaagtagataacttcattaa

SEQ ID NO: 265204 - DNA, 179 bp, Cannabis indica
aatgttaaacgggacggggacggggacggggatgacactccccgcctcgacggagacttgattaatttattagttatttttttattaatatattatatttcatatatgcatttgtatttttttattatattaatattaactttacaatttttgaggttgtgtttttgtataataattac

SEQ ID NO: 265205 - DNA, 563 bp, Cannabis indica
atttggtagtgttataagttttggagatacaatactaattatttttcaaaatagttgtgcttaaatatttttaagagtcccacatgtgcgaggcacgtgagacgccactagtacatttctaaaagtgatagtaggaatatattcttatttttttttttgacaatagacaaacatttttagtctattatttatataatatgtatattatggttatttaagacattttacagtattttgataaatttagaaaaagttaatacgccgaaaataatgcacatttttaaaagtggcgcactgatatactcctacctgtttcggcattcgagagacttttttagtttattttttttttaaggattttttcaataatatacttaaaatataaattatttacaaaaataccttaataaatcttaattacaataataccttgccacgtcattaaaaaatactttaattctaaaataatatgtctgaaacgaaaattaatctcaaattccgttttttttattattttcccgtattttcaaaagtaattttttggttacttatgacgctgataa

SEQ ID NO: 265206 - DNA, 2379 bp, Cannabis indica
ataattctgttatctcaggtaacctttacatattatatgcatgggaaaggaagaaaatggtatgtggttgtggtttaattaggttgcagttgtgtgtttataaaggtgccgggggcattcaagctctcatgaaaggcaacacaataaaaaaggccgagcaagaggaatcattggtggctgcatcaggaattccttacactattataaggtgtggctctttacaaaacactcctggtggaaagcaaggctttagctttgaagaggtatatatgaattgaggagttgtgctgtacagttagcttttttaatagaagtccactgttaaaggctttggaaaagttaaaggaaattggaccttttgtgagcttataagttgatgctgatgacagggttgtgcagcaataaaaagtctaagcaaggaggatgctgcctttatttgtgtggaagcagttgatgtggtccctcaaaagggatttacatttgaggtatatataatttttcaatctttttgcttaactttttttttgaggtatagaaatttcttgaataaattattgcacccagcctagcctatttttaatctaaaagaatatggaaacaaaggacactgaacgaaaattgtttagaaataagacacgcttgactcaatagttataagtttttatttattttttatttttataataagttagtggtgttaacagtttactgtgataataggtagtgaacggagaaaataatgttcctgactggaaagaatgtttgactcagttgatgaataaagcagaacagaaatcccaatgaccaattcggttcatgtggtcttctttttatatatcgtaatgtacatgttaattttatttaaatttcactatattataagaaaggaaaataaagagagcacgaaattcctcttgtgatttatttagagaatctccaaggtacactatttcattaaattggagggttaagtacaaccttttagtcaatttccgcgctcgaaaatatataccaaaatattttttgatagtagtattcgttataattacaatatcatttcttgtaaatattttaaaaatttcgaatagttaaaatgaaatatcagaaactctgtcctcgataccttagactattcataatttttcaaaaatttactggtttgatattataattataacaaatattgttatgaaaaaaaatattctacatgtgtttttaggcgcggagattgatttggaagttgaaattggtgtaaaacgaaatctttatattattctactatatgaatacaaaattataacataaattagttattaatgtaaatagtataaaatgtcaaattttttaagtaaaatatttttatttggtgttatatttagtgtaaataattagagttgttgtttagtgaaaatggtgcacccattggtgcaaatgaatattaagttttttttttattgaataaatcatgcaattttttttatagtaatcagttaaaataatagtttccaactcaattgggacacctcctccattagaaacatgaccaggattagaattagaaaaataagccaaccaattggttgcctactttttcggattgtttgacaaaaaaaaactaaaataaaatcaaatcaaatgaaatgaaaaagattgtagcatcacagttaaccttaagaatacttgttcaatttcattcactgctcaaaagacacaacagtagaaattgttgcaacgagtacaatcaatcctttagcttgagcaatcaattattatgtaaggtacgtaattacaccactaacaacttcttcagttgtagaaaacttgttatttctaaccactaatactctaatagtaatttgatgacgagtcatcaaagaataaagaagccgaaccaataacaaaacaaaaacatgtcacagaaacaagattaattgtagtaacttaaacaaatgacacttaaaactatgtcacaaatataagactaattgcaatagcaaaaatctaatcgcaatagcatagcaaaactacaaatccgatcaaaccacgcctaagcccagggagggtcagcgggcctggccgcagaaaaaaaaaaaaaagacaacctccagcgactaaagatgtaagaacgagaaaccttagtagacgatatagtatatttagaatatgctaatagaatcttctatatatttatataagggaaaatgaaaaataaattaggtggtattttatattaatttttttttcatttttactattttatgaagaaaatttgataataaatgttttgaaaacaatcatacattgtttaaaaagcaacttatatgttatcctacatagtataaataagttttatatttttgttttacaaatataagattt

SEQ ID NO: 265207 - DNA, 622 bp, Cannabis indica
aaaaaatagcttcccgtattttttttaaaagtccttcctaaaaaagctggtgagtcattgcttctctaaaaagctcttttaaatcaaaaaagctcttctcatattttatccaaacatatttaaaagtagctttgagacttcaaaagctcttctaaaggcatgccaaacatgcccaataagttagtgctaggacattaattattactaagtgctcaacttgaaaaaaatatatatataaaaatttatatattcttacttccaaatccattattaataaattaacaacatattgaagttgctcaactcattaaataatttcaatatacatatataaatataaatatttaataataataataaatgttttcacgaagatcgtcatttatttggtcaaagtattgaagatgagctcaccaatttttatttaaaaaagactagtacataataaatacaaagtacttttcttgcactaattaaaatttttatcttttaaattatatttttcaaattttttaacattaaaaattttgggaattgttgaattaaaaaatttaaaaatataatttatcacatgtcgaaatttcgaaaaataaaaattcttatgaagtttttctatattaga

SEQ ID NO: 265208 - DNA, 1173 bp, Cannabis indica
ttggttctgctgcttatttaaatctcacaaaatggtctcaataatgacaaaattcctaggaattaattgttccaatattatattatataatatatgcaagaaaaccttatatatttttcattattacatttgaataataatatgacatcttttacatgaatttacctaaagctaaaagatggacaaggctgtatttgccagcaagcttatcattgcctctccaattcaataatagaacatagaaaaatagctcttacacccgaaaattgctccactgtgactccatctataccatctctctctaatttcatggacagtagatcgatcaatagagctaatatatttacaaaactaacacagatggatggagcacactttctttcccatgggacccctttcggaataggagcctcgaggccaagctttatcgacagattcagagttacgatcttcaagtaaatgaattcccgtggatggagaaatcctcgcctgcttgtggcataggagcgctggaacttatggtttgcaatgaagatggatattggctctgctctggaactgccgatgtgactacaaaagctggctcaaggttgtcatttacactcttctttggcctcttcggtctcttgggtttcgttggtaatgaatcagtattttgttgggcatcatccaaaccaaagtccattgacatggtgtttagttcatctgtcatttgggtattcctcgatttggaagtttgtgctggttttctctgcatagagatgtaatatgctaattaaatatgcgacattataaaagtatggttctacaaatagaaacaagagcaaaattcaacacatccaaacctttttgctagcggatttggttttctccagatctggagaattctcatgtccagcagcctcgggtacattatttgctaaatcttccaaagatgcatcaccttctgcatctacccgaatacccttggtttgttttttcttctgtctatcctttgcctgctgagaacaaaataacagttcacatacatagtaaacaaaaaacgctttctcgggaagcgaagagaggataaaattacatgttcttttttgtcaaacaatacaataaaatttgaaaggtaaagttaacaaaggacactatgtttaagcctgtctcacctgcagtggaatttct

SEQ ID NO: 265209 - DNA, 1073 bp, Cannabis indica
tgatttacctttatcgtgacataagacctgagattgtcgagcatcataccactcaggtcgcccacatacttgactttggacttgaggtaagaaaagtattaagcactgtatatggtaatgttatgattgttatcgtctcgattatgatcaagatctctgtatgtgtttattgtgacttaatgtaaattgaggttaacgatatgtgtttgttacgactcgatggtaatcgaggtaataatgagaaacaattattgttgtttgtgaattgtttataattaagggaaaaacatggttatcaccattgttgtgaataaattaagatacggtcattatcgttatgagcaatcattcttgaaactgcggatatgtttcttacttatcgtttgctttaccaagcaacgatagtgacatatgcaactcgtggataacgagtggtaaggttagaaacagccattacgttatgagtaattactcgttgaaatcgcggttaggtttcttacttatcgtttactttatcgggctacgatagtgacatatgcaactcgtggataacgagtggtgaggattggaaacgctcattaccgttatgagtaattattcttaaaaccgcagataggtttcttacttatcgttgctgtatcaggcaacgatagtgacatatgtaggtcgtggttaacgagtggtaagggtaatttatgaagtaccaggattgtgtggttacgatattgtgaaatggattaagcgtgatattatgtgagagtcacaaatatatatatacttgttatattgagatgcgaatatctgcgtatataatacttttgatgtaataacttttcttgctgagtcattgtgactcacgagtgcttcatggtgcaggtaagaggaataaagctatgttcggccatgaatcagaagtctcccaacagtgtacatatcagccgtggtgtcttggcttctgagaagcaggatcaacctcttttcttttatttgtgaaagtgtaactttatttttctattaacggttttgtaacttgttaaaaagaaattttacaaacaggggatccctatatttta

SEQ ID NO: 265210 - DNA, 528 bp, Cannabis indica
gaataaaatcaacttaattattcattctaatttaatatctaagaaaatattctaatttaagttggtccaaaattaattaataaatcaatttacaacttaaatatattttcaaattaattaattttttttttgaaataagaaacaaataattaagcatcttgaataaaatcaacttaattataagttctattaagttctaagaaaaatatacctaatttaagttggtctaaaattaattaataaattaattttcaacttaaatatatttttctacttaattaaatattagaaaatataaattagttactagatatcactatctagaatcttttctttaaactaagtatgtatttctaaattaattttaaaataatccaatgtaaaattaattcagtatatttcaaaattaattatgttgctaattcaattttagttttgttaaaccagtaccattagcctaatctaattatttaaataagacaaatgaattttaacaattggggttgttcattgagggagggttgggtt

SEQ ID NO: 265211 - DNA, 598 bp, Cannabis indica
agtagaaaatacctagcacaaaatctagtatacttgcctcgcacgtagctttttattgtatatatataaatatatattttcttgagaatgaggagatcacacaaactgttgtctaaacttaaaaaaaaaaatgatagaaaacacaaataaaaatatgtattaaaaggtaattcaacttttcatcataaattttaagtaaaaaaattgtcacaaaagtgacatgcccaatcaaatcaacaaataaagtgtctggatttacttattaattcaagagaaatatatatattaacacacattttttttttgggatgaaggagatcacacgagctttgtctattttttctttaaaatagatgaaaaacacaaataagaacatgtattagaaggtatttcaatttttcatcatcaattttaagtaaaaaaaaaacagttacaaaagtgacatgccgaatcaaatcaacacttcttataaacttaaaatataattaaattagttagaataaaccttgaattgtcacgttttaacaaaatggaacatttttttttaataaaaaatacagtatacaatatatggcagtaaaaacataattttatacgt

SEQ ID NO: 265212 - DNA, 767 bp, Cannabis indica
atatatatatatgtatataacatgtaattaatttggtctttacacatctaaatatgattattatttaagttttgttttgactcaatattaatttaggccactaatgctagcttagtagtgagagaggggtgggaaaaagggagaggtcatgagttagagttcgaacttagaaccttaaagctattaagctattaacagatgggtccctgtgttttattaaaatgtcagtttgataccttctattattaataatactcagttagtatcctctattattaaaaacagtaagaaatggtacattttgttaaaatttaatgaataatttttatattaggactagattgcccttttatgaatcattgttttctttttctttttattaaatgtcatttatcaaaagaaaaatataaaattaataaattaaatttattaaaatataagactatatataaaggaagtggtatcgttttctacaagccaagagaatatgaaagattgtcttcaacatagaagagaaaacatgagaagatgatagggaaaatttcattagtatacgtaatagatattttaataacataattgacgtccattaatttaatatccttttattaacgtgacacatcagtatccttaccgtaaatcaaaataagcttatatcagtatcctaaacacaaaacatgcaccacattcttcctctaattaagggactaattaatgggtcctttgataaacacattaactgttgaccgagattttcggcaactatt

SEQ ID NO: 265213 - DNA, 1245 bp, Cannabis indica
aaaataaagggaaacttgaaattaatacccaaaaagcgataaatgttcgatcgcgaaaagaatagattgaacggttgggaactaaataagaaaggaatggtcagagcattaaatggtgaaataattcacctcaaagttttgaactgccaaaataaaagcatgtaaattataaatgggaaaaatacaatcatacccttgaggcatttaaaaagttattttcactttaaaaaagcactttttaggaggcaattattatacctatatttcggacaacaataaaaagttgacatgtgtatcaaagttggaatatgaaccaactcaaaattatgcattattaaatgcacttaaataacttgccttgggaaatacagttaataaaggaactcgaatttgctgccatatagacaatagtgagacacgagtaataactattgaccgatgagaccagcgagacaaacaggtccatctcgggataaacagaatatataacagaattttttggaacaggtaaaataatgagtttgcatctcatgatccatatactcgtgagtatgtgtttgcagctcattgatccacatactcgtgagtatgttcaaggacaacttcaacatttactcgccttgctcttaaagcgttgaaataaccatctcctcaacagttaaggaaggctgcgagatgcatcacgattcaacacttaacatttttctacgaagatgttaaaggaagatatcactcaaatgacgagaacaattgaacacagtcagcataaccgtctatagataaagaaaaagagtggttaggcgattatttataattatctcatgtgcacaaagatgaaacgtggggagtgtccatgtttcataagcagttacgaatgatcatatcccaaggaaataattgttaccctaaacatctaaaatagcgacagaatccaaggaagaagagacgaccaatcttaagaaagatagataatattgttattacttattcttgaaaatggtaccattgtattctgtatacaaactcataaattatgaataagatggacttgtggactatggagatttaatttcaaaaccacgtataaaaccttctcattatttattgttatctttactattaattactatataattaattctacaatttatttattacaaaaaaagttaattatttggttaacgaaaatctacgttaacaatgtaaaatttatattatatgaatttttgttacaattatttataa

SEQ ID NO: 265214 - DNA, 548 bp, Cannabis indica
ctctctctctctctctactgcgattcgactggcctgcgattcacttctccatcttctctgattcaattcctctcttctccctgtgcaaattattcctctgattcaaacaaaactgatctgaaaaactcaaaataaaaaaatgcaatgaatccataagcacacagaagcaacctgcaacatcggcacctgacaagcaatgaagctctcaccttaaagcagaaaacgaattcttaagctcaaagcaccgatcaacctgcacacagaaaattcaatcaacaaatcaagccaactccgatcgtccctgtcaacagcgatcaaaataaaatacaggtacaattatataaattatgctatgaatattataggcatatatatactgcaaaagaaaaatacaccgaatatgtgcatttccaatttaaacttaaaaaaaaaaaaactagattgaaataaatttcataccaaaactatatgatcttgcattgcttcataatgaaatgttcatacttaatctagatttagactatgaagtttcacaaaaaaaaaaaaaa

SEQ ID NO: 265215 - DNA, 599 bp, Cannabis indica
gatttatcatggacgttgatgttcaaagattttttcatgtattgttgttttttagttttattatagttttgctacttgcttatgttatttctttatatttgttttctttgtgaaatgcaggattgggttaacaaatgcagtcccaatgatttctacaaatcgaagtgtgtatgtacgagtaatttctctgttattaataacattaagaatactttgtctgtcaatttattaactatgttccgtgacaccgagtttaatcattttttttaatatacctgactttgtttttcacccacaagttgtacatagcctacttttgagggaagtataccagcccaatccaaaagaattttgggctaaggttgtttgccgttgtatacggttcagtgtcaaggagtattactttatcaatggtcttgattgctttggtgattgcagcgaactgttgttttcccaggaatcaaactagttaattgaggtttgttttcgtggcataaaaaccattgatcataaagctatcgaggatgctttcttgggaagtaggtggggacagatgagtccctaggtttgaaactatctattttgcatttcatcaaatg

SEQ ID NO: 265216 - DNA, 2154 bp, Cannabis indica
catcggccatttctgctgcttctactccaagaatgggaaagtcgaaattaggcagcttggataaggtcgtgtaaatataatcagaacggcatgatcatactgtttcttccccttctcctttcactcttaagatcgcgagtgagttccttaactcgcgattccaaaagtttggccttgtcctccgcctgcttagccttttcctccgcttgctccttagccttcccgaggtcctcaatgtctttatccttcgaggtcacgtctagcttcagtttcttcacgccatcctgaagaagtgtgttttgattcctaaggagatcgacctccttagtacctacgacaaaagccctcgataacataatcatgaattacgaggccaaatctgtagagcgcggcaacacgtcctcaacaggaaccccctcaaccttggatacgaactcatcactcacgaacttgtcctgaagggttatgatgttgcgagccctaacagcagggtcaatcataaccttcttccccttatcttgggtagttttgagctgtttctttaaggagtcagccactggagtcgggacgacctcattcttcctcttctgtgggatgacaggagaagttgtcgtagttctaaccttaggctttcgattgagaatgggatcctgcttcaagaatgtcatttctgtgagaaagccataagataagaatatttttattgtatgaaagaacatgtatatattcgatggattaccagatgttggtcttgatgtttgtttagataggcgcttctctattatttccttttgtttctcagaaggctccttgtacactggttctcactgaaggctggcatttatcgggtataagcttgtgttcttacaatttggcagtagtacacaacaattgccaatcgcaatcttgaataggcaagctacctagaactttagctatttccctacgagcagaatcaattacaggtcgagctggcctatctacgattaacaaaaaatagacattaacgactatacaaggtaataaaaatatatactaagtgttgagatacgcgacatactaggtcaacaattgaaattagtcctaactactggtactttaaaggcgtaaaaccatttagatttccaatctgccatattagaaatcgtaccttctaccccattaatctcagagttggcccatttgctaaaaacagtaaaaatcattatcgtggccaacattctttatgtcgtagaaataactaaagtcctccatcgtttgttcacctcggacatactccatatacatcgcataaaaccctagaattatgcgatagcaattcgaagttaattggaagggggagacatcgtaatgtctgaggacagcttttacaaacagatgaaaaggtagagttaccccacatcaaagaatgggtatcgagaccaccacatcttgcgtcgggataatttcagggttggtaaatggaaggtgaggccgatgagatgttgaaagacgtaaagtccctattcgaaccaaattcaactttgtaaatgtatgcaggtcagatttagtgacttgcgagaccagattctcgcatgaaaatggttcgttcagttgagtgttgtcaactgaacccatctcacttccctcagcatctccgtcctcctcagactcgtgatcaggtacctcgaactcatctcccatttcttcaacttcgatgtcaggggcatgtctcgagtgaacgagatactcctaagctgacaccgtggattggctatcgcaaatttcaacagttactagttcagcgagttcctgaaccattctatctatctcgtcagtagatagcgagccctagcgagctctggcagcaggggcctcctccttagagattgaggtgggtatgaagttgtccctcttctctagctcgtcagcgaaagtccccacctccagagttgagcatttggctatccaataggtcactcatttgaaaaatagaagatcttatcagtgtagtgatagtgcgagaataacaaagtcgcccccacccacataaaattcagaaaattgtaaaggattggccagacatctcaaaaaatggaatgggtgtatctcaataacataatgatcatgacgctacatggaaattaaggtaatgagacacacccaccatttcaa

SEQ ID NO: 265217 - DNA, 484 bp, Cannabis indica
aattatagtatttttaaaatgtgttatactattaaagtgtttagaagtaaaggtgtcaaaaataacgaaagataaaataaaatattatatcttggatgatgtggatatatatagcacttttaaaaagtactactattacagatgctctataattatgagtatcgtcctacaaagattattacgaaatactaataattatttttctactttttatttggcaaataaaaattgtggtgtgactgtatttgagtaatcactaatgagagccctagagtttggaaaggtagtactgcttcagtgcttcatattctttctatttgtttataatagtcaggcccggccctgggcgtaggcgggctaggcctgtgcctagggcccacctagcctagggacccaaatttttttttcacttttaaaattatacaatttttttactgattttgagaaataccatattttttttaatataagggccccaaatttt

SEQ ID NO: 265218 - DNA, 1125 bp, Cannabis indica
atttgtttatcatattatatattatctaattttgttttcttattctacgttttagtattttactttctatgtgttatattttgttgtacttttattttctttctagagcttatgtatatatgtctactactttttacactttatattaatatagttctctatcatgaaaaatcttgcaaaactcaactttgtcgaacttaattgatatttttgaaagaaattatttatcataaattcttgatgttgaaattcatttagatgctatgagtattggaaacatcgtcaaagattaaaatactaaaaaaaagtgtctttcgaatgaatcacttccaaggatctacttcgggtccacctctaggtttctctaatccctcttttgctaacttacatctctatggtcaaggtaatatgagcatgtatagaggtagtagacttccctcagcacctacaaacaataaaaaacaatgtcatttgtgcttaaaaataggacatactattcaatctcgtttgtataaatttaacaagacttttaaaagtttagcaagaaatccacaagtataagatgtttctatttaataatgctgctactcagactaacttggttgctatgggacaaggaactaatgaaaaatattggtatctagattctagagctaccaaccattgtcaatttcaccagttatgatggccaagagagaatgtatgttagagatggctcaagtttttctattactcagtcaatctcaattctcaaccaattatattgatagacctcttgtcctaaataactattttaccagttatgatgaccaagagagaatatatgttagagatggctcaagtttttctattactcagtttatctcaattctcagccagttatatatattgatagactcttgtcctaaataaccttttacatgtgccataaataataaaaaatatgctaaatagtttctaaatttgatcttgataataatgtttactttcaattttatcatgacatgtgactatattaaggacgagttgaatacattttgatgggtggtacagaaaaaccatatacttttgactagtcttaactcaagcttttatgtgaagctactccaaagacacaagtgaaca

SEQ ID NO: 265219 - DNA, 3253 bp, Cannabis indica
gttccatcaggattctctttcttgcgataaacccacttacaaccaatggcctctctcccttcaggtaacacaacatatgtccatgttttatttttctttaaagccaccatttcatcagacatagcaccattccattgagcactttgcaaagcttgtttgacacttgttggctctttggtagccaaataaactttcattttccttataccagacttggcacgagtctgcatagaatgagtattttgagaggctgctgtgttgttgttaggatcaggtatattagaggcagcagtagcagatgtgggttctgctcttggaggcacaacagcagtgtcagaagcagaccgattagtggctgagcagacattaggctcctgtgttggtgctgatgaagtgtctgcagtagcaaatattggttcagcatcagtaaccgagcgaggaacagctgttgttgttggtggagacacagtaggaatggtgggaacctgcaaaggcatgtaagagctgcatagaaaatcattagtgacagagccatgatcagtgggagatgcatctgttgactgggaagctggagtagacacagtaggaatggtagcagagggatagaaggatgacataacatcagatgttataggagtgtgattttgggaagcatggggaaaagtgcactcatcaaagataacatccctcgaaatataaactctacccgatgcatctaaacatttatatcccttatgatttaagctataaccaatgaaggtacacggagaggacctaaattggagcttatgtttattgtagggtctaatgtttggatagcaagagcatccaaatgtcttaaaactattgtaatcgggttttacattgaagagtgcttctatgggagatttatgcataaggacaggtgtaggcaatcggttatgaatataaacagctgtcctaaatgcttcatcccaaaactttaagggcatggatgcttgagcaaggaaagtgaggccattttcaacaatgtgcctatgtttgcgctcagctaagccattttgttcatgagtggtgggacacgggtgcctatggacaataccagcttcttgtagtgtattagtgaatgacctatactctcccccccaatctgtttgaagcacctttatcttagtgccaagttgtaattcagattcagctttaaagtgttgaaaggtttttaaggcttcatctttggttttaagcatatagatccatgtaaatcttgaatatgcatcaacaaagtggacatagtacttataaccattgactgaaggagtaaaagagggtccccatagatctgaaacaacaagctcaagaggcttagtatatgtagtagcagaagttttggaaagggaaatttatgaattttgcccaaacaacaagctgaacaaatggaattagaacttttattaatacttggcagattacatgcattaagcacagacttgactatcctttcagaaggatggccaagtcgattgtgccaaatatcaaaggaagacatacaaggctgtgtttttatgaaagtggaatcagtacactgaggtgaaatagaagccgaagcagtcaagatttgtggctgaacttgtgactgatgtgaaggagtggaaaacacagcaggagtggaaggagagggactgagatgcacctcggatgagtcaaaggaatacaggccattccggtacgtcccagtcaagagcacctgatgatggacctgatctttgacataacacacatcagggtgaaactcaaaaaacacatggttatctctagcaaatttggatacactaagtaaattcttagttaaagcaggaacatggagcaaattatttaacaaaagaggagaagagttggaggaattagaaatgaaagaatggccaatatgattgatggacaaacctgtaccatccccaacaaacagctgttctgggccctcatagactgtgcaagaagcaagattctgagcatcaggggtgcaatgattcgtggcaccagaatctgggtaccaattggtgtcattctgattcatagtatgcagcaggtgagcttggggagatgtagtgttgtttggtgacaccccggtgaaactcttatcgaatctgtagaagcaatctaccactgtgtgaccaactttatgacagagttggcattggggacgacctgaagaagaaccaaccctgcctccacgattattaccccctcggttagattgagggaattgagaaggattatattggggcagattgtagttgaatcccctgggagtaaacatatttggaaaatatggagtgcctctgggagtggaattgcttcttgaaccagagaaatggggaacataagatccaaattgcatattacttcttggagaaaaaccaggaggaaaacttggtctcgatcgattctgataggccatatttgcttctggttgttgtggatcagcatcagtgacagcaaggttgacattaaggtcaggttcttggtcagtcttctcaatcctggactctgaggcaagaagcagagcttcaatttcccccacagtgtatccctcaatgcgagtattagtcgaaatgacaaacgtgtcataggcacttggaagccccttgaagatcgcagcaatgtgatcccgatcactgagaatttcaccaacagaggcaagaagatcgacgtgttgcttgactttaagtaagtaatcattgagagattgagtacctttccttagattttgcaatttggttctgaactcaagaatcttggatgacacttgcaacgtgaagtgtttttccaaggtagaccaaatctgtctagctgtatggcaccccaccattcgagtaagcaggctttcggacatcgacgaaaggatccaagaaaccagtagctgatcctgaacatcccagtcaagaaactcaggattatacgttttggaggcacgatctgcatcacttaagaattgtggaggtggagcgacatcttcgatgaacttcaataggcgatttccacgaatagcagcaagaacctgctgtttccaaagcaagaaattgtgatcgttaagctttacagaaagattgtgagaaaaatagacaggggagaactcatctgaagctcggtttcgatttctttgaggtgcaggatacgaattcgtagtgtttcccaggttcgattgatttgcttgattctgagttccaacagtcgccatgttagcactcaacggaggaaaatcaagctctgataccat

SEQ ID NO: 265220 - DNA, 3229 bp, Cannabis indica
acaagaatacaacaacaatatagtaattaaccacctaaaatattacataacccaggttggtattcaacaaaattcatccatacacatctcacattctctgtacatatatttgtatgtatagaaactttaattaacactacttcctctcaacaaaatcataactaatataaaacactcaagtgtgtgtatttacacatacacatacaaaccacatattgatgatcatcaataacatcgtcaccgtcatcatatatatatatatataatgatgaagaacaataattttaattaaattttttatttggtgtttattattgtaattttggcagtgtcaatgacaatgatgatttgcagcgttatggcagagagggtggtttaatagacagtaaagaaattgggaatggtttatttttagggaaaagatttaggattttttaatatctaaaatcgggccgggccgtgagcccaataaaaactcgaatcaaccggactaaagttgtcctgccgggccggaggcccggcccacccccgcgaaaaaagcccaaattgccattcttatataaaaccaagtcctagtcctacaactttttctcacaccctatctctcaacaatggaaaacactttcctgatcagactttatacataaaaactttgggtgaacttcaatatcttacattgactcagccaaatgtagtatttattatcaataaactaagtcgattcatccatactccaactcatttatattagcatgcctataaatgttttattcaaatatcttaaaggcactattcatgacggcttgtttattagacccacagctaaattttgtcttcaagcatacttagatgctcattgggcgagttgtccacaggtggctatgttgtgttcttgggaggaaatcttatatcatggtcaataaagaagcaacaagtggttgtacattctaacacagaaagtgaatttcgtgacttagccaacattgtcgttgaagtgaaatagttgtcatctatgttgagagaactataaattactctaccagcacctcccatcatataggttgacaatcaaggagtagcctctttagtagcgaattcggcctttcatgcaagatcgaaacaaatagaaattgatctccactttattcgagatcaaattttggcaaaagaagtaaaaattcgatatgttccttgaattgatcaagttgttgacattctagcaaaggccttaacaactaatcagtttttgtatcttgtagtcaagttaaaaatatgctcatcactcttaagcttgagggggtgataactaataaacattttgtattttcagtttattagttagttgttaaaattattttttagttgtcaggtttgtcacttactctctattttacaagttggtaaattatgctacaagttgtaatacagtcaagattctttgtactcatcactatataaatatattttttagcttaagaactcgtaagcttttgcagttctttgagattcattctctgaattgtaaaaattgtatagataaattattctcatagcaaataaaaattattttaaataaaaactcaacatgggaatattaagaaaatacatatttaaaaataaaacatgcaagtaaatatatatacttatatacagtaggtggtagagaatgtgccaaaaaattaatgaattaatcatatttcttatttttatcagttagatttaaataaggacagataaaatatttaattaaattagtagattaaatgcaaaaaaattaaaattctaatcaaagttactaaaaatatgtacatattaataacaaaactagtaaaataacatactattattagtgcattccaatatcaactcctacaaatttaaatttaatgaataatttaaaaaactgttaactaattattgggtaccatatcagtatagtattaagcaccttaatgtgtcacataacaataatagcacaaaaaattatttattaaaaaaaaaaaaatagtataaagatcattcataaaaagtaaaattaaaaaaaaaaagaaaaaaaattactaactaattattgcgtaccacaccgatatagcattaagtacagtaagagtactaataacaagtacaaaaaatcattttaagaaaataaaattaacaaaaaacaaaaaaaaacataaaagaaaaaaaatagtaaatagtacaaagattatttataaaaattattaactaattagtaattatttatcaaaaataatagtaaatagtacaaagattatccatacaaatggaaaaacacaaaagataaaaaaaaattacaaacttattattgagtaccattctaatatgacattaagcacattaaaagtaccaatacctagtaaaaaaattatttactaaaaaaatagaatcaaaaactaatttaaaaaagcaacaaaaaaatggtaccacaccgatatggcattaagcacattatcgatatagtattaagcacattaagagtaccaataataagcacaatgtaatgaccacatagttaaatcataggaattagtaaataattaagaggtttaattattattatgtattttgtgcctcttagtagaaattagggtttattgtcagaaataggccttgggaaaatattttctcaaatacggagatatatttgaatgctagatgcattatatatgccatatgtgaattttttataaatttttatgtttttcttcacaaacaactggaattctggttggttcaaggctgtaccaaccggaatttcggttggattgtatcgggttaaagaccaattttagtattttggctataacttttcactcgggtatccgttttagacgttctatataccgttttaaagcttatgacgagctctacgatttggtatataaattagtgccaaattacgtattttattttagggtgtctccaccacatagtttagtagaaaaatcctaagttcctttcagacattagaaaagtgtgctagagtacacacttatcagttgtacgtatgttgtgacttaggagcctgtaaatcgtcaagcagcagtttccacttagagttactgatatacttgcattcagaatcaaggtaagattagtataataattgcatatatgtatacatgtttagcatacatgttagttgccgtcagaataacatatcagggtatcagtgaggtgtacatagagttgcaccgagataccaata

SEQ ID NO: 265221 - DNA, 805 bp, Cannabis indica
tcaaccctaaccctattgaagatagtataaaaggaaggctatggtctcattatccaactaatgcctccaaagctaaaaaccttgtttctctctaggttgatgagacctcttccttttttcttcttcttcaattcgaaacaccatagcctcttcttcacaaaccaaaatttagccattagtgattgagtacatgcgcacacataagaagttggtcctcaatcatagtatgtaagactgtgaagaatccaaacacaaggaaggagtttcaggctcagatcttggtgatactctgttacacaaagaaaaccagggttcgagatatgagcggaaagagtcattgaatttcgctgcaaccactgtaagatttctcaaactttatatgtgtttagattacattatttttagaaattcatatttaggatgttaaataacatacatggtagtcaatctagatcctggtaaaacatattccaacacgtagtgtgtatcaaaggctacaattccagaaatggacatatccaatggatgccaattttggtttttagaaattgttatggcagcttaaagtaccatcgaaggttaaggagtttatgtagaaggtggtggggggtcgccttccattgagggtgagtatgagtacaaaacatgtccctttacaagtagtttattctatttatgagatatttgcaaaatctgacgctcattgtcttatctcttatgattttgcttaggagtgttgcaaaaggttaggtgtggagaggtaaaaagggatgtggggtcagttttggattggttggaagaggta

SEQ ID NO: 265222 - DNA, 2016 bp, Cannabis indica
tacattatttcccacttgaaatccatagagattcttccaccacatgttattcctcctccaaatttagttgatatggcatctttgcctttgtcaatcttgttatgtttcaatgctgttagttttgtaaaaagtcatagctatcttaaacatccattgcttgagaaagaagaagaaatcccttgtctagatggagattatgctgcttattctaatgctgggatttggagcaaagccactttccaatggctgaatccacttttcaaaacgggtagaactcataagattgagttgtctcatattccttgtatttcagaatcagaaaaggcagagcatgcttccttgttgctagaagaatcacttaggaaacaaaaatttgaagacccttctttggccaaagccatactacgtgctatttggaactcattagccataaatgctgtctttgcaggtaaagctaatcaatatattccttgctgattgagttccatttgtgtctaatctatgttctaatgatgttgctaaacttggtttttctttttttgcaggactaaatacagcagcatcctatactggtccttttctaataacaaattttgtaaactatttgttggaaaagcaagatgattccagcattcgttatggactaattctggctttcatcttcttctttgcaaaaacaatggagtcattaactcaaagacaatggtattttggtgctcatcgaattggtgttagagtgagagctgcacttacagttcttatatataaaaagtccatatcaatcaagttctccggtccaagcaatggtaagatggtgaatttaatcaatgttgatgtagaaagaattggagactgctgttggtacatccatggagtttggttgcttccacttcaggtgtttttggcactagtcatcctttactggaatcttggtgctgctccctctgctgcagctcttctagccacagttatggttatggtatgcaatacccctttggccaatatgcaagaaaatcttcattctaagataatggaagctaaggattcaagaattaaggtgacttcagagactttaaagagcatgagagttttgaagctccactcatgggaaccaacattcctgaagaaaatccttgagcttaggaaaaatgagagaagctggcttaagaggtacctctatacttgctcagcagtggcttttctcttctgggcttctccaactttagtttctgttgtgacttttagtgtttgcattgctttaaacataccattaactgctggtaaagttttatcagctttggctacatttaggattctacaagagcctatctacaatctacctgagttcatttccatggtggctcaaacaaaggtatctctagatagaatttatgagttcataagagaagattggaagcagcaacatatatctaatcaaccttcaaatgcaacaaatgtagtaatagagattgagaaaggagaatacacttgggaaacaggtgaacaaatttcaaggaaacccaccattaaaataactgataaattgaagtttttgaaaggttggaaggttgctgtttgtggatcagttgggtctgggaaatcaagcctgctttgcagcatgcttggtgagattcctaagatatctgggtcaggtttcaaggttcatggttccaaggcatttgttccacaaagtgcctggattcaaacaggtaccataagggaaaatgttttgtttggcaagaaaatggataaggattattatgagcgtgttttggaagcttgtgcattggaccgtgatatcaagatgtgggcaggtggtgatttaactgtggttggagaaagagggatgaacttgagtggaggacaaaagcagagaattcaactggctagagctgtttatagtgattcagatgtttatttactggatgatccttttagtgctgttgatgcacatacaggaacccatctcttcaaggtaagacaattatctaaattgtttgtttccttatatatata

SEQ ID NO: 265223 - DNA, 655 bp, Cannabis indica
gggttgaatgttgagtttcagggaaataatcttgcctgagtttgctgtgtaatgcgtagaatctctcttatttgtgccctggttgtttctctttattgcctcttctccttggaaacgtctcctctgttgaaatagcgcttttagggcataggatgattcttctttccttggcattttttttttcactgtcactgcctttgggattttttcacccgatgcttgttaaagggagtcttttgggtttccttatttgacaagcatccggagggggcctctatccagcagttaagggacccccattccctttttaaatattagggtttggtttggggcctaactgctagatttcttcttcttacagaaaaatgtctgcccctgcctccgggactaaaccttctaagaagggggcgaacaccatggctaccttggaggaggtcatgaaaggacctgttgcccaagaaaactatacttctcgcaccaatggctgggaagcagatgagctccattctactttggtttgcgctcatcagctcgagaagattgtgacggtggtgggcgtcaagtcgtctgcgtctggggtcgtgcaccgcttgcctcgggacgaagagacgcccaaccacaactacgggtggttcggagcttggagccaaaccca

SEQ ID NO: 265224 - DNA, 807 bp, Cannabis indica
gttaaatttttatttatttttatttaatcttcaaattaattataatcattgataatctaatgattaaaagaaaatgagcattgttataaggcaccagtgatacctagtaccttctcgacatgtcgcgttgcgattggctagcgatactctctaaaagctattatattaaattatatggggtccgatacttagttggaccaatagagatattgacacgtaggagggtgctaggcaccactaatgtcctttagcatttctcaaagaaaatataactataatagttacatattaaatataaccattaatttttttttttccatatatattatatttatagagatcgatacactatttggtttggttggagagataacctccaataaatgttattgaatttaattggagggagtgggccatgaacgttgatatgttctgaagactttcaatgttaacactttgaactttttcagaaagcaatggctcaagaaaaaagtaaatctcactatagtataccaatgagaaataggaaaaggtattagtgatgctaacactttgtaacgtccccgcttcaagcctctattgggcccttacacctacggaatgaatggctcttatacacgagtatgtcactctggctgcttccagaattgatgactgaccctacagaccaacacgagtatttccagcgtgctttgtcctcactcacacgcttcctagaaaaacttcccaggaggtcacccatcctgaaattgccccaagtcaagcacgcttaactgtggagttctttcgagatgggctaccaaaaac

SEQ ID NO: 265225 - DNA, 1618 bp, Cannabis indica
cgcctaagatagttagggtgttacatacttcttctccaagctcatagccctataatagtgatgcagtgttcactgggcaaagggtcggtacaaaaacattctggtaaagagagatattatctaagaattcatattcagagttactgttgtaagagctataagaaaaggaatctttctccttgttcttgagttaatacaaataatgaggattaggttattatcgaactgctcggggctgaacctctataaaattcctgtgtctttatattgttttactatatatcaatcgttataaactacttatcgcttactaaataagactcactgtcgttggctaaaagcgaggtcaacattttggtgctttcattgagggcagaatcaagaatcgctcttcattcaaaatctaaccacaagtacgatgatggtacagactcgtaggggcctggttgattcggcaaatccacaggcggtggatcctgcattgcagaacccaggaaacgcaaaggttccgccagcagttaatcttgaacagccgttgaacgtaggtcatggtgtgacgactcctgtagatgaaatcgcgcctgctgtgcaagagattgggaataccagttcagcacccagccagggcattcataacaaaatcgttccgcctactaccaatattttaacgaccattagagatgatactgagatccaaaaccttcacgctgctcttagactcatgcaaggtcataccaacaccctacatcatgatcaggaggagctccgcgctgtggtaaatctcgcgtttgaggaacaaagacgcatgttttctgagtggagagacaaagagatggaagcgttaagggctcatcataatgagatagaaaatcatactcggcaagccattgtgctgatacgaaaagcctaccaaactgtcggacagcaaccatcgaatgtcatcccccttgggtgagacagataaagatccagcgatgaatacttcccaaactacaaatggtcaaccgccaaatccccggtcacaagttccgcctatgggccaagcagtaagtgggcagaccttgtctagtaattcatcaggagaagtcataaatgataattccaaccaggttaatgtgttggaaattattttaccaggatcttagatctactcacaagtatgtttattaacatcctaaataagaactttctaaaacgataaattaaacacatataaagtttaagaaaccttacattgggtgcagcggaattaaatgactccttccgttcagatctctaacccttgtatcctttctgtagcagagtattatcaagatctgaacctggatctctttctctgaatccttgatgctgaatctcctttgctgatgatctttcttcacgatcttcctcactatgattgaggtattgcttgatgtgtgtgggcactactctaatcactaaggtaggtcgaaattatcaaggaagaagagagagagagggtggcggccaaggtagagagagaggctcaggtttttctgaatcagaagtgtaattttcctgaagccttcactatctatttatagcattccactagggttaggtttgaattatttggcattaaaataatgaaaatatc

SEQ ID NO: 265226 - DNA, 1421 bp, Cannabis indica
ttgacttttaccttaggccaacaatgtcgtggtgttatcttagtacctgagtcctgctaactttcaagtcaataaccacttttaacaaaatgaaaaccatgctcctcaaaacgccgaacattcttcaagtgaaaagaggcgatgaacaagagagttatcccaactactattagaattacaaagagctgagaccaaggcattttcatcaagcaaacccggttgagtcacaatgaggcccaaattcaaaggaatccatttatctttataaactgagatagaattttcattatccacacgcaaaataacaccaaagtcatgagctccttacccccaaagaatatttttccaaacataagatcatttttttttgttgagattacatccccaaaatctttgtggcgatgatagaatcctttaatgacacgagcagcaagagagttgggaaagttgtaaaggcgaccaacttgcttggctaataaaaacttggttagaaaggtggagattgcgaaggctcatataccaacataattctttgggtttacaaagttggttccaagtacaccaatatagtttattttttacacctttaccatcccaccaaaacctatcacacatactatgaatgtcgttaaaaaagttcatgggaagcttgaaaaaattcatagtataagttgagatggattggataacaatttcaatcaaaactttcctaccatccatagagaataatttagacttccaattgttaagtcgtttccaaattatatcacgagctgaattaaaaatgtcacttcttttataacccacaaaattaagaattcaaataattttcatgacaattgacctcagccactctaagagtagccatcatatcaccacattctcccatatacatatatattaggactgaaacaaactgctgatttatcaaaatttaccaattgaccaaaagttttaccatactaagtgagcaaccttttaaatcggtaacaatgagcaagagaagcacgaaggaagaaaagtttcgttagcaaataggaaatgagagatgttgggacttgatattccacaaggcatatcgctgagaatattattagagcaatctttttttaccaaagcagagagcccctcaatacaaagaagaaaaagataggaagagagcagatatccttgtcttaacctctttgaggagtatctcaatattggagtattctatttcataattaatttattagcgctagtttggcagaattgtgctgttggaaaaagcagttgtagctgtgctgtggaaaaaaatattatagcagaactgtggcaaaaagctaaactgagtgtttgtaaattataaattttaaagtactacgaattgttaaaatatgttatataaaattttaattttgtatatatttttaatttttttt

SEQ ID NO: 265227 - DNA, 1118 bp, Cannabis indica
agaaaagatattatctagaccaaaaacatcaaataaataaatttagtaacttcataaataaacgttaaaatgacaattttaaaattctgtcatataaattaatactatagtaaaatttttaaaaaagagaattgtaataaaacttatcttttgaagtccttgcatcttgaccaagtgagtaaaataaaaatatacttatataaaatatataaaatttaattagcacactacttaatggtaatattaaaatgagaatttttatttaaacaaaaaatattctaaaattttatattatgaagaaaaaaattatctttaccaactggagaatagatcatgtgtcactgctacttaacgacattcttaggataaacacaaaacaaccaccaccgaaaattgataccaaacaaagcacactggacacataatactacacttacaataaaagtcacaacttacacacaaataaatcctttaattctatggaatacaatatttttcaatagatattaaaaagtaaaaataaataatcaattaattttttaaataaaatacaaaaattaattgtgttaatgcaaattttcgttagctatatttgagcctaaatggtgatagatttgcacagaaaacaaaagtagtaaaagaaagatatgaacacaaatgtttttacgtagttttgtagttaaaattctgcatagtccacgagtaaatcttattagatttctgatacagctcttaggccctttctctaatgattttttcaacccccttttcagtgtaacatgcccctatttataattacatagtagggtagttttatacagttgactgatatcttacatcaattatcccctaaaatcgtggagtttgattacatactatgtataataaatgtggttaatatttgaaaatcacacaactgtaatgggtttgcttttatagggtcaatataaatgtgtattaaatacgttgtaactgtatcgttctaggacatatcactgggaacatagcaacaataaccttggtagcgagctggagcttttcccatgtctttccgaggttgataatataagcctcgtcgtttctccacttgaagacataatactgttggaaattatttt

SEQ ID NO: 265228 - DNA, 515 bp, Cannabis indica
tggtccaaaattaaaataaataattttcaactttaatctatttttcaaataaaattcgaaattttatgcatttaagaaatgcaatttcgaaataaaatgattaataaaataaaaataaaatatattttgaaaattattcaaatttaagttgttctgaaaattaaaatttccaacttaaaataattttctatttaattaaatatcctgaaaataataatatttaagtatcaagaatgaaatcaacttaaatatttaattttcaatttaattaaatgtattaaatacaagaattaaataatcaagtataaaagaaacttaattattaattctaatttaatactaggaaaaatattctataattaagttggtccaaaattaattaaaataaataattaattttcaacttaaaatattttcctatttaaatattagaaaaaataactagtactagaaataactatctagaatatatttcaattaactaagtgtttttctaaaattaacttaaaatatta

SEQ ID NO: 265229 - DNA, 720 bp, Cannabis indica
tgtcttcgtgttgttagtagctgttgtaaacatgatcttgtgttacttgccataaacacaagtctcacagaatggtgatgcacatgtctaaatcttttcaatgactcccttcttgtgtgattccctcatgccttgttcactcatatgtccaatcctttgatgccatagttgcatatcactttctaaaccttttagtgtatttgcctcgaccacaagtacaatttcaccctcgagtacatacaacccatgtactctctttcctttcatcacaaacattgaaccttttgtgatccttaggctcccattcaagaacttatagccataaccttcatcttccaaggttaaaactttaatatacttttattaagtaattatcattaattaaaatacataatttattttttatatataatttaaaatattttaaacatccgccgcaaagcatgaagtgtttactagttatataataaataatttatatatattttttggactttgtgttttgtgcgattattcatttaaattttgtattttaaaaaattaatttttacaactactttataaaatatgttaagactattagagttgatttcctacgaaaatatttaacttattttatcgatttttttgggctgatgaacttgttagatttcattatatttatatatactagtgggaggcacacgtgctctgcacgtgtattcaacatgattttttatt

SEQ ID NO: 265230 - DNA, 2067 bp, Cannabis indica
gtttctgactaagctttagatttgatttttatatttttcataataattatattctagcttttaaagagtttctatttggttgacagattttctccatttataacagatatactatttactactgtactgtaatttgatgtaaatcatatataaaaaaagtatcattatattatattatttaaaagggataactttttatctgccacacaacattaagagtcgtgttttataaaaatatatgtagagtatgattaattaattaactactcgcactagccatataatcaaatcaactttagatatggtattattgaaagttgggtgttgaggtttaagttaaagataatatggataatttggaacatttattttcttcatgtattgattttgccacaaactaaaaatgttctattaaggggaccatttgtcaataacagaagaggattttagtcacttaatataggagcatatatatgtagtataatagaccaaacacctggccttttgtttttttatagatattgcactagtggaaaattatatacatatagctgattcaaagtgcactaaattaaaactacttttaattcacctcgagaataagagggtttatggtgtatagaaaatttgtgatattttctcataaaggagagggtacctaccaacgtacatgtatagagacagaacgattcttttataacaatgaaagctttaccatataattggttgtttaataagctaatatttggtacaatgtagcttaagaattagacacctcattattcttgtttgttattactattaataattatgtgtaatgtaccataaagcaaaaagaaaataataataataataaacagatgatgaaatggaaagttaaggaggtgggagagaacatattcttgacgtggtttattgttgaacaatctgatcatatatatatgagaaaaaacatggtgcatataacatatgtgtctttataatctgcttattaattagtattttctttcttttttttcttttaagaatcaaaaggtaacacttcttccggtccacttgagaaacaaataagcaaacgtaataaaatgtgtttgatgatcataatcaggacacatatgcaggttctcttgtgaagtgacaccattactacataaacatgtggcatattaatgtttgtcttgtcccaatctcagacaacgtacacccatcccatgctcttcttatcaatatatatataaattaatgagtggcattaggataagaatttttatttatcaatactattacaatgaataataataccatatatattatatctatttgttgtgagtatctctcatcaagtttcactttttccttttagtattagaatcatataaacatttttgtatatatcactagctaataattaaaccaagaattaagtgaaaaaaaaataaaacaataataaatgtatatatagctttaatgtggcggggggcatgatttggatatactaagtagatgaataaaagccattatggagagttggaatttttttttatttactaattacctagtcctatttatgggtctcctttattttcaaacaaaattaattaagttatatatatataatagatagataatgacttgttattcaaaattaagataaaaccaccgtccaaaatctaattcatggtggggagttgttgaaattaatcacgatggagaactaattagataagcatatatgactacaacttgcaattgcttgtataaaaggcaaatcttatctatcatgatttatattatttgttagtggtctaccggacacatatttatatatactagattaatactacgtcaaatatatttatacttagatttatttttaattttattttaattatatattttagttgtatattaattttttacattaaatatttaaaaggactaaaacgtaaaataattctaaatttaaaactaaattagtaatatcgtttttaaaaaattaaaaaataacgaaatataataaattagctaataaaaatataaaaataatgtttactacatatacttttt

SEQ ID NO: 265231 - DNA, 509 bp, Cannabis indica
aatttaattatttgtttacgtataaccaagaactgtttggttaaatttataaattgtattgattaaattttattttagagtacaaaatatgcataatttaaaaatatgaggtaccaattaaatattattgaaaatatagggtactaaatatgtttttcataaaaacacaaagtactacatgagtataatttttttttttactgtatatatgtttttttttattggaaatctatttccttttataggcagtattattatattgaaatgggcatgtccttgtgattaaacaagacaaattcaacctgattaaaggaccaaaccaacaagtataataacagaaaagcaagagaacacaaaatttatctcggttcacccttgaaatcaaggcctaatctaacttttcccacaagaagtttctccactatgatcaatgagattacaagctccaactgagttgtgtacactactgagatacaagaaaaagaacgactctttaacacgtacaataa

SEQ ID NO: 265232 - DNA, 1194 bp, Cannabis indica
gctctgattccccttaatatttgtggccgaggtatgggtctcaggagtagggcgcatggtcagggtgatgctaacccgccataagctgcccaagaatgggaaaacaggtttgcagaaatgcaagctagaataatgaacaagaggaagtgattcggcagttaagacaccagggtgctcccgtagtcccttctctagaaataccagtagctcctgcccctcctatgcaagccgaagctgttgttgcaatgaaccagatggaaccccagtatgaaaggtttcgcaagcaggcacctccagttttcctgggaggtctcgatgttatgaaagtcgagcaatggctaactattatcaccaggatcttgaactttatgggcgtcactggtaatgatagaattgcctgtgccactttccaatttcaagaagacgctggtggggcatggtgtccatgattcatgacgttaccacaatgacttgggagaaactccaggagctgtttaatgccaagtactataacgaggcagtcagaagtgccaaaagaaaagatttactcaactgactcagaaagagaacaagagtattactgaatacacgactcagtttgatcgcttgtcaaggttggcctcgggaattgtgccaaccgattacagtaagaaagagaagtacctggacgggttaaatgcaaaaatcagagatgacctaatgattactactgatgacaacactacctatgctgatatggtggataaggcattacgagctgacggtgaagtgaagtgccctttagaatctcgagggactctggtggttggcggggctcctacccttcctacatcaggctttagtaggggaggtagtggctcgacctcttattagaaaggaaaggcacctactgcatccagtggctcaggtaagaataagaggttctgagggaaccagggtcgaggcaatcggcagggtagttttgagacccgatacacttacccagagtgccacagttgtaaaaggcaccatctgggggtgtttccgagtgcagtatgtcagggcattataaaacggggattgtccccaactcaagaatgaagcacaacactgcagcgaaacccacttcagcaagggtgtttgtgataactcaggctgatgcagaagccagcctcccagtagtacaggtcagctcttggccaacaactcttattt

SEQ ID NO: 265233 - DNA, 1121 bp, Cannabis indica
gtcacagaatgagtctgtgtgtgtgggatggggaggacctgcttttatattattacctatataaatagttttgtcatcattctctttatggcaatatcattcattatttttatatacatatatcaaaatatcaataccaataataatcaaccatgtatatatatagcatgttcacccacttattattacctcatctttgagtttactacttatatgccacacacatatatctcccatttttcagaagctttttacaaagtttagagacgatattgcaacaagagccaattggtcaaagttttatctactattacttttgttgttgatttatttgtctatgactctctccctttttgatttttaattactaatcatatgtacatatgtatgtatattaaataatctaataaagttgttagaagtattataagatgtatttggaaagtaattaattatgcagtgattagaattaagtgtaattcaaaatacaaagtaaatttggtgtatttatttagccaaataattaatctgtgtaaccataaaattagacataaacaatattataattaaatatatttttatctcaacaaagtactaactctactataactaaactaatatttctttttaactaaaagtagttgaagtgatggcacttccaaatattttggtccaatattgtttatttaggttggataatcttcaatttgaaatgaatcatcataatgttgttctctgattaaagatattgttatattgtcacatatttaccatgtaattatgagttgatataagatcattttagaaattttaatttctttggattcttataattttagccaataaagataagaatgaatatttttttgttatacatattttagatagcttgtactatatatacaccctatttactactgtaccaattcattcaaaaatcaatacatcaatacacattctattttctctgttctttttctcgctattttcctttttaatttggtatcagagccgatggcttccacagcttcaaaggagactcctcagtcaataatgacaaaccttaagccattgatgcttctctcctagcttcggtccaagttgtgcctattcctacctct

SEQ ID NO: 265234 - DNA, 961 bp, Cannabis indica
tgcccatatctagtttaaccgtctttggtatatcttcttcccggattctgagttgatgataaccggatcgtaggtcaatcttcgaaaatacagtctttccttgaagctaatcaaacaaatcatcgattctgggtaatgggtacttgttcttaattgtcaacttgtttagttccagatagtcaatacaaattctgggggaaccatctttctttttcataaacagaaccagagctccccagggcgatacactaggtcgggtaaacccaatatcaagcatcccctgaagctgttgcttaagctccttgagttctgttggagccattctatatggagctttagaagcaggttcgactctaggtgccaaatcaatcacaaaatcaatttctcgctgcagcggtaatcctgcaaactcctcgggaaacctgtcgagaaagtctttaactactctgactacctcaggcccaaatgttttgggtctgctggagtctatcaccactgctaaaaattctacacatccactatgtaatagatccctagccattagcatagaaataatcgggatctgaggcccctgaactgatccaacataaataaatggatcttcaccttctggctgaaaaagtcaccattttccgcttacaatctatactggctaaatacttggacaaaaaatccatcccaagtatgatgtcaaactctattaattcaagttatataaggtcagcactcaacacaaataatactgtataagaggagttgttgacaggaagctgacctatcaccatagaaggactggctacagcatcagcttgggtgatagaaaacacccgagcaggtacaagttttgcctttgacttcagctctctttctatgcctaagggcaatctttcttgatatgcccaaccatgccacacagaaaagcatgtcttccggttgcactcttccggatgatatttcttac

SEQ ID NO: 265235 - DNA, 621 bp, Cannabis indica
cccttatacttcatgttcattaaagaaccaagaagtgttgtcatttcaaccttatcgtttttagcaaaacgttcctcaatttgttcaagaaattcttagccatagtaaccccttcggattctgtgccccaaaaggcttctggaatgctgtgtttcataatcattagactcatgcgatttgaacgatcccacctctcaaattcccttttatcatcatgggaactttccttagtgagaggtgcaggttgttcattccttagtgcatggtctaaatccatacatcccagaactataagtaagttccttttccaatccttgaaattggtcccattaagcataggaatagaattaatgttagcagatattgaggcagcagaagatgaactagctgaatatagaacaaataaaacaagctcacattaatatgcataattaaacaataaattcaaaaattggttaatcccatctcaagataccaaacacacattaatatcaagtctttggacagtaatattaactgtaagcggtactcttggtgtagcaatcaaatattgacaataaaactgtgccaaacaataggtcaatctttgggttaacgtattgctcacacaaaataccttat

SEQ ID NO: 265236 - DNA, 840 bp, Cannabis indica
taaacagttaaacttttaagccatgaaatgaaagccccatatattgacgtacgtgagttgactaatttcgtcaactactacttggccaacattgtttatggaaaatttataaaaatactgtaatttagattaatttttacaaaaatactgtcatacgaaaaaaatttcaaaaatactgtgtttttataaaacaccattaaaacacaaagcagaataactcaaaacaacagtagaacaactacaaacaccagtagaacaccagtgaaaacttaacacagtatacagcagtatgaaacttataaaaaaacacagtaaaaaagtaaaaaataccgcctggtagtatttttaaaaaaaattaacaaaattagtattccatataaatttcccttgttcattgtacataaataacttgtttacttactctatatgatgatatacgtacatgtttttgtatgtaatattcacttattatacttggatcaatttcaactgaatttatctgacccaaaaaaaaaactgaatttaatattattacctgtgtcaataagtccaacgatgacgtcatcggacaaatgtttatgtgaagcccatgttgattgcctagcggctttgccttccaagaaatcccacgatcgtgttgtgtggagttgaagcattgtgtcagggaataccgatacaacttcactatcacctgttttaccaatccaaatatccaatctattttaattttaaataataacaataataataaccaaaactcaaattaataaaataaatatgattgtatacatacatatgaatatgtattatgtaatacaagataattctatgatacacaca

SEQ ID NO: 265237 - DNA, 899 bp, Cannabis indica
aaataaaaaaaattaacaaataccttttacacacaccttaaatccacgatccgtgcttcttgggattgaaaccttcggtcaatcacccagcaaccttcgtctgattgtgtgtgtaagtgatagtgtaagagatattttggtaattaaaagcacataaaattataaatgttgtcctcatcttattaaggtattttataaataaagtgtcaacttatttttatgcaataattcctaaaattaaaaatatccatctacaaaagaatatttacaatataaatctatacacttatatatcatatgtttttttaacaaattaaatactttaagttaaatttttgctactttcatcactaccagttggttaaaatctattcaaacaaaatagtatttgtggtataaatacttaatgtttttgatttcatatacttatatagcacatattttttttggcgaattaaatacttaaagttacatatacattaattttagcactaccactctattaaattttattaaaacatactaaattgacacgtgtcaatatattaatgatccacttatatttttaataaaaacctattaaatatttctaaaattaaaaaaataactaaataacaataaaattataataggacaattactaagagaagaaaaaagaaataggaagaaaagtgcttttgttagtttctattatttttattaattaaataaatattatttcattttttattgataatatgagtagattattaatacattaacatgcatcttttaatagaatttaacaaactaacagtgacaaaaataaagtaaatgtaaaattatatatttaatctgcagaaaatagaaaatacaatgtatataggagttgtttaacttcataacttaaaaactgtttt

SEQ ID NO: 265238 - DNA, 1125 bp, Cannabis indica
tattgatatttaaaagataaagattacattgaaatagagttttatttagggcatgaaacccaacacttataacttgccaactagattcatcccatgggtgatgatttgtgttagagctactacctattccattatgatgaatggcagagttcaaggatgctttaaaggagaaaagggactctggcaaggtgatcctctcgcccctctattatttgtcttaattatgaatatctcacaagaagattgttgttggatgctaataactctgcttataggtaccacccaatgtgcaaaggtttaaaaatcataagtatttattttgctgatgatcttatgttgtttagcaaaggcaataaagattctgttcaagtgcttaaggaaactcttgatgatttcagtgctacaagagggctctttatcaactccaacaaatcccaaatctatttgggagggtttggaggtgatgagaaatagttgatcctaagagagatggctgtaatggagggaaatttccatcttaagtacttgggagttcctttaaggcctactaagtggaaagtttaagattgtggacttatcataaagaagattaaacagagacttttcacttgggcctgcagacacctttcttttgtaggtagagctcaactgattcattcagtattacttggacttcgtaattactggatgagtatgttcattatcccacacgtgttacaaaggagattgaaaaactatgcagaggatttctttggggtttaaataggaacagaagaaagatccatgtgggttttggtcaccttcacgttggcttctccttgaacgtgttgaccgtgtagatcgggttgttcgtgagttgggaggcctccgtgagcccactggctctttttcagcacgatgagtagtctcttcagggtgattaatatcgttttccccgttgtcagccatggagaaaaaatttccttttggttaggagagattttttctgagcttttttcacataggctctcaatgaaagcagcaaattgttaacgtagatttacattaacgataatcagactatttttgtgataggtttagcacagaaattgtagaaaattaaagaaacaaaaataacaccaagtt

SEQ ID NO: 265239 - DNA, 2659 bp, Cannabis indica
tgggtcctttaagaacatgggtgcgagtaagctaagaccaagattcagagcaatgagtcatggcattggcagcagtaaagttgatttgaaattgggtccttcttctgttggggaaaggctttatcttggaatggattttggaacatctggtgcaagatttgctctcattgataaacaaggcacaattcatgctgagggaaagagagagtaccctctctatatggtaacagtaacactctcactctcatctcaaaagtatgaatttattttaagctcaaatcattatttgagtttagtatgaaattgagcttcttttgtgatttggggtgcctttaataattgaaattgagtgtaattaggagtaattatgaaatttgatgtgtttattaactttataagaacaagaaattgagtatttttagataattaatgttatttttccatttaattactaatcattttataataacaaagcatgaattttgagttttgaaatgaacacgagatgtcattatatgaattgtttcattttgccaaacatgaaaacaaaatttcaagttaataatgactgaatttgtttttgcaaaggattacatattaaaagttcaaaattgcttttgctataatgactgagtctataacaacactgaataatttgagggccacatttccattgactagaaagagtgaagaaacaatggattgggcactgtcatggaaaacaactctctttttgttgctagaagatgttccctctcatcttcgcgaaactatagctgccatttccattgatgggacttctgcaactactcttattatagacaggtaaatatgtcttaatagataatgacatgttcaattattcatgtcaagattgcatttaagtttgaaaaccgaaattcgatgctgcagcaatacaggagaaccattatggagaccttttctctacaatgagagctgccctgatgctttacctacagttaagtctattgccccggaaaatcataccgtttgctcgagttcctctactttgtgcaagcttgtttcttggtgggagagagaagctggttcgaacaaaaaatctgcagttttgttacatcaagcagattggttgctgtggcttctccatggaaaaatgggagtgtctgactacaataatgctctaaaggtaatcttatacaagtcatttgcattttacttaattttcagttcattaaatttcaatgttgtctgtttcgtaggtcggatatgatcccgagcttgatgcttatccatcatggttgttatctcagccttattctaaacttctaccttcagttaaagctcctggaacttcaattggtcatttgaaagaagaaattatatcacaatttggtatgtttcattagatcagtataacaattatacagatgagtattttagtatagagttttaacacaatgttcttgtataaattatctttgcaggctttgcaaaagattgttctgtatgtgcaggcactactgatagtatagcggccttccttgctgctcgagccacggaaccagggaaagctgtgagaattttcttcaatttgcatcctttagaattcgtaatcattgtaaccaaatggatttttatggtgaagagtatgctcctaattaaaatgtttcaagttcttatataggtaacttcattggggtcaacacttgcaataaaattaatgagtactacaagggttgatgatgcgcgttttggggtgtatagtcatcgtctagacgataagtggctcgttggaggtgcttcgaatactggtggagctgttcttagacaacttttcagtgatgagcaattggtgaaacttagtgagaaaattaatcccatggaatcctctcctctagactactatcctcttaaaacagctggtgagagatttcccgtggcagatccaaaaatggctcctaggtaagcaaagcatgtatgctattgaattttttacttttttcgtcgtactaaattttttcaattgctgctttcattctttcttgttcaggctacatcctcgaccagaaagcgatgttgaattcttgcacgggattcttgaatccattgcgcgaatagaggtatgtgtaaaagttattaaacataaagataagaaaaaacttgaccctgattttgttttgttatgctattttaggccaaagcatacaatttgctgaaggatttaggagcaagtaaggtagatgaagtgttcacagcaggtggtggttcgaaaaatgagaaatggactaagataagagaaagagtgcttggtttgcctgtgaatcgagcaactcaaactgaagctgcctatggagctgcattattggcattgaagggctcatttagatcttcagattcactttgacttggttaatgggattttgatggcttactttgattatgcctttgaagtgtcagtattcacctgcttttaataattgattatctttcttacgaggaaaaaaaaattgagacttttggttttagttcaagttccctatggtctacttagaaaaccatataatagtcccacattggttacaaactaagaagagctcttaaacacagctataaaatgagagttcctattgttgttcaattcatacctttctcggccttttggctaagatcaagtgta

SEQ ID NO: 265240 - DNA, 554 bp, Cannabis indica
atttatattttttttaaaataatatggtgtatttatccttttatgaggtacaaattgtactcttcttttcttttttacgatttttttttttgtatttctttgtttaccgttgtagaatggattatgcaccttttttttattagaaaattacatattatacatgttgacttcgctttttgccaacgacaatgagtctattttataagtgataaacgatatgtagtaacaaatatatgataaagcaataataagacacaagaattttatagaggttcagccccgagcagttcagtaatagtctaatcctcattgtttgtattgacttaagatcaaggagaaagattccttttcttatggctcttacaacagtatctctgaatatataattcttagataatagtatagtcttagcttagctgcttttcaaccgatcctctgcctagtgaatatacatcactatttatagggctaggaagcttgaggaggaagagtttcctctctcgttacaatgcgcataaacagaaagatgtgggatcaatgctgaatgcaaggat

SEQ ID NO: 265241 - DNA, 845 bp, Cannabis indica
gcaaattgccaacttcagcatctgtcaataaaatatagatagctttcatatacaaactccaaatgagggtattctagatgcgttggaaagctaaaaaagagatttaaaacttctatgctttgacttttcccaaaatctaaacataacatagttgaattaaggcttgaagtttcagctttattttttggcaaaattttctctattctatagattgttgtttttttgaaatttgatcaatttgtacaatccaagtgtcaaaacctggaaccaaagaaaacgagcataattctattccaaaaataataacaaagaagacaaacaactataaaaagtgacccaaaatgtaggctaaaagtaacctaacaacatgaccctattagaaagggtaagatgcatgatcatcagctctgggttgcccaagaatttcgtgtggttactgcttgctacttgatcaacagatgcccctcatctgctatcaagtttaaaaccccccatggaagcttggataggacacaatgcaacctatggtcacttgagggtatttggatgtgtggcctatgctcatgttaagcaagataaacttgaagctagagctagaaagtgcatcttcattggatatccaaatggtgtaaaggggtacaaactttagatcattgaacttgggaatcaccagaagtattttgtcaccagagatgtagtgtttgaagataacagaatgtacaaggatacactgcaatctactactagttcaataagagaaagaactaaggatgttcagttttaggtggagtcaccagtaagaacacaccatatcacacttgctacaacagaagaacaagaagcaa

SEQ ID NO: 265242 - DNA, 3203 bp, Cannabis indica
tgcaactcagaatgattaaatgacaattgtgtaataccatttttggttcaaattctactaattgaagtagttttctaattactttcataatttagagttaccatagttagtacttaatttccttattgtttctattaatagtgctggaaaagtatgcattgactcctattcacaacaattaaacattgtgtatttgataaaattctattttgagattctgtcaaagaaaaaaaaaaaaaataactaacattgaggtattaataaattctgttgataagttatgagcctaaaaatagttttgtttttgttttgctcaagtatctttagtttttttttttttttttgggggcagggaggggagaacaaattttcagtatatgttcactctaggcctggttttctattcaacaaggcgaccactagatcggcatattttctgaatcgtcaagttaatgatagtatacaggtgctgttcttgacctgaattctcaaattctaaacttctgtctgttatttgtacatgaattcgttagttttgttcatttcttatacagttatactgtaatgtataacattgtgcattttgactaaaaaagaaaagtagcctaagtatgaagcaaagtattctcataaaaacttgggtttagatttttcttttctttcttcttcttggcagtacaatagttttcgtttcctgtatttttcattccaggtagattggggagaagcaactatgatcgaggcagagcgtatattacttaaacatgcacttaaagatactgacaacaaacggtttgtttttctttcagacaggtgagattgtctatatagtggatccttgaattgtactttgtgtctttttgctgttgcttacaagtaatctcaattttaatttatatatacacaaacactaattattacaaaaattccgtatatgtttccgttcgggtgtgattttcttaacaacatttcagtttcttcatctctttgcagctgcatccctcttcacaacttcagctatatatatgattatatcatgtcaacatcaaccagttttgttgacaggtgagtgagttgacttatattacactggtagatttctgtcatcatggataaacaattgattgtcccctgtaaattttctttggggttttttgtggattggattccttatgttttttctagagaaaatgtttttagtacacaggtgggtgtttatgtcttctaaatgtcagtgttgggctgatatgctgttcactgttagcaaatatgtgataggttctgtttaacccttggtttttgttgttattaacaatccgtttttggaatagttttactgatacaaaggagggtcgctacaatcccaaaatggatcctgttattcctgttcataactggaggaagggatctcaggtagaattcaactttgttaaatataaaataccactatatctttggcaaaaaggcttaaaaaatgaatgaaatgtttggcctctcctaattcctaatgtgatgcgcctaatgattatctggttcttatttgttgcattccctttctgcagtgggttgttttgaccaggaaacatgcagaggttgtggtaaaagatgatgttgtcttccctatatttcaattgcattgcaaggtatgttttctttgatttacattggataatagtcttttgaaacaatacagtgagctattttgttggctttgaaacgtgacttaaatcttgtaaacctagtgaaagtaggattgaatcacgcacccttcttatgaaacaaagtgaatttaccaagtaaactagatgatgctcttgcattatgaaattcctttaaacaatagaagagccacccaacctgttctacttgttaaaaaaggcacccttatgggatcttctgacagtagacatattttagttatctagaataattaaatttacattgttttggaaaaatgttaaccttcaattactaagggtgcacttggaaagtcaccctgtaactgaaattgagagtaattcgaaggaattattaggtttgacgtgtttgtttaactagattattacacagtaatctgtgaggtaattaagagtttccaaataccattctgattccccatttcccatagcctcatgagaatgtgtaattaccaaatattaacatttttttttgaaaataataattacactgttaattttatgtgtaattacttattcttttgtcaaacatgaaaataagaaattatatgttattaacttattactatttgacatgtatttactatgatgtgcaattactatccgtttaatgacacgctggtaatcacatagaaacttccaaaacacccctaagaggattgagttacttaacatgcatctcttttaacttcaccattccagagacaagttcaaacttctgtacaatcttactctattatttttaagattgttctgtatgtgaaagcttcagaggttcttctactcttattttacatgttctatgtgtcaaaactatgcagaggaagtcactgcctgaattttggcgggatcgcccccttgtaagcactctttatgtttggtaaccttatttcattaccttctgaagtgtcacaaaaatttggttaggcacttttaaactattttcaatatcatattagctacgtaagaagcacttgtattttcaaattattattattttttttaagaaatgtgataaaagttttgtaagtttaattataagaagatttatgtcatttgcagccagctgatggatccaaggaacataattgtatacccgatgaacattatgttcagacattactagctgtaagttattattctacctcaacttgtgagccttatcataatataatcctttcagagagtcagtttaatgctccatctctcatctatttttcttttctgtttaatataataaatgtctactgtcgttatgtccttaaagatttaagaagcctctggtttcaaattgcagcaagaaggccatgaagctgaattaacgcgaagatcactgactcattcgtcatgggatctatcatcctctaaagaccgtgaacgtcggggatggcaccctgttacttacaaatattcagatgctactccggagcttatacaatcaataaaggtatgccaatgcactgctaaatagtggaacaatcgattttttgaacttgagtatttatg

SEQ ID NO: 265243 - DNA, 706 bp, Cannabis indica
taacttaaataattaaaataatttcaacaaaactccttataatttaaaattataaaaggtattacacacataactttaataaataataaatagtatgaatgacctctaattagaggtaattttacgctcaatcttattctttaacacctttacgtgccaatttagtgtgtcagtctaagattagttcaagttatttagttttttttttcttttacgaaatgaaaaattaagtaaaaaaatgtaataacaactataaaattaatgattattaactatttttgctcctcgttgaaatcatcttcatcaatcgaaatattgtaaaaaaataatcaaagtagattaccaattaattaaaattgttacttctttttcacaaataagcataacagtagaaaaatagcaagcaaattattaaaaatcaaggagaaatctaattgtagttggttgaatagagaaatgggtttgtgacagagatgtaggagattgtatcgaagtggaaaattcacataatgttatgttggaacaaattgaaatcctagttttaattttttttataaaggaggaagatcggtcatgcggttgttgcaaaataataattagatgtaatttttaaaaattaatttaagtattaaaaatattattttaggaggggtggaagtctaaattttgtaaaaaaattgaactttattgtaaatattatagttaa

SEQ ID NO: 265244 - DNA, 1378 bp, Cannabis indica
taatcgtattgctcatggcttagttagagtctcatggttacatgctgatcgtagctactcgacgacttctatgccgagtattcttgatgtaattgctcaagagatgatttaataaatttacatcttttattacaaaaaaaaaaaaaaagaaatatgacacgataaactttttaacaatatatacatattgatactttataattggtagcgatttttcatattatttattaaatctaaatatattagacccgatattaaaatgtataaataagaatatactatttcttgtggtacttggtatctcaagatgttctttattatttctcaaacagaaatggtattactttctagagaaaaataaataatacgaaataataattaatgtgtcatatatatatatgagacaacttataattagtttctctgtttataagctagcaaattggcaagtaggtagttgattaattaatatcttcatctaggataaatagatcaaagaagaaaaaaaaattacaagagtagaagtaaataagtgtttgtaatttactttttatgatatgggatgatgggagtcaaataataaacacacatctttcttctttttcttgttggtaaagcattttgaacgaagatagagagttaagagagaagaaattaaaaagtaaaatcaaaacataccctttatgttttcctttgcggcgaatgacatagtaacgattggaagagaggggttgaccaagcactggaacaaagaggacagaatcataataggtgacgctgctttctccactgtgtcttgtataagtaacagttagatctttgttttgaggaaaaggcagggccttgattgacctttgtttacacaaaccgaaacaagttgtggtttcacattcttcgtcaaacataaccaaataaccagaattcggaccctcttcgggtactgaattcagtagctcaggagaccttctaagtaaagacagaggccttgtcacgtacatgattctctcttgacttagaaataaaatcttccttttactctactctttctcttatgtatgttaatgttatgataagtttttcacacacataaaaactctagaggtttagagaagaaagaagaaatttagagttgaacttggtaggaaggatcataaaagtcagcccaagtttgagatagatacatgtacgtggcttccttaacagtattactaagcctaaactataatatatatttatactaatgctaatctggtacgagttcgttagctcagctttgtttttcgtttgtttttaattacaagtaaaattaataaatttaaaatgatcaagaacacctgagtggctgactcttcatacttcataggataattggcgggtc

SEQ ID NO: 265245 - DNA, 779 bp, Cannabis indica
cccatgacttctcccttttctcatccctctctcaccattaagttagccttagtagctttatctcggctttatctcttcaattttcagttataaactaatcaattcataatcaagaaagcaaacgaaaaacaaaatttatctaaaatttacatgaatgaaaaatattaaatttattattttcattttgactgttgcacactaatttgataaataaaataaaatttgggtgcaccgttttgtcattttaagactgttaggtgaattaaataaaattatttacttccttttgaaaaaaaattatcgcaagtgataagtgagcctaatgtcttgtagtattaacaatcactaaagtagattagttttttttttatctttttcgatactttattcttctacttactttttttttttttttaaaatttcctttttcctacttgattgtggtttgtggggcttaagaaatctcaaatgtttgttaccttttatttattctattttttatttctattttattttaatttgaatttatcatataattaagaattttctacttcattgctgaaacaaattagagtagggcagaacatttatacccaagagtcgatttcagctttggaagctgagttcaaggcgatccaccttgctctaacatgggcagtggagctagggtggcatgaagtgcatgtcttctctgatgcaaaagttgcagttcagtctctaaatgcaaggaaagggacacttgactggaaggtatctagtattttttattctgttgttaa

SEQ ID NO: 265246 - DNA, 871 bp, Cannabis indica
tcccttgcattaaaaatcatgcgacaagggtattactggccaaccttgcgacaggatgctttcgcttttgcgaagaaatgcgacaagtgtcagcgaatagccacatatacccaccaacctccgagtaacctacattctatcacaagtccatggcctttcgcagtatgggggatcgacttaataggcgagctacccaaaggaaaaggtggagtcaaatatgcagtagtcgcagtagactattttacaaaatgggccgaagccaaagcactcgcaaccattacagcgactaagttgcgcgagtttgtctacaactccataatttgtcgatttggtatcccttacaaactcatctcagacaatggaaagcagttcgattgtaaagagatgcgacaattatgtgacgatctgggaattaagaaagcattctccgcagttgcttacccacaaagcaacggacagactgaagctgttaacaaaataataaagcacaccatcaaagggaaactcgaagaacgtaaggggacctggccagacgagctctcacaagttctttggtcttacaatacaactcctcgatccacgactggtgaaacacccttctcgctttcctatgggtgcgaggccatggtaccagtcgagattggggcaggttccctacgaagagatgttttcaacatctcgcaaaatgaagaaaaacagtcactctaccttgatcttctggaagaaaaacgcgatcaggcgtacttaaaaaatgcggcttaccagcggcgaaccgcaagatacttcaattccaaggtcaaggcaaaagtcctgcgaacaggagacttggtccttcgaagagtaatgccaaataccaagaacccagcgcatg

SEQ ID NO: 265247 - DNA, 524 bp, Cannabis indica
agacaatataaccttaaataggtagaaaaaacgaaaaataatacttggagtgaacaacgagtagaagttgagagggtgctaattacatcctagctatcggaggtctagatctccttctgcccaaaatcatagcaatgattcgtctccacctgagtatggcatctggaattaaatgcttgaaaagattagggagaagaggatagccaaaggatttttgtaagagtaataaatggggttctcggttttgataatgaataagctgcattaaatatttgtaatgattatggggaaacattaaatgggagagcattaattgagaagtgagaggaggaaagaggaagaagaaaactgttgggcaccacacgggtaaggcgaagactggatagaccagagaagaaggaaaaaaccctagaaagttccagagcagacttcttttatttggtaaagtagaataagattaaaaaaatgtaaaaataacaaagcaccaaaaaactaatttatgtttggcattataactaaaaatt

SEQ ID NO: 265248 - DNA, 618 bp, Cannabis indica
cataatattccgctgcaccaatgtaaggttttcttaaactctattgtgtttatttcattgttttagaattcatattaggatgttaatcaaatatacttggtagtaaatctagatcctggtaaaataattccaacagctggtatcagagccatggtaatgatttactttcatgtaatatgaattaaaacgatgttttacatgttttgtgttgatttggatggtttcatgttggtttatgtgcttatgtgataaaagtttgtgttgtacgaatttttttccttgaaaaatattttttctatttttgaaaatattttatttggatttcttgtgaaaaattaagaaattttgttttttgcggaactcgattccgataaaaattgaaaaagttaagaatttttgaaatttgagtgccatggctgtcgagtgggtgcatcgagtgcaccaggcactcggacgagccaggcagacgcgtgcgcccatcaccctgcagctgaccgagcattctcggtcagggaccctgcaaacgccgacgtttctcggcgcctcactccttgtccgcgcgcataggaggctgcattctcccaagcgcgattttttgggatttttccccaaaaatcc

SEQ ID NO: 265249 - DNA, 513 bp, Cannabis indica
tttttttgggcccttgggcgaggtggtccctaggcacaggcctagcccgcttatacctagggccaggcctggtttttagatggaaccccatgattctcaacctaatatcagagccatattcctaacgggctttcgatccacacctatcaaagagttagccagccgcaagcgagcaaaattgtactcccaaccgcgaataataataagcgagcaaatggaaatcccagccacaaaaacaaacaaaaataagtgagtaaataacattacttatgataaggtaatacaagattggctagcaaaaatagctatcatcttgagggggaatattagacaatattgtcctacatggatcaaatgtaaaaatattgagtcatatataagaacatgagctactccactcatcaccaattaattttaagatagaaccccatgattctcaacagatataataattgtacagagaccaaaaataaattgattcaatattttttaattagcacaattaaaatattt

SEQ ID NO: 265250 - DNA, 591 bp, Cannabis indica
taaaaaaacctttgggtatgtccccatatcgattggtgtatgggaaggcttgtcacttgccggtagagttgtaacacaaagccttttgggctataaagaagctgaattttgatctccatgctactggagaagctcgaatgttgcaattaaatgagcttgaagagatgaggtttttctcctacaaaaatgctaagttgtacaaggagaaaaccaagagatggcatgacaagaagattcaacacaaagtatttaaagaggggcagcaagttctgttttcaattcaaggctgaagttgtttccgggaaagttaaagtctcgttggtcaggaccattcaccatcgtcaaggtgtacccttttggagctgtggatgtcaagaatgaacagtccagaaggatattcaaagtgaatgggcagcgactaaaaacctatatcgaaggggaggttgatcgagcaaagacctccatcactttggaagatgcttgaggaagaatgactttgggttgccatgactttagtgaatcacatttgggcaacccgaaagtggagaaataagactatatttagttatatatatgttatgtaataagttt

SEQ ID NO: 265251 - DNA, 789 bp, Cannabis indica
ttccgtaaaatcccaattatgcaatactcttgctggtaaaaccgcagtttcatttgtatggcaaaatgagcaaaataattgactggtgtattcacagagtctaggtttcccccatccaaatgtctgtgcaaagtctcggataagtgtctttccatcatcaaaatgtttgtagcacccagcacaagtataatgctgtgcttctagcatctgcttcatagatttgtatggttggatttcaacaataagtgctatcgtcttccctaatgtggagatgttttctctatttcctgtagagttagactgaggagccatcatatgtgatccaggggaactgggaactgaatcttgaggacacaaaaaccaaatcaacgcgcttggagatgtattaaaaaacttcggatgaataatagaatgcaaacattcctgaatgagaatactcctctctgaaactacatcgggagatgcatttccaaaaatctttcttgattccttctcaacagaggcccagatagaaggtagaatccaaccctggctagcgcataatgttttcagccggcgatacagggtaaagaaatctcgatatctccgttcgacctcccattgatccttgccactcaatactcttattttatatacagtgtattctttcactccaactagtctttcactaaatgaaacatcccctttcttttgccttgcacctaccacttcaatctcatcaattctcagtggctgctgaatgaatgggtgagcatcctccttgccagaagtggaagcagaggatccacc

SEQ ID NO: 265252 - DNA, 1540 bp, Cannabis indica
actatttttcaaaattcatgcctcaaattaaggcttttcattgcagatggacagcttcaaaaaaatcagcatttaacactcttgacaaaaaagtgggagaaatcatatctcctacatagtgacgctacaatttgacaactaatgatgcaatacattaaagggctcgtcataaatgacacatctgctggaaaatttttagaagaaaatactataagctctcggaccatgagatgtcccgaaagcttgggggtaaatgttatccgcgttttcaccagcacgacacatggacaatatttaaggaaaagcgagaaatcattaaagctgcccaagggcctcactccgtgcccccagaggattaaggctctagcgttgtcgaccagacctcccaggccttcgcaagagagattcccctgaatgcgagcttcgagaaagatgtccgtgaattagcagcttttcccttctaggagactggacctttgctctcgcggaggacatggaccttccaccagaatacactagtttagggtacgcctttgacccgtggagactctcccccacgcgtgtcaggctacagacccaatggtagagcttttgtatgtacgatgtcaaagattctctctcaggccatgctacctggcaaagcatgcgtgtccttatgtaccgtgcaagatgatccaacaactaggaataagggtacttcaaataagaacagccctggagcgacacacgcccaaagcaccgtcagtacagtcagtaccaatctaactatggggcttcatccttatgaagttccatcaatgacgatatttgcgagggaattgacctataaaaaccctcaaagacacacaaggcaggggatccgatccgaacctcgacttcctctcctttaactcacctttcgactctccaccttaagatcgaagacaaatcctttgtaaacacattactttaaccttactattaactccaaaatattcctactaagcttcctcttcttcaagaggaacatggtagatcggagtaaagtccattctttttgtatttgtatcaacattcaccggtctaagagcctaataaaatggactcatgaattaaggataattaacgtctaaatcacgtaaaaaatctattatctatattcttgccatttgtgtttttattacttttttaagctcaataattatttggttgccaaaaaattcagcaaacattattattattgatttcaatatgctttactactcataataaaaaatttaatataaagcataatatacgtgtgcatagtatgtaacgatagggtaatatatatatatgattgactaataattagatagagtgttgttatcctgtacttgaatattaatttggctttggaccaaattataattattcaatcaaatggatgaggacttgccctgtccatatatatcttttcatttaatttgattagagaccacatgaagttattataagttattaatttgaatgagatatttcaccaaacaaatctctaataactgtattttataatagctaa

SEQ ID NO: 265253 - DNA, 1669 bp, Cannabis indica
cgattggtaacgtaacatatcgtaaaagtgctagacaccttgcgcctaatagcagattaatcctaaacatgaatttgcataaagtaaaagactttttgaatcgagagaaaacacaacattattgaccatatttacattgtagagatatttttcttggaagcaatgactttgattgaacatcataagaatccatacaaatgatatttattgagttcatcccaattaccaattgcttgaataagacccaatgagaatgccaaacactgcctaatggtcaaaagtgatgacaagtgttgtttcaagaaaacttaatttgattttgacatttttctttatttttttgtgttgagtaccatgtatataatttttgcacctaaaacttaaaatcatacatggcactaacttctattggccacgtggcctttttggagctgtatatggcactaactcttcagttagccacgtggcatttttggagctgtatatgacactacctcttgagttggccacgtggatgattttcgtaaacttggattttacttaaaacaaaatgaatatacacagactacactaatcaaccacaagattaccctcaccaatttaataaatttttttttggaattaatgataatggaatagaatgaaaataatttttcttttgttatgtttttattttttttcaactaaatattatttaatgaaatatttattatatgagtttgagttagagaaaatagaggttgaagggagtagactttaagagaatataaagagattaacattactactattttagtttaaaaaataagactcacttacaaacataaattttttagtcattaaaatttaatttagatttaatatttttatttctatcaaatctaaacctcatattaaacacattattaatctaaaaagtatcaacatttacataagaatataaatttttaaaaatatatatatatatatatattacatattaaaaaactatataatattaaaaaaaaattatttttttttaaatacatatataaatattgtggccgatcctaatgatgtggcacataataagctttatttagatataaataattagtcattttgtataatatttaatccattttgtcaagttttgtttcataaaaacaattattaacattgttacagaaattgaataaatatgtagcaagcattgtgcagtgattgaaaaatctatttttttattttttttttagtttgtatggtgacagtttatataacttatataaagtatagttatggattcttatatcataagttattactttatatttggcaattaaaaagtatataaaactgaaaaaacaattatatatgtgaagaaatatataagagtagtgcaagttttagtctaatcattataccaattaatatgaatttaactagtactttgtcaattttaaagtaaaagattttgaacaaaaataaaaataaaataagtaaaagttctaaaaagataaagtaatagaatttcaaggatggagtattggattactccaaagattttagtaaaccaacataaaaaatattgagaaatttttttcccaaaagaaaaaaaaaggaaaagtgaaaagtggataaattgttcctttgcttgcagaagaaaacaacataaataaaataaaagcct

SEQ ID NO: 265254 - DNA, 843 bp, Cannabis indica
ttcaaataattttatttattatttttcatataaattttctaaaaaaaaattaacaataataaataattataaagagtaaaatatacatatatataggaatgtcaattgggcatggtcaggctcaacccggcattaacacagtctgactacgatatctcttttaccattcctatatatatacttgtcacaacaaataattgcaaatttgataataatttttcaagaatcaataatttaaacaacaataaaaactctttaacacataatagtataatccaaatattgattaaaattttaaattctaaaagtttgcatagtatcgagtttataatccaaaatactcacaacatacataatttatgttattgcttcactaaattaacatgaagactaaatatcatactacaatacaacataattttgtgaaattggattatgatatttcatatcagacttgttgaaaagacccaggaaccaactaaaaacatgtgttttatattaatgaaaatagcattgtccctgtttttcacaagcaacaatcataggatgttcagaattttatctgagaatcttcttataattttgagccttgtgaaaagtatattcaagtttgacatttttccttcactcattaagaaaatgacactgaagtcatattagttatctgggttaaactcatcaacataatatgaatcttgattttgatatccatatcaatttcaagaaatgtaacactatgtaacatatcctagctagtgatagggaagaggttgaaactattaatattatagaataattttttttacgataagtgcaagaaagagagagagagaaaacaaaaat

SEQ ID NO: 265255 - DNA, 1650 bp, Cannabis indica
ggaaaataatatttcaaatgcttctagaagccatgatgaagttagtgagcagcatattcattcacaagaagaattttcagctaatgaggtgaataaagtctctgatcatctggaagctattgatataacaggaaatgctcaagagaatacaggttaatactgctctcaattctgctcaaaagtacagtttcacttcaggaacttcttttctttcctcaaaacataataatatatgcatgcatctgtttgtatagatttatatacaaatctaggtgtgtgcatgttgttaatttgtgtgtaccattatatttgtgaagagcgtaacctggaggatgccacttctgtaactatcattgtcattgtgcagatggtgctactaaagatccagtaacgaataaaaatcccctgcaaagaaagaaaaagtctggtcctgaagctataattgtaccattagtattgaagatggctgaatttgaccataaggtggttcctctatcacttcattatttttttcaacgacttgttctttgcatatacttttgttacatgtgcattctatatctttgtaacaccaattaggtaatcatgtgagttcttaccctggttccttcagattcttttttcaagtgtcatgttcatgcttgagtttacataaggtaggaaggagagtatttagtactaatccacattaattttgcttttggatgttttttatgttttccaactcgtaaaatggtcttagaagcttgtttatcacttgattctctttatcaaccaatgtagagccagactgctttgaaacttctcaaatattgtgaaaaaactagagacacggacacctagtcagctgaggaatcttaggtcactatagaggaattcagtcaactactgatggatcttatgacactgttgaaggatccagtcagctacagagtacagatgagattgatttaggctatgtttggaagttggattttggtgaggaaagaaaatagtaggaaaaaaaagtggaaaataaaattaataaattctcatatttgatatggaaagaaaaattatatagaaaaacactcaggtgatgtttggtttactgtaatagtaatcataatagtaatgaataggttcattacattgtttgcttttccattttaacttttgtaatccattacaatgtaacggttattacattgagtaatgtaatgatgattacgtaccaaaaccaatgtaatcctcattacaattacacaattacaaaagaaaaataatatttagtagaaaaagtcaaaaagtctaaattgccctttttttagtattttataattataaagtaaaaacaatagggttattttggtcaatacaaattttattccattacattctcataccaaaccaaacacaataattctgattacaatattcattccaactacaaaccaaacattgtaatcaatattcttattccttttcattaccattactattactattaccatcccattacaccaaaccaaaacaccactcaattcaacaaaattttccatatcaaacttgaaaaaattgatttatttttttgttctacactttatttcctacattttccctaccctttttttccctcgccaaaatccaacttccaaacatagccttaat

SEQ ID NO: 265256 - DNA, 595 bp, Cannabis indica
aattttatggcagtcgtatacttctcctctagttcactgtttggaattgattaatgaattgaaacaagcaacaaatgccaaggtctataatagaatcttttataaaaacaagtgagaatgtaaatctcctttgttattgattcttagttcaaaatgaacttcttagcaatgaatattcttttatatctttatgtttctcaatgttgcctaatgaatattattggtgaaaaaacctatgcttaattaatgttctccaccccattaggcaactttactaaagataaactttattgctctttaagatattcatttcttcattcatggcatattgtactacaacttcaattctttatcattctataatttaatttgtgtctcaaattaatattgtagttgaactcttattgtacaaaatgtaatcactagaaaacattgatcttactgttctaataagtcatcttaaggatggaccaacaaactcttaaaagagcaaatggttcaatagcatgttattttagaaattgtaagcaattactaaataacataacttattagaattttaccaatgacttgtatattattaatgattagttat

SEQ ID NO: 265257 - DNA, 1436 bp, Cannabis indica
gtacaattttagtaatcaagttcctaaatatactatacaaaaaacttagtgactctttataatggacaatgaaaagtaaaacttagattttttactactattactgtctcaacacatataatatattaatctgagatatattttagatacacaaatagtaacaataaatgacatcaaaaaataaatcttagatccaacaaacaataatagctacaataatactcatcagatctgagacgagctgccacagcaccactaccaccaccacacgtccaagaagaaatacaaaatcagagagagaggttgagtgatagagagaagcattttttcgaaagagagagagagagggaagggaaagagagatcaaaagagagtgagtgagagaggaaagagcttaccgtggtcgagcagggtaagctttagtgcgaacgatgaaggggcctaattcgaatggcggcaagtgactagaggagatgtgaacgacgaggatcgctaatagaggtgtgaacgatgggggtggctggtgtagtgcgaatgatgtgggtaaattgtggaggtgcttacaatagtggctggtgcaaaagacagggctggcaggtggagctacatggtgagacatattgatagagatagaaaataaagagtttgagaagagagaaagagacataatcatgtgtgagtgagtgtatgtgtgttactgactatataagatatatagtgtattgaatattatacttagttatgggattagtgggacacttagcacaaattaatatggctatatgattatttatacattttatgctatatagaccctattttcataaaaatatatgttatggttattgtttctcgattccagagattttatataattataggtgtgatatgcatgttatatgtgaatttttatattttcacatatttctgcccgagaagagtggaaatgggtcggatggaaaatttagtcacatgaatacaaatttgtatcaagtattgttatacccgaaattcggtaagtacatcagaggaagttacgtgtcgagctaggaagaacgaagaacttaaacacgtaaacgaaaagtacacttagcatggaacgactcattaaaaatataattcccagggtatgtttataactcggctggctgccttctgtgagacacaaacgtacgaactgctaacttatgtattaatgagaaatcatgtcggtgcacgtgtgcatgacgaggcctcaagctcgttgcgtggatgagaaatgataacactaaaaaaacttagcgtatattatacgatatagaaactgagtattgatagtatggcgagtcaagataccagacagtgaggcgtttttcttgctagaagaaaatatgcatgcgaggaagatcatctcaacagcagaatagttatcacagttaaaacagtattagtctcga

SEQ ID NO: 265258 - DNA, 693 bp, Cannabis indica
gcggagacgcgatacccggtaatcgaaaaactagttttctgcctcctgatggcctcgagaaagttgagaccgtacttccaagctcacccgatcaaggtactaaccaaccacccactccgacaagtcttacaaaagccagaggcatccgaaaggctcctcaaatggacaatggagttaagccaatttgatctacactacattttgcgcacttccataaaagggcaggcgctaccagacttcatcacggagtgcaatgaagctgacgctaccgcaaacattcccacaccactagtcccgacgtggaaggtattcgtagatggcgcctccaacgagaacgaattcggagcaggggttgcaatgatatccccaaacagacttcggctccaagcagccctacggttcgaattctcagcttctaacaatgaggcctaatacgaagcccttatagcagggctgagattagtaaaaaccgtatgggctaaaagagtagaagtctacagcgattcgcaactggtagtaaaccaggtgtcgggagaatgccagacgcgtggagaaaaaatggccgcatatgtggcgatagtccgggaactgctccacgagttcgcagactataaagtagaaagaatccccagggaaaagaatgctcacgtgggctgtctggctaaattagcttcagacagcgaaattgagaaa

SEQ ID NO: 265259 - DNA, 1805 bp, Cannabis indica
tcctttttattaaggttatagatattaatattgtcgtgtatgtatatatatagatacacgtaacatattaagctaaagattattggaagaaagaaaaaaaaacacaaaattcaaaattaaaatctaaaataatttagtgatgataatcttcctaatcttttattaattagatttgagggactaaaattaaactataaattttttcagagagaaaatcgaagttaaaaattgtgtgcatatatatatataaatatacacatcacttaatttaaacatgaaataactagggatgaagccagtaattaaggccataggatcaactaattatcacacctaaaagtttggtttaattatttaacttacattcaaaaaagcaggtttttgcatttgaaattaggttgcaaaaatataaaagtcctcatcacttaaaatgatctacatctcatatctaaagctttctagtatgacccaaccaatttatgatgttgttcctgagcattaactacaaaaatttatgtgccattcatttcaacacgatacgtgtttaattatatataaatatatacactgtgacccttgactaataaattaaatgtgtcatcgttcgatctctactaattagctataacaacgacactagtcgatcttttcataaacaatattgtcatatatatacatagctatatatagtttccaagcatgagacacaagagagtatggtacgtactcgacaaattacacataattaatctgtctagctaccacaggagatttaataatccccaaaatgtgaagctaaacgccacatatatcaattaatattctatcatataaccaaacatatacatattaatttcaagccactgggaccaaaactaactacgatcctagctatagtactgttctcattaattcgtacgtgcctttccaagataacttcatccactgataatattaaatttattattgagaaatactaaaagtttgtctaataacagttgagaaatgtttatagggtagtaataatatttagcacctctttttatgagggtttatattactataatttataaagaaatgctaaaaggtaattaagtagttttctagtatgtattcttttacgttttaaagtatgtgtcaactaaaatttttaactcaaatgttaaataatacaagttctatttattttaaattaacaaacttccaactctagtcaaacacataacaaataaatttcacaagtaaagacaaagcaataacaaataagaataatatatttatagtttacacacaaaacagaaatttcaagaaaaacaagacaacagaaattgaaaaaaaaaattaaaagcagataaaagcaaaaacttataagtcctctccaaactaaaaatgtaccggaaatttgatttttttatacttattaaacttaaaagaaaaaaaaaaattcaaaccaatacattttacactataaaaaatatgccaattttttgaaaaccccaaaaatacccccctcataactcaaaccctttctctctcctccctcactctcagccgactctctcaactcaccaacccaccacccacggcacccaccaccctcacccacggcagccaccaccctcacccacgagcaacccacggcagccaccaccctcacccacgaaaaccccaaccccgacgaccctcacccacgccccagcccccttctctctcttcctctctaaaaacgattgaaaaaaaaagggcctggtccgatggggtccgaccaatcggacccatcaaaccccatggtccgaccatcggac

SEQ ID NO: 265260 - DNA, 970 bp, Cannabis indica
tatttgaactttatttttagcatgtttattttcttaaaaaattaatcgaatattttaaataacggtaaataccattttggatcccgcgctttgtaaaaattaccaattgggctctttgttttgttaaatgacaaaatagaccttgtattttctaaaattgtataaataggaacctttgaactgaatttttgtcaaaataaaacttaatagtaatctgatctagaaatattatgacaaaactagttaccttttttgtatttgttagtgttagaaattgtcttgaagttggttatattaaaaaataaaattgttgaaagttgagctcagaatcctattattattattttggagaatataggatctattttgtcatttagcaaaagagatgatccattaaataactttcgaaaaacacaaaatccaaaatagtatttaacctttaaataattatttcgtacctcttgtataaatcataaattaaaactatcatggaaaatttagtactgcacccttttagtctgggcattataattttcctaaaatatatataatttttatggataacaaattaaatattattttgatctagggatgataatggtcagttcgtcgaggctatatattactagatgtcgggtaggtaatattgctcctgaattggcggaggcaatggggttagagaggctttgagttggataaaacaaagggattggcaaggtacggtggttgaaaccgatggtctatccgtggttcaagcaattaggagtgatcttcctttgttgtcatattttaggagtattatttctgattgtaaaatatttttagaacaattgcgtgatgcttcagttatttttattagacggtctgcaaatagaattgcttattctttgactggagcattttattttgtcgctgatcgtacttttatgagtaatgagctttttactgatttgcttcttgtaatcatgaa

SEQ ID NO: 265261 - DNA, 706 bp, Cannabis indica
ttttttttgagtccaaaaaaaaaaatgaaaacccaatttgggttatgttacaaaataaattattttgctaatttttgtgttgattttttttaggggaattgaagatgattttgtcattggtgagtggtatggaaccaagagagcaaaggctattgttcaaaggaaaagagagagatgataaagattacttacacatggttggtgttagagacaaggacaaagtgcttttgttacaagatccagctattaaggaaatgaagcttcttgctcaacccattacaaataatccttgctataccattagtgtttaaaattaaaaaaaaaacaaaacaaaaaatatattaaaaatattgttcaacaactaactactgaaaatatattagagaagatggagacttttattatagtgtgtcattttatgtcggctggggaaaattattaaaaatgcaaaaaatatgtgtaagttgatgcatatctatgtcattttcccatagttcacatctgttaattactttgttattatttttcttttaattgaagtagatgttgatttccatgtaatgcaatgtgtaaatctttaaaatttaaaatggtatttttgctttctttttgggccaaattatgactcaatgtcatatctgtttattttattttatgtgttttgtgccttttcctttttgttccatttttcattattattctgtat

SEQ ID NO: 265262 - DNA, 1081 bp, Cannabis indica
atacaattaccagcccaacaataataactatagacattactttataaagtaattatttttgccacttatcgagcaaagtaatctcaatacctcacttgacatactaatgtacttactgttatttagtaaaattactctgatattcagaattgataacctaaatttaaattaagaatatatttaaataataacgatattctaatagtaatataacatatcaagtcatatttatcaatttataaattaaccatcatttttgttgcctaataagataacttcagtgtcctcacctagaatttatatattaaattgcctataagacaagtcagtgccctaacctagcacctatatatcacattgcctaatcaagcaagtcgatgcctaacctggcatccatatatgtctatcattgtctaatcaaacaattgataagtaggaaacctatcaatagtttccatttatagtcatgacttttgatacttaatccttcggtatctaaatattgttgcctaataaaacaatccctcttttttattgccaaatcagacaatatttacatcatcgtctagtaagacaatcttttttatcattgtctaataagacaaccctttttacattacataacagtaattaccgtatcttaatctcaatattaattaattcacaaaggataataatcctatctcaacataacatgctacgtagtacaaatatatttttcttacctttaatccagattcatacatgtcggccaacctaagtggagaaacactcaaaaatcatggccctataccataacaacggtaaactgataagtgtctattctaaaacactgccttatactcacataaaataatctaagattttctattgaatctcgtggtaaaaacgccctataataaattatatattttggctctaatttatacttcacactttagagctcttccgaagcttcaaaacggtatataaaaagtctaaaatggacacctgagtgaaaagctatagccaaaatataaaaatcaccatttctcaattactgccaaatagaattccaattggtacagccttgtaccattca

SEQ ID NO: 265263 - DNA, 847 bp, Cannabis indica
atcggattggatccaaaatatgaaatctgcagttagtgcggattggatgttgtttgaccatgcgggttggatcggatgaacacccctaattctaatcgtctctttcacaaagctcttttgaaacgacacgtcgtttaacctaagcgacacattgttgtcgtttcttccaagctttgctgtactatcgtttaaaatacggtgtcgttttgtacttccaatcagtacctctgtcgtccctccctttcactaagctctgtgattcagagccaaagattcaaaaaccctaaaactcaaaacccttccaatgaactctttcactctttgtatggcttaaaccagaacaagccctagcttttgcttcctccaatcactactgagttctgaatcaaattacgacaatgacgaaggtgtacggcactggggcgtacgatttcaagcgtcaccatgttgctgagtacccggtggagtcacagcaccagctttccgataagccggtggagtccaaacccggttccacaacgcttcccagctcaatcacgttgtcggagattcagcaggaccggctcactcaacttgctatggagaattggtccaaagctggtgaagcagccaagtcgaagaagccgttcaagccggagctggttaaggagatttatgagacggagttattggttaaagagggtcagagaaagcctgttcctttgcagagagttatggttttggaggtcagtcagtatttggagaactatctttggcccaatttcgatcctgagaccgcgacttttgagcatgtgatgtcgatgataatcatgattaatgaaaaggtttggtagtttttttttttttt

SEQ ID NO: 265264 - DNA, 804 bp, Cannabis indica
taatacggactaaaaagttgagaaggtaaaataatagtctaaaaaaatctaaagttgagatggtaaaatatgtcatatgagagcagaaatctaaattgcctaaaagaaaactaaaaacaactatattcatagaatccataatcaatggttaaagaaaagtgcctcaagggatcattaaaaagagaagcacttttttttttctttgttcttttttattgtatcttgttaaaaaagaggaaattaaattgtgtgagcacgatgatgagaaaattaaggagaatagttaatacttttatatgtaagatgtaccaagtcgtgttttggtaaggtactttttcccttaattattattattgtttgctttcgtatttctgtacttattttagagcttttattgatgttttatcaaatctttgaaccatatgaggaaaaaaaagaaaaggttaaaggtccaattttagtgctgttgttttgatagcacatatcagaacatcaataccatggactcgaagactttaagaatatgccaaccaccttaattgtgatttaagactgagaggagtgttatcgttaactttctgttataatctcttagtcaacttctatgctcaaaaacaaatatctgaatattttttttcaattttttttttcatagtggtgtttcttatgcttacaacatcatctctataaatttttgaaaatttttaaatattaaatttttgaaaaatttatacggtaactataactattacggaaaaaaatttgaaaaaaaatatttgaaatgagaattgttaaaatgtatta

SEQ ID NO: 265265 - DNA, 466 bp, Cannabis indica
aataaatataacaaaaatgtacaaaaattgactaaattttgtacaggcacctattttacttaaaaaaaaaaaaaaaaaaattacttacgtttttacggtttatcgtaaaaataataagaaaataaaaaaaaatttcatgaaatcgtatttttgtaatttttttattatttttgtatatttgtaaaattatctcaattttttacatatttttcacacttgttttttcttacaaaaatacggagggtgtgtttttttattgtttagaaacaatattattttgatattgctgctaccagaaattgtgatttttttttacaacaataccaagtatagtttttttatggaacaatattgttttgacgtgttgctgttatgtgaaaataatactttttccaaaaaaaaaaaaaaacagaaaaacaaatgaagatctgtgaaaaacagaatctgtaaaaatgttaaaaaaaaa

SEQ ID NO: 265266 - DNA, 1680 bp, Cannabis indica
cttggcaggagttgggttagggtcatactttctccactcaatcttttcatcatcgatgaaacctttaaattttgcttttaatttatcagtaacatgaaatatgaggcaaacttacatcaattccagagtacatggaaagcatgttaaacaagtacaatgaattaaggacaatagataaaaaaaaaggagtagcagtgaaatcaaacctccttttcacttatttcattctcagctgctcctagagctttatagtttgcattgctacacatggagataaattacaatcaaatacataatacaataaatgttaaacatgtcaaacatgagtgaacaaatctccatattatataattacaagaaatgtctccaagctaaagcattatccttggggtcatgggaaacatccttctttgatggttctgctaccgctttcctctttcgttttcctaccatagttgataaacctaaccaaattaaagcgaaacaaatttgacagttaatgattacatatttcagcaaataaactatagaaaaataatagagcatagaagttctactacacatttaaaatcgtatattatcatcacctaaagtcactcaaaacaacttaattcaaatagtatttacaacaataatactttttgaaacaaattataatccttaaacaagacaactctaatcacagattaatagagagtgcaaaactcatcggtttagttttaatcttctcacctgttacacatttaagtacattaaaatgatgtgaaagtcatttcaattaaatgaattccaaaactttaaaattaaaccaaacaaaagcattccacgaatttagacttgaaacacaacatagacaacaaataaaaacatatgatgattaacacacaaaaaactttgcttacaaggcattgttcaactactccaaagagtcaaaactttgcacaaacaaaaggggtgaatggaataggatctattaacactctactacaaactagcctaagtaagcaaatcaatgaatcacaatgtaacactaaatgtaagtaattgttgggggaaaaacagttgcccctaactattgttggaaatataaaggaccgtaaaacatgcgacagaacaatgtcaatcacaatgccaaagaagaagacaaacaagaacataaagcacaaacaagaagagacataatgcctaagaagcttaaccaatttggttagcttgtacctttttatttatattgaacagaatgcactacaagttgctaaaggtttaataacagaattaacaaaacaacacttaactactaactgccataaccaataaaactaactaatcagttaattggtttatatgtagacctttaaacaatgccagtaaaaaagtggtacaaaccagagaaccaagaacataaagcaaatagaagaagagacaaaatgccccagaagcttaaccaattcggttagtttgtacctctttatttataatgaacagagtacaatacaagttactaaagatttaataacagaattaacaaagcaagacttaattactaattgtcataaccaatttaactaactacttagttaattgatttatacacagaatcaaaaatgccataatttctatcaattttgtaacttatgaattgggtaatcttatgtccagtcctaaaccttcaaatttttc

SEQ ID NO: 265267 - DNA, 644 bp, Cannabis indica
atgttatattatagttatttaagctgttctaagttatttttgttggttgtggtggtgattgagcaaggtttgagtttatgaactcaagctttgctctttaatggtaaattttgatatagatattgttggttggttttattgtatgaattatgtttattatggtacaaataggtgttctgaaagttattgtaagtttgggatcgagttgaggtgtgtaggtggttttgggtatttcctggactgaacaggtcgaccgatttagtgagacgtacctgtaggaaccgaaattccagttggtctccaggaaccccactgaatcgtacttctggttgggaaaccggtctgccagttgggacagttttgggaaccctagtttttcccgttgttgcgatatttagggtattgtcatgttatccatcgataagaaaacctttagtttcaagtttaagtcccgaaaagtgatttagcgtgtcactcatcagttttatgaatattgtgatttaggagcccataaatcgtcgagcgacagttctattcaggttgactggcaaatctgaattcggaaatgaggtaagattagtataatagttgcatttatgtatgcatgttagttgtcgtcagaataacatatatcagggtatcag

SEQ ID NO: 265268 - DNA, 2000 bp, Cannabis indica
ttttgtgtatttttgaaataatcacatttatttataattcagagttaaacttaagtatttatgccacaaattattttaaaaaataagttttgttgcaaggtctttttttttttaaaaaaaaaagtatgctatttatatatatttgatattatttttaacgtacgatttaataattaatttttttatataaaaattaatattactatatgataatacattataaatttaatatacttttaattaattaaattaatatatcaaaattaattatattaaaaaaaaagatcttgttttaaattttactctaggcgcctcactaacttgagacccctatcgaccttgcaaaaacatagagcctcttttcattttttttatatgtttccttgtttgattaggaatgaagaataaaaattaataattatttaaagctatattgtatttaatccttatcctacaacagaaatcattgcataaggcgcaccacatggtgagatgaatttaggtgtgcaagtctaacttgatgagttccttacaaaaatgtcctgaccttttttaaataaatcatgaaattttattaatgaaaatcaactaaaataatagcatacacaatttaatcggaacatcttcactgttaaagacacaactaaaatttgaattaaaaaaagagccaaataactagccgcctaattttcagatcgtttgacaaaaattgaaataaaattagacgaaaaagattttaccatcacaattaaccttaagaatacttacattctgtttcatccatcactcagaagttacaatagtacaagttgttgcagcaggtttattgatcaacctcatagcttgagcactcaactattatataaggtacgtaactgcattactaacaacccctttagccgtagagaacttgttattaccaatcactaataatgatttgatggcaaactatcgaaaaataaaaaagaactaacgacgaaacaaaacaaaactatgttacaaagataatactaaaacactcaaaattatgtcacaaatataagcctaagtagtaacaagatacaatcctgaccaagccatacttaaacccaaagaaagtcaacgtgcttggccagaaaaaaaataacctccgatagctatagatttaaaaactaaaaatcctaattttttaccctactgttaatcttgggaaaatttcaaaaaaggttaagagtggcacgtacgagcacgtacgtactgatcgtccttcccagcaaccgagtcacacgtcgtccgctccaaggagtcgccattgcacgtcgtctgatccaggagtcatcgtcacacgtcatccgatcccaggagtcgtcgtcgcaggtcgtccttcatagcagtcaccgtcgcacgtctttcttctcagcaatcaccgtcgccgtcgtaggttccggtatgtccctggtcttctgactgtccgagagctactccggtgggccctgcacatttcggccataactccatggtcgtccctgcacatcaacaaacttagggattgaataggattttttcagcagacgtaagctttacaaaaaataaataaataaataaaggtcttgtcgtatgacatggtttctttatttctctattaatggtcaagtgttaaggtcatattgtgatagtcaggagatttcttagttgtcgggtttctttgtcttctacgatcgtggcggattgtattttgtggttggcaggctttgtgggggttgtgggttttcgagttgcaactgggtgataatgatggcttcgagtagttggaacaatggagatacagaggaagaaatattgcggttttaaattgaggaggaggatcttgaagaagttgcagtgatcatagggggcggagatgatggaattgatgataggtggtgtttggttggacggttcttgtctaatcgggtgattgattttgagaagatgcagaatattttggcttcattatggcagccaggtatgggtatgtttgt

SEQ ID NO: 265269 - DNA, 720 bp, Cannabis indica
ttacaatatagttgctgagatgttacgttattagaatcttatttaatactcaccgttatttatgttattagtatgtattttgagtatataaataaaaatttctattatttttccctttctctaaaaaggtgttggtctatagaacctttctattattctagctcagatggaaatcttcttgttcatcactttactttttcatgctttggcaggtaacatggtatagtgtttatgtcattatttagacactacacaaaaattttacttatatttacaataaatctcgtgattaaaagtaatttttttgactaattataattaaaaaatatactatttttatttttttaatttacggtcgagctgcttcgctagtttctatgtaggttactatgtgaattttagttgcaataatttaggttgcttcgttagttactacgtgaatttttataaaaatgttaaacaaaactgctttaaagtgtaaaattgaaaattatcattaattcttatgttgtgactaaaaatagctaaaatagtaattacaaaaatcataatttgttgtgattaaatgcgtttttagtcacaatacttgttgtgactaaactaaattagtgacaacctatatgtaaatattatattttaatcacaataactttttcttgtgattaaaatttacgtataaattttttatgttatgatgacttaaaagtagttttttttttt

SEQ ID NO: 265270 - DNA, 1464 bp, Cannabis indica
atttaattatatttggattgaattggttgttaattaaaagtaagattctaattggattagattggatgttattcttaaaatctaaccaaatatcgatccaatttaattatatttatatatattaaaaatattatttatatttatttgtataataaaaaatatatattttaattatatatttttagtgagttttttgtgttaaatttataatatttggttgttttgtatatttgtttttgtgatgttttgttctattttattatttggtaattttgttgttttacttttttttttaaatttttagttatattacacttaaataaattgtgatatttaatttttatgtattttttttcttcatatttttatgttaatattaaaaattaaatgtgtaattggatatcaaattaaaaaatcgatcaaaattaataaattattagattgaattttgaagtataattaaattgaatcaggtgataattttctgaatacaattaacaatttaattggacgagaaaaatattagattagatactcacattttatatattatgaaaatttgaagtggcgccttgataagaatgagagacgtgcaatgttgaactatatatttcatagttttaatttgttataataatgtaatgtaaccatatctataaacacgttttagtttttagctagctagtaaacagtgctaggtccatcattttttgatttaacattgtttaattttaaatttaaattgagaaaaacaaaaaaaccaggtagtgaagttcttcttcaccattttcttcacttattttctttctttttcaactctctcttagaatgatgttgagctatgacaataatgacttcccaaacgattttgagatgagctttttgcgagggaagcagcagagggctctgcaatgtatatgattttgttgatattgtagtttaaagtaccaccagaatatacaaacaataaaaatcaattaagaatttaagaaagagtttgatatccaaacttaaagaacacaaaacaccagtgaaaagaatccttaaatagtgactttattgatcacgaatcaatcttagttacaaactctcttgctctctcaaaacatgagtttcagcttttacagaattttagagagaaaatgaatcgacgcctaagctaatgagctagctagctatctatttgtactattcggctaaaagagatatagctcagctttttatcaaaaactgttacaactaatttaacaaccagctaaataaggaaagcttaggactacttatgtgacagtccataagggaaaataccagttgtgcaattccacatcgcttgagaaggtcaagtgagatgatttgagactgtgtaggtatgagactgcacagttgaagagagcttaaatagattgattgatgctgcctatatcaacaaggtgcatattagcccatcacgaaagaactccacag

SEQ ID NO: 265271 - DNA, 1229 bp, Cannabis indica
cttttcctctcttctctcactccttactaaataacttagtgagaagttactatatctccatcaatcacactacccttcctccttccaaatctctaattatcttacttttcttcctctttaacaaacataaccttaggaaattttttgactaaactgtattccttaaaaaatattttagtaaactgtactctaaaattaaagacgcgttagaaactaacacctaaatgggcaaagtttctttgacatagacttggaccaaagaactttagaatttttagactttatatatttctgaacaaatattaatgaatcagtcaatcaagtaatattattgtctcgtttggttaagattctacttttttgacttatttttaccatttgaataattattatatgaaaatctttcttcaataaaaaatattttataaattaatgtttcgatattattaaaaaaaaattcttttgtgagtaaactaaaaattatataaattattttaattttaaaaataaattcctctgtgaaagaagttacaaatcttaactttttctgaaagacttaaattaaaataagatttttcattatttttcaaaatacctcataaggatcacttttttaattttaaaagtcaaccttaaatttatcttacaaataataagtcttttatttccctctagcttaattatttattttcagttgactcaattgtattttcacactaaaacttttctaagaaattttcaaaactcttctatgaaattgacacatattcttactggttcactctcttctctctgccattttaggttgttatcttcttaattttgttttatttttttttttttttttattaatttttacattttaaagtagttttttttttattatttctatagcaatttacatagcaactcacataacaactaattaaataatttaaattgcaattaaaatccacatagaaactaacataaaaactaccggagcaaccaaaaccgtaaattaaaaaatagtatatggaataatttttttattttttttcttaaattatattcataagaaacaacatcattttgtaagctttctcattggcagttatttgattctttcgtttgctcaatttcttttgttagcagcgtgatagtcttttgcagatattttttcatttgttcaaagtagaagaccgaatgtattgtagggcacttcgtcaacatattgcctttcattttca

SEQ ID NO: 265272 - DNA, 692 bp, Cannabis indica
ggtgcatttttgactattttttttaaaccaacgcgcagatgcggttttctcaatttctcaaaccacacctgcatcgcgaaactaaaaaaccgcaccgcaaaaaatggtgcgctgcggtgcggtttatgcagtttggactatcactaaataattaaactatcacaaatacaataaagtttgagcaacacttgtcaaaaataccataagacttgaaaataaatatgaaaaaaagtttcaagtttcaacaatacaataattagttggcttagattgggccttcacatattggacctaaataaatataaaaattgatatttttataatatgcggtgcggtgtggtttgaaccgcatattaaaaattcaaaactgcaaaccgcaccgcaccccgcggtttaggaaaaattcaaaaccgcgaccgcaccgcaaagaatttcaaactgattttttttgcggtgtggtgcggtacgaacgatttgagcggtttgataaatacccctacggttagttatttattttgtaagaccagttaatttactctaaataaattatcagatatactgtaatgcttttaacaattgaagatgaacacacataagttttaatattacatgacctaaatcatgtgtgactatatttattttaatttaattttattaacttatttatttattaaatatttgatactaattaa

SEQ ID NO: 265273 - DNA, 1630 bp, Cannabis indica
ttttcttatctacaacttttaggcatatgttatcttcaattatcaacaatttagaaattaatttttaattttcttttttattttacacacatttaagctgtgtttgctttagtatttgagcattaatttttcgtttatttttgaattatcttaagaacatattaaagttaaattatcaagcattcttaaatactaatatattacattcagtatttacttttaattgtcaacattataaattatattatttagatttacataataataatcacttaataactaataatattttttcaattagtaattgtatcacttttaaataaagtagattaaccttagtatacgtgcctcgcacgtgattttttactagtatatatatattgtaatttgccccgcaagatatatttattcactttttgcatcactacattctcaccctccctcttgagtctctcccccctcatcttctctcgtgatggaatggaaagcaattcgatgttttttacattttatttaatattatatattaacttatatattataaatttatgtagtttagtaataggttgaaatagtaatattaagtttggaaaatcagataagagaacttttctttactgataattctaagtgaattgagaaggaaattagcaagtacacttatatagactacaagagatcaagaatcactcaattgagattttgttacaataactgaaacaaaacagctctaacaagaaattctccatgtgtataactaaaagcaacctaactaacttaatatctaatagtcctcctcgaggtggagtgtaaagattattgacacccatcttggagataatgtccttgaaagaagctccaaagaggacattggtgaagatgtcagctaagttgcttttggatgggagatggagcatcttgatggttcattgtgttactttacgttgaacaatatggcagcctatgtcaacaagtttagtgcgttcatgaaaaacagggttctacgagatgtgaatggttgcatcattatcacagtaatgtgtagctgggaggttgtgtttaatactaaagtcttttaagatggcaagaatctatgtgatttcatatgtatcatgtgtcgtggctcgatatttagcttcagatgataagcaggacacagagggttgcttttttaatttccaagagacaagggagtttccaataaagacacagtaacttaggatcgaacgccttgtgtcaatgcaacttccccaataggcatttgagaaaattttgatgttgagactggttttagcatatgctgagatatgagaattattttgattgggaaagaataagccttgaccaggtgtggcttttaagtattgcagtatactttaagcaacctaaaggtaaggtactcgaggagaagccaaatactgggttagtctattaactgcaaaagagaagtctgaaggagtgatggtaaggtataacagtttgactatgaggcttctgtatgaagtaggattggagagcaaagatccttcggtggaactcaactttaagttgtattccatgagtagaaactggtttaacactaagataactagttttaatgagcaattataaaattaaaggcaatttggaa

SEQ ID NO: 265274 - DNA, 554 bp, Cannabis indica
ttttatggggtgagcctggaagtatgtctgtagcttacgagacacatggactaggcacaatgtgagtttttctagagggggatatcgggattctgcccctaataacctcttacttacacagtaaataggttgctagtgcctgccctcttctcacactatagctgcactaatcgcatctttcgagatggctaaatagagaaatagcgtctctccaattattggttttaccaaaactggaggcgttgcgagatgccttttatgttctgaaaggcctcttcgcactcttttgtccactcaaactttttattgcctcgcaatatgttgaaaaatggcacatacatatcagttgactttgaaatgaatctgttaagtacagccattcttcctgttcaggcttgtatttccttaggctttgtcggtaatggaatatctattaatgccttgaattttttaggatttgcctcaataccccttgcgttaattatgaatcccaaaaaatttcccaaggaaactccaaagaaacatttttttgggtttagcttcatattatactt

SEQ ID NO: 265275 - DNA, 573 bp, Cannabis indica
aatggtcgattttgttccaacaatgcacaaagaggctttgaaatctttgaaaaatccttgatgaaccttctatagaaacccacatgtccaaggaagcttctaatacccttgaccgtggtaggaggcggtagcttttcaatgacttccaacttagccttctccacctcaatacccttgtgagaaaccttgtgacccaaaacaatgccttcttttaccacaaaatggcatttttcccaattgaataccaaatttgtttcttcacacctctttaacactttcttcaagttagccaaacatgtgccaaaagattccccgaaaactgaaaaatcatccatgaagatctcaagaatactctccgccatatctgaaaaaattgccatcatacaccgttggaaggtagcgggggcgttgcatagcccaaatgggatcctcctaaaggcaaaggtgccatatggacaagtgaaggttgttttctcttggtcctccagcgctataaaaatttgattgtagcccgaatagccgccaagaaagcaatagaactctttacccgccaaacgatccaacatttgatca

SEQ ID NO: 265276 - DNA, 1281 bp, Cannabis indica
  modified_base (110)..(110): a, c, t, g, unknown or other
tatttgcttacctttatttttctttaatatgtatatatatatatatatagtaaatttcgttaccttttagcaataataacgttaattttttttctttaaaaaaaaaaagngaaaaagtgacaagttttaattcaaaatttgtttattacttgactagctaggtcgactctccggccctttccctgtgtagcctctaccttgaaactcaaatgctttgacgagagggctcttacagttatattcctaaagctgtcatgggaatttaacgaggtcctatatatatacttatatatgctatatatatgttatatacatagccatgtggttagcttattgcctctcattaatttaatatcaatatatatatttacatatatatatctcacctcttaattaaaattgatatggccatatgtacatatatatagatattataaattatattataagcatactgtaattatcaaagggaatctttctcttcaaaaacaaaactttgagtgaatggttaatcatacatatcgagttatgactacttttgatgaattattcttgttaatattattgacgaaaaagataaatggacgtattacatacgcacaaactagtgaaaaatgaggatgatttaaaagaaaaaaaaagtgttgcgggttctaattgcaagttttgtttttctaagccactacaacaaatagggcactatagaaattcgcgcctaaaaatagtattaggggcgataaaaagttgcctgaaattaggagcgacacccctaaaagtcgcccctagaaaggtgtgtcagaattctacttttgacttttaggggcgactatatggtcgccctaaaggtttttaattaaaaatatatataaattttttgtaatattaaaaatattaatattcaatttataaaatataattataataataaataaaataaatatcaatatgaaatataattttttttcatgttaacaaatagcccaataacacaataaaagtaaatagttttacaaatataatattagttactaagacaaattaaatattagttcttggttctataattgagacatataaactcatctgatctctcgctctcattgaactctagaggaattagcagtggctgacgttgtgatgtctacggtggttgtagcagttgtaatggcggtagctgtcgcggttgtgatgtcggtggccccatcatttatggatatgagaagactgtctgagcatgttgtgataacgaaggttgctatgatgatccacccatatcagtcg

SEQ ID NO: 265277 - DNA, 670 bp, Cannabis indica
tttttttttcttttctttttccttttttttttttttattttttttttaacaaagctctttttcttttttaatcttaggagttattgaaacttattatcgcatgtgtgattttttttttcttttttatgaaagtaaaattcattaatgtctaggaaaatcttacaataaaataaacaaatctgtattttatataattcattgcaatataacccttaacaatcaatatctattaacgaataatatttcttttgaaaaaaatttccttttaccaattagtatttaagtgatgcagatcactaaaggaaggatcaacaaagggtcttagtcgtgtccaggcttctcacaagccagtgtctccaaattggaagatgttatgatccacaaccgctcatgtccttgcaattttttgttaaacaatgttgttggtttttaaatttctggacattttgatcgttttacaaaatgtaaagtccttttttggcaagttagttgacaaaatattttttcttttatggtaagattgttttgcattcatacacgattttcttaccttgtttattcggttttagttgctcttttctatgttaggaaagatgcacttttcagctggactttcctttgtttcgaaacttcttataagagaagcgattctcttatggaaagttgcttt

SEQ ID NO: 265278 - DNA, 1328 bp, Cannabis indica
atttatgtcgcaattatttttagttattatttattatgtcttttgtatgaaaactggccagttgcgaacattttcaagtattaaataaaaatgcaacattataattttttgcgtttaacgcttgtaaataaattaatatttttataaaagtacgggcgttacacggatatgggtcaccctttatcgattcaccatgccaataccatttagtataacttttatcaattccacgaaaaaatacatgattctttaacatgaaaatattttcttttgatatattaccacaatcgatacaaggacaccgaattttttcaagatcgctacaattctttagggcaaactctaagaagtttttgaatccttattgaaattgtggggtttctctcttctcttctatcaatgatttatccattttaaaaataaaaatcctaacaaacaagattgaaaaagaaaacttaaaagttgcaagaaaaatcttaagcacgcttagtaattaaatattaaaaaacatgttcatttaagaatcctaaaaaaaattgggcagagtttcccctatttctacagtattttctaatttaataactatctaacaatgcaacaaacaacacaattaaatcaggtaacaagacaaaataatcaaaaaaaacatttaacaatataataattgacacccatccgactgcagtacatttatatcacagaacctacttcactacagatgaatatctaacatattcaaactcctctaataactttataattagtaaaaatttattggtcaacaatatacctctagctagcaatcaatgattatcgatattttgatttgttttccaataggccacaacctacaatattaaatgtaatttaaaaaaattcaatgtaaaattaagtgagaatagtaacaagtaactaataaatatataactagtgactacatacttatataattacacattatttagcactacaattaattcatacttactatatagtcttattacattacattacattactgttcatattatcatttttattacattacaatgaactaaacacctaattaataattttatttcatgaaagtttcttactaagtattaaaagtttcaaactaaaactatataactcattacattactagctatttccattaccatttcattgtcaagactattaaaattactatataactcaaaagtccaaactaagtatatataaatattttttttttgtcatagcaaaaatttcaaccatctcataaaaaattctatcaataactcactcaaatattatagaaaccaaatctttaagaactagaaagg

SEQ ID NO: 265279 - DNA, 538 bp, Cannabis indica
gcgcggtatagtcacaaccggggtatttcggggccgaacggggttcaggcccgaaatgcaatttgggattatatgttggcattttatttattaatgtgaaatctgaaattaattggatgtattatatgtgaaatgtcatttttgtccatgtgagtgtatatgcttgatttttagccctaggggaaaaatggtcttttgacctttattttcttaatttaataaaaatgaatttttgaacttgaggcatgtcatacaggatttgattgatacaaagcagttcgttctacctcccgcgccggccacaacagctcagccaaatataatgaaaagagaaaattctggttctatctccctcatacccgacccctctctctctctctcaaaaccctctcttgattttcaaacttgaatttgtgagaaactagcttgaattgaagcttgattgttgagaaaattgtgttggaagcttgaggcttgattgtgcaaggaattgaggtagtttttacattttttaattttggattccttgctgaaatta

SEQ ID NO: 265280 - DNA, 3470 bp, Cannabis indica
cattcctagggatcaccccagaaaagcactataaataccccataaacagactgataaagggtcgagaatttctgggttcaaaggaatcaaagacagaaaataggagagaaatccaccaagaacattctctgtaataaatactctcattaataaaaagactcatggactaaggctcattaacgccccaaccacgtaaaaatctcatgcattaaacttcctacagcttttctttatattatttaactggttgctgaaaatctcggtcaacactcatacctaaagtttccccttcctttacgattgttgattactaacctatagcatgtcataatacattgtacaagtgcatttctaaactaatttttaagagactggctgaggtcctcccctcagtgatacatagaaatcaaggtgcatttctcaagaataaatcatttggctcaaaatattttgatactttaagacttattaaaaggttatcagacgaagaacatttctcttagctgtctcttaaatgtggttttggacaagacatatgatacaattgactggaaaattctagaaaaattattgaaggccttcaaattcccatctttattcatttagtggatcacgacttgtgtaagagagacttcttattcactggttatgaatggaagaatacggaaaagttttgaaggtgccaaaggattgtggcagggtgatcccatgtcacccttattatttgtgttagtcatggagtacctaacttagttactaactccccaatccaagtctaaggaattcatgtttcatcctttatgcaaggagcttaaactggtgaaactttattttgcagatgatcttttaatttttgtgaagaaaaggtggaattagctcaatgtatttctaagacattcaaggttttctataattgatcgggcttgaaggaaaatatagctaaatcgaatatatatttggctggagtggatgatagtgagaaaaggaatcatagagttaatacagtttggagaagaggcttttcctttaaagtatttaggtgtcaccatgagactaactaaatggaagtttgctgactgtgagattataactaataaatcaggcataaattagttactttggctagcaaacatctcacttatgcaagtagaatccaacttataaactctgttttggttggcatcagatgctattggatgagcatttttatgctcccttagagtgtgatcgaaggggtggatatgctttgcagaaacttcctttggggagaatgaggtaacactatcaggtgccactgatcttcatgggatttggtttgtaagctaaatttttttgggggttaggttttagaatggaacaaatggaacaaaattgcgatggctaagtattcgtgggcactaacatgaaataggaaaatcattgaattaaatggatcaatatcatatacttaaagaatattgatgtatggactcatgagcttaagctagatgctagctggtattggaggaagctcatgaaactaaaaacgtgtttcactaaggaagatatcgtcaaggcaaggaactctggaaattcaaaataagctctttatatgagtgttttctggcagattctctaagaatcacatttgaccaagttgtgtagtgtcgcgtagctgctcccaaacatagacttattctttggcaagcaatccaatcacatcttcttactatagacctatttgctagtagaaatattattattgacaatgagaactgccttgtttgtgagtacacaagaaagtcatggtcacttattctttgagtgtgctatatttatggtgattacaagagtagagtagtggttgggatcaaattcttggccgagactctgaaagttgggttcaatgggcggaacaacaacagaatagatgcttagcagtaaaactgaaaagtgcagctttggttggagtggtttatatggctgaataggaacttatgtatatttgaaagaaaatgtttattaatttaatatctttggttagcaatattttttatttaataattttaattaaaataaaagaagtagaatttgatatagctacaatttattttcacacattaacaatgtgaaattaactctaataatctaataataagtatgtaagaaattaatttaacgtagtattgcccttaaatttatgtatatatataatgcatcgtttggtagtagggaacttttctaacttatcaatcatgtaaaattattattttgttctctattaaaactcccataataataaaagtcgtatgtcatctcatttttccttaccaaacacccaaagaaagaaagaaaaaaatcattttattttgttgttctcaaagccttatctgtttacaccaaacttgtttgttgatgaatgtattgggagtgagtatagagaatagagtaggcgtgcaaccaccaaagcattacaactcaaacccacgtgaatccaataactccattgtctctgacagccaaacttgagtccgactctttagcctagctaacttctaaacccaatccaatatactactaataatgccagctcaaacttcaccatattaatgccactaaagcctaaacacaaatctctctctctctctctctttctctccatcacataattaatatatttactctttttatatattttccttaccaattttttattataattaattgtctacgtatgagtcgtaccatacattatttacattaaaatatatttgaatcttcacataaaagctttgtttggatgtacaagtagtatctacttcccaacaatctctgctgtttttcttcaagcttcaaacttggtcccaagaggaggagcagagccagaagaagaagaaggtcagtaatgcttgaacaaaatctctgttacattacacaattctcctttttatctttcgaatatctgttactagttgaatcagttgtgtttttcacttgttttgttgtgattgtaatgagtaattatttttgtaatgttattatttactaataatatgatgggtggcagggttaagaatgggccggggagtcagtgctggtggaggacaaagctctttgggctatctatttggaagtggagagcctgctaaaaaagcccaaacttctcaaaacccaggcccagttacagtcgcaaacaatgcatctcctcaaaatcctgtggttgttgcttcaaagccaaagataattgacaaagaaatcccagcaggaattcatggcaacactaccaacaattatttcagggctgatggccagaactgtggaaattttataacagtaaattttccctctcacaatctctttgttttacttgataaaacagtacatatattcattttcagaagtttttatatattagcttgaaattgattaaaggtttgggtttgaattttgtgatttttattgtattttatggttaattatgaaaaagtgca

SEQ ID NO: 265281 - DNA, 1129 bp, Cannabis indica
cattactttagtgtgttcttaggtatatgttttagtagaatttacactaatttaaaactttatttgataaatatgatagttttttagtttatgtattttttatggtaatttattatttgtaagcttttttatgggatttaacatgctatatttgtgcaaatttaaattttaaagttcatattttatgcttgtgtatttttagtttattagttttttaaatatttatttagatatcttgtccatttaatttactttattttatttatttttcagtttgaaggtccaaactatttttttttgtttgtatttttaattttctaccagttaaaaatttgttattctttattttttatttttatattgattaagagtttttttttaaaattttttcgtattcttcatttttttaccctttatttctcttctctatctttatttttatatttttatttgtttgggtgttaagttattatatttttagttttttagttttttttttttatttaggtatttttcgttcagtaactatttttcttatttaagtggataactctttcagtggataactattttttctttattaattggttttttatttttgttttatttgtttagagtattgtaaaggtgctatgattttggtatattttaagatgagtgtattgtgtttttttatgtttttaattattattattattattattttacttaaatttattctaagtttggattgtggattcgtatttggtttctatatagtttagtaactggtttcagattaatatgtaactttttgacttataattttttattcatatgtaactagtttttattattgattgttttcatttttgttagtgtagttatttggttgtattgggtaagtttaatggtatttttaatagatatatgtttaatttattcattatcatgtcaatctttgtttattgggtaagtttaatggtatttttaatagatatatgtttaatttattcattatcatgtcaatctttgtttattatgtatattgactaaaaaatttggacagagacttctaagctacacattcactggattaacgagaatgagatatatgttaagtataaaaagagagacacaataatttata

SEQ ID NO: 265282 - DNA, 572 bp, Cannabis indica
gaaaaatcaattgaatctaaaattctatcagacacaagtcgctcaactctatttttagagatgtgttttaaccatttgtgccataacgaatttgatttttcattatctattttacgcttagtaccacatgatttcacattcaaggtttcattatatgaagcaacggtgtcaagtaaatataagttatcataaactataagagaaccagttccaacaatatttgaattaatcgataaactaaaacaattgtttccaaatgaacaataataacccaatttgtccaaacaagaaacagaaactaaattctgtctaaatgatggtacaacaaaagtatctaataagtccaaatagtaaccaatacttaataacaacctaaaatgccctattacttccacatccaccaacttgttgtctcccacataaatggttcttttcagcattacttggcttttagtaactcaggcgaccttgcattgaaacactaatgttagtagtagcaccgcaatctaaccaccaagtgtttcttggtactaaagctaaattacctcaaaacagaccaaagtaagaaatgt

SEQ ID NO: 265283 - DNA, 745 bp, Cannabis indica
tacacaaggatatcatcgataaatacaataacacatatatcatggaaatccttcaatgccctattcatcagatccatgcaagatgcgggagcattggttagtccaaaggacataaccagatattcataatgtccatacctagtgcggaaagccgtctttggaatgtcctcctctcagattctcaactgattatagcccgatcgaagatcaatctttgagaagacagtcttcccccgaagttgatcaaaaagatcgtcgatcctaggtaaaggatatatattcttgattgttagcttattcagttcctggtagtcaatgcacattcgtacgatccatctttttttttaacaaatagtactagagctccccagggtgacacactaggccgagaaaaccctatcacaagcaaaccctggagttgaattttcagttccttaagttctgcttgagccattctataagcagccttagaaacttgttctgctccaggtgccaagtcaataacaaaatcaatttctcccaggggtggtaaacccccaagttcatcaagaaaaacatctagaaattcctgaaccaccttcatgtcttctggccaaacagagtcaggcccaatggtgtccaataccacggccaaaaaccctagacatccatctcgtagcaattctctagctgttggtaatgaaattaccgggatccgagatcccttaaccgaaccgacaaaaacaaacggttcttcaccttcagg

SEQ ID NO: 265284 - DNA, 500 bp, Cannabis indica
aaagacatcataatgcccgctttgcaagagaaggatctgggatgactaacacaagtccctgaaaaagcaccccgagcactacaacattcaacaccattagcgacggacccctcagccgctaatggtgtcctttctggctgctaaagggcattagcggcggacttcggccgctattgggccgccgctaatgcttggccgctattaatagtattagcggccaaaaaaagggtccgccgctaatactattaatagcggcgggaccccgccgctaataccctttgtcagtttcgtgtttcgatcccccgctaatacccatctaaataaaaaaaattaataaatatttataaaaatttatttatatattaatcctatatataaataaataattttttatataaatatttaataaataaaatctaattattataattataacaatttaataaaatttattgataatttaaaaatgtctccaaggtaattaactttaacatattaat

SEQ ID NO: 265285 - DNA, 3135 bp, Cannabis indica
gtttattttcaattataacgttataaaaaccagagttatgagtaccctttttctcattgcttatgtttgtgtagaaatttaattaatattttaaatttttatcttcttgcagacttgtgttctcagagttaatattcactgtgatgggtgtaagcagaaagtgaagaaactgttacagaaaattgatggtaagtttttgttttctttcttttttcgactacgaaagcttattttattactcgagatttgaaatacttgtcacactttgactaattacagtgttttgctgtatttgcctacaggtgtgtttagtgtggccatagattcagatcaaggaaaggtgaccgtttcaggctctgctgacccggacacactcatcaagaagcttgaaaaaaatggaaagcatgcagagttgtggggatttcaaaagggtccagctcaaaaccaaaaccaattccaaaatctccaaaaccagttcaagaacttgcagcttgacggtggcaaagtgggaaaattagacaggagcaagtctcagaaaggcggaggcggcggtgctggtggtgggaaagagcagcttaaggggggcggacaacacgcgcagcttcagcagcagcagttacagcatttacagcagatggttaaagggtctgctaaggatatgaagttcccgcccaaggaccagaaatctgtcaagttcaatatgaacggtcatgatgagtttgacatgagtgatcatgagtttgacgatgaagattttgatgatgagtttgacgatgatgacgagtatgatgatgatgaagactatgatgacgatgatgatgaggggttaggccatggacatggcaatagtcatgggcctcctcatggtggttataataatgtgcctaacaaagctatgccgatggtgatgccgaacaaggtgatgcatgtaaatggtaatgggccacaagggccttatgggaagatggtgccgatgatgggtaacgttaatgggcctccttatgggcccaaagggatgattgatgttcatgccatgaacgacaaaaaaagtagtggttcggttaagaaaggtgggactgttgatttcccaattgagatgatgaagggtaaagggaatggaaatcatgaagggaaaaacggcaatggagggaaaaaaagtgggggaaatggaaaaggtgggagtgggaacagcaaaggagggaaatcaaaaccaagtggtgataaaaatggagaaaaaaagaaaagtggtgggttgcgtgccttatttggttttggcaagaaaagtagtactaaagagggaagtgtttttaagaagggaggcagcaataatggcggtggtgataaaaaaagcaataatggcaaaggtgggggagggaagcaagagaagaagaaaatgaagaatgattttgatgattttgatattgacttcgccaccgctaatcacggcaaaggtggtggaaaaggcggcaaaggtagtggtgctggcggtggcggtggtgggaaaatgggtcaaatgggtgaaatgggccggggcgggggtggaggtgttatgggccgaatgggtccgtccggcccagtgggtcaaaatggtgggggtagaagtcagatgggtatgggcccaatgggtggtagctatccaatgatgaacggtagtggtatgcctgcagtacaaggtctacccgcccaagccatgatgaacggtggatattatcaagggcaaggaatggggcctggatatgggcccgggcctgggcctgggcccataaacccatacaatcaacagcagcaactacaacaattacagcagcaacaacaacagcaacagtacatggctatgatgatgaatcaacaaaggggcaacgtgggaaatgacatgttccaaccgatgatgtatgcgcggccgcagccggcagtgaattacgcttcgcatccggtctccgataactacactcacgttttcagtgatgagaatactgaaagttgcaacgtcatgtaaattgctaggattattttgactactaaagtcatttcttttttgtttgtttttggaattgggttaaatatcatattttgtattcttgctctttttgctactctatagtcgatatattgtaagtgcaagatcggtagtcaagtaacatggcttatgttagtttagttttagtaaataggtttcgtaattgtaccactgtttctttctcgacccaaaagaggtcacgtgaattaatggacaagtattattattatttatgagtgcaattattgagtaaccaaattataatattcgtattatttatatcatacttttcttcattggagttggcactgagcaactttcaaagtgggcagtggtcttttataggttcaattcaagtgaaagtgagataattaagatagtgcatttcttccaattattgagatttaaaaattgaaaagatgtaaatgtgagttgtcacgatcaagtactattgttaagggtaaggagtattgaaaagtctttctagtatgatgatgatgatgaaaccttaaatcaaatatagtatgtaatttgaatatttgctcatgctgtatgatttatgattatgagctttcatccactttaactcgcacgttttatgaagtatatttatatgccgaccttctgtaaacttgtgttcacatttgccaagtggctagaaaacgactgtcgttattatggtttctgctactttttcatgaaaaatatgtaacatttgtatcttggatgttcatgtagttaggtatgggcggtcagtgctgtgtatagccgaaaatatattaacactgtcgtaaacaatattaggtcggtgatctgcttggcttccaattattgggatttaaaaattgaaaggatgtaaattcggatcataataaattaacatcaaatcaaaataatcttcctcttttcactgatgccgctggttggcatttttgaaatagactctcataattttgctattggtagcggaaatttgaattggggctcattttgttaatatattttgggtttgttcggtaaccattttaaaaattactttttgtttttaaaattaaaaatatgaaaatacaaataaaaattgtgtgcggtaactctattttattttttgtttttaaaat

SEQ ID NO: 265286 - DNA, 303 bp, Cannabis indica
tttcaaaatatatatatggtgataaatgtacgtgttcttttatatctcttattagaaaagtacactatatatatatatatagaaatttgactcttgtaagtcttgtttgaaatacagtacttcaccatttatatgtatattggctggtaattggattacactcatattttcatttttatttttttattttcaagtataagttatatatgatttcgccatatataataataagcttaacattttttttctttttctaagaatgagcttactaaaacgaattacttttattagcaaggaagctac

SEQ ID NO: 265287 - DNA, 588 bp, Cannabis indica
aaaaaaatttttttctcctatggcccactttcattcaaggccggccctggttctcacacataagcttctttaaaataatgaagcttatgagagtgctttaatctcttcattattattttagaataataattaaaaaacaacaaattaaaagaaaatattaacatagaattaatgattaaaaggcctaataattgcctattttttctgtccccctattctcactatcttctctccctaagaactgttatctgcagcaaaagatgtcttgtaaagattattttgtcttttatccttttaaattttaaaataattataagaaaaatattatgagcaaaaaatggcaatagtactgacaaaaagcaatcttttgccaaagtatacgtagtttttttttttttatttaagcgtttatatattacatcagcataatttgggactcgaacccagaacctccaatacacacgcaccccctatggccacttgagctagcctcaagtggttaagtatatgtagctagtgactgtagtttttacatgaacactctgcactaatttatgcttgaattactacaacattctttttatatat

SEQ ID NO: 265288 - DNA, 886 bp, Cannabis indica
ttatatggaaataaaaaatgataaataaatggctaaaatctccttaattggccagccataggatgtgggccccactagttataattttgccattttattcaacaatttataatttctttcactaatgccatattttctaatttcaatcatttaaatgtcaaaactatttatttaataattaaaattaattataaaatgaaattgtcatttaacttatttattaattagacttaataaagtttcttaattaacaaataaacctcaaaacttcttttcttaacaatcaagtccttgcttattagtgaaaattcataaataagacataatctagttttagaattataatttaaaaccaattaactgagtttgcaagcagtattatatcaactagtgtggggaccatgagcctatataattaagtttccaataagtagatctagaatttatcaagtaaattctctaacttattaattcctcattgtgccactatagattcggaattgcactcttaattatatagaacactctatatgttccaagatatagatacgctatgaattatccatcattttaatcccaataatcaaagatcctctatagatgatttacattgagtagagataaatttatcgttccacccctcaatgtattttatccttaaaatacttagctttttataaatgatatttcagtaaactaatataattactgaaataacagctcttttcatttattactactaagtcaagctcgaaggaaattatcatttcacttctatgtctagtccaagatgtatgttttggcccgaaccaattggtaagatttaacgaaaaactccaagaacataaataacactcttgagattgaacctaaccatatcaggatt

SEQ ID NO: 265289 - DNA, 468 bp, Cannabis indica
atttttagttccacgtcatcaccgaatttggcggtcgatttcgtattcggtttttttgacatggcgttcggttttaatttttgaaataaaaaaatagtttaaccaaaaaactgtcaaaactgcccaaaaccgccaaaaaccgtacggtcagttttatacggttataatttctaaacggtcggttataaaattgtaaaaatcgaccataaccgaccgattttcacccctaatgcaaacatatttattagtcgaaaaactcaataagaaaagcacaaaacatataacataatactgacttgtatctaggtgcccatacacctatttataaggcttcagatacatcaagaatatttctaacagaagtacggtccttgtaacgcatgcactaactactcgtcccataatagtgttcgtagggctgaaccgcacctcgagtaccattgagtattgtaccacatgcactacgta

SEQ ID NO: 265290 - DNA, 577 bp, Cannabis indica
ttcttttatggttaactaatatgtagttacagagtcgcgttctatggttatagaataactgtttcagtaccatatttattatttcacatttaattaatcatgattaatagatagaaaaaaaaaaaacaatattaattaacaaaattaaaatttgatcaaagaaagtgtttgcttattaattattattaactcatcatcatcatatcccaaacgttgatcagatgataatcacccacccaccttccttaatcattacacttgtttatatttatattatgtaataagactaactaataagatattcatcaatatcaactagtttctcaatatataacttgctacatagtatatatatagagttagttatgaatgggaggcttcttttgagctggagtgtaatccatggtcaataaatcattagcactttctgtcaccttaccatgatccttctcttccttaacagctacaacattattttgctcttcatgactagtaccacccttcttcaaattattctgctcaacttccttattattagccactactactactcccaaactcctacctgcaaatcaaa

SEQ ID NO: 265291 - DNA, 1441 bp, Cannabis indica
aagagcccgcatataacagcctcagcagtctgcctatacttcagaaggccaccagtgtttgaggcacctttggcaccaaagaagcttatcctagataacaaaacctgcaacaaattttgaatttgtttaaactggctccagaaaaaatccagcagacgtactttagataaattatgttatattatgttatgactattttaaattcggactccagtactaaatgcattcttaataggcagaattttgaaataacatacacaaaacagcacaaggaccccttaatcatgcagctcaattatatcaaaacaacgagttatgttatttggatattggcaagtaaggtttcgacactggcaagtaaagtgttgctttgacactatcgctatttttacctggactcctgctagcttgttatcccaactaaaccaggtcggactcccaaaattagcaaattcttgcccattgtccccagtcacataatccaggtatgaatggtccccggttgcatgaaagagccagcttgctgcccacaagagctcatctccatatcctgttgaattgtaatatgtctggacctctgggatgcttacactgtaagaacctctgtatttatcagcaaaagcaaacagttgcttggcatgcttaagaagattgctcgagtatgttgggttgcttttcttgaaaactagagatgctgaagccaaagctgctgcagtttcacctgcaacatctgaccctggactggttgaattaacctgtgtgagaggcctcttctcgaccatgtcttcaggcctttcccaacacttatgatctgcttcaggattacccacctacaccaaaattcaaattgcaacaatgaaaacaaattcaagaatttctcactattatcctcccccacgcaatatagaaccactttttctactaaagaaaaataagaataagacaaaactagattaaaatttacagcaagaaattccagcacaggcaagctaatacaaacttggccgcaattaaatttcttaaagaaccaatgagactaagtaaagactagaaacctggacaatgaggacattatctgaaatgtgagcattaataaggtagtcagtgatccacttgagcgagtcttgagctggctccaactgatctactgcatccatttgatcaccatactcaagaatcgtccaagacaagacagtggcagtaaacgccattggaaaaccaaacttcatgtgatctccggcatcatacatcccttttgatagatccactttcgcttcatttccatcttttaaacctgaatcacccctccatgatatcttattgtctaccaactcaccagctgcaaaatcaaattacagacagaacaaaaaaaaaaacactcagctcatgaatgaaacaccctattctgaaacaatagcgttctatttaataacacaaacta

SEQ ID NO: 265292 - DNA, 600 bp, Cannabis indica
tatataatttgagatacattttgttggtttcttccaaaacttaattgtatacatcttaataataacttagttatttttatattgtattataatatcttattatttaaaatacatttgagtaacctccaagtttattttattgtagaaaaggtagaaactaattacaaattaagttttctttaaaatattaatataatttaatggtaaccaatcagtatataattagtatcataagtacctcaatagtttattttatttttgaaataaggaaaaaatatacgccaataaacctattagtctatttttcgtatattggaacaacaatttattttttgtttcaaacacaatgtgtgcctataaaataacaaactaactagtttattttttttctaggttgagacatcaaatctggttgtatacaaagtacatgactgtaacatatcttatagacttacataataaacctggataacaatatatgaacttgacaaaaatttaaatatagtgagatgtcttgctcacataaaatgtcttgctcataaggttattttgcatatatggctatactatgtctatactcatacattagtttattttggc

SEQ ID NO: 265293 - DNA, 821 bp, Cannabis indica
tagccttggccactgcaaggttgtaacattcccgagcagattgttgattccctctaagacaccctaccccgtttgtggttcgaaactttaggcacgagtggaatattgatgtgacagcttttaagtcatacagggctggtcggcctaacattacgttaaaggctgaaggaacatctaatatcagaaattgtgccatgatagttatgctcgtcggagcttgtccaactgtgaggggtagccggatttgtcctagaggcgcaactccttggccaaagaaaccatagacggactgaaggcatggagtcaaatccttgagctggagccccatcttctcgtaagcagtcttaaacaaaatatttgaagaagccccattatcgatcatggtgctggacaccattttgtttgctatctggactttcacgactagcgggtcgttgtgcggaaatcttatctggacagcatcttcgtcgttgaatgttatgggtggctctcctgctcgtggaacgttgggattcctttcttccacggccaggatgacttcttcttgctcgtattgagctgttcgggcatatctttctcgagctttgcccgtgtctccagcaatgtgcgggcctccaatgatgacttgcaagtgtccatctattggcggaggcatcagatcctgattattctaacctttgttggccttgacgtacttctataagtgcgggttgtttttcttgatcaggagttctatttcccgtttcaagctatagcatttgttggtgtcgtggccgtagtctccatggaaccgacaaaattttgtcatgtcccttttgctg

SEQ ID NO: 265294 - DNA, 662 bp, Cannabis indica
cataaagttgagaatacgctcaatcattgtgagccactgctcaaccttcatgacattaggacctcccagaaacactggaggtgcgtgcttacggaacctttcgtacaacgactccgtacggttgccaacaacaggttgttctgctggcaccgctggaactgcaatgacttgagcaacttgctgaggaggcacgtcaggaagaccctgcttcctcaacctctaaatctcttcatcctgctggcggattcggtcttgcatttccgcaaatctctgctcccaatctagaggagcttgtggtagatttacagggtaaccaccttgaactctgccacggccacggccgcgaccacgggcattctggggatttctctgaccgcctctggcctcaaccatgttaccctgacttcttgtattttgcggggcgtccattttataggacttggcctgcgaacccataagccaagtagttagagagcgatcaaaatttatactgctcttaaggcttaaaggcaacacacttaacataaataattataaatctaatatgcttcctaacatgctttaataatcatttaaaaaactaaaaaaagtcaatgaagattgtacatgtcttggcaagctttggtagacaaacctggcggctctgataccaaaattgtaac

SEQ ID NO: 265295 - DNA, 1656 bp, Cannabis indica
tagggattgagctggtgactcatgatgcgtcaagctgaattcgctaagtgttgctcattctgcacggctcgtcgagtattccattcgggatatgccagcgaggcatcctgctcggcatattgatccgaacagatgctccaggtagagtccacgtgtcaccattctcgtgatgccacgtcagagtgctaaatttaagataacaattatatattgtagttaaaataaatataatagatttataatttaatgcaatagttaaatttattaaaaatgttataaaattaaatatgaaagtagtgatacaaattttgcattaatgccttgtgattcaaatttagataagtgagaaatttagatcaacttttatttagagtaaattttctacaaaataaactatattttattactaatttgcatggagatcctcggtcttcaatgtggccaaaccatgttgaattcttgtattttttactaaaacaattttcaatttcactagctttattttgtttcagcaacataacttaattgaattttttgcggttaaactctctcaactattctttcacttgcacttaatcctctaagctcaaattttgacggtaaaactcttcaaactactaaacagtaatttaaggtgtcatatatttttaacagttaattgccaacataaactgcttatgtatacactcttatacatgtggcacatttatatgggtacacataatattattatttaaaaattataaaaattattgtaaattttatacttctttttatttttttaatattttatttttatttttataattttattcaactttaaataaattttaaaaataatttttaaataataatattaagtgtactaatataagcgtgtcacgtgtacaaaatatacacataatcagttttttgtggtagttaatcggatgacacctttaatttgcaattagtgtaatagtttggaggattttatcgccaaaatttgaacttagacgattaaatgcaaatgaaacaacagttaaaagggtttaaccgccaaaaacacaacttaattatgttatactatgtttggattcattaaatatataacatatttcaaaaaagttgaaaatgaagaaactccatcgagtgcttttgcgaacaaatagatctatgaggagaagaagatgattgtaggctacaatacattattctgcgcctttagtaaactagctcttctaatgatcttcacttaaaaccttgcaaaggcaagagatatatagatatgcatttaacaaattaagcttcagatggagaccttatgaaaataaatttgaggacaactagagagaacctttttgaaccaaaaccagcataactagtgatttgacactatagtttggattagtcaatcaaaaataaattaaaattaattaattagttcaaaacttggggagactaaagagaaacgtttttacattaatcccctatacttcatataattatagttgaccttttccttgaaaagtttaccaacaaaagatccatacatggatatttacatatcttaacagtaacccactttctcttttcaaatcttgtatctatactaattccttggacaaaaaccatgtatctacctatgaagaagttgaaaatatataaatatacata

SEQ ID NO: 265296 - DNA, 482 bp, Cannabis indica
aaacttagaacaaaaacctggaccgagaccttgactaggactgggacctgagacctgggacaggaacctagaccgggacccgtactaggacctggacttgaccttgtcctaaaccctccccgggacctgagacccgcgacctagaccaggatccagaccctgataaggacccaaacctgaacccagatcaaggctaggaccgagacctggtcctgacacggactaggacctggactaaaacaaagactcgggacccgaacacgaacctggacctaaaccaggagttaggaactagacttcgatgggggacctagaccagggacctaggccccggaaccaggacccagatctaaaccgggactaaaacccaaactaggacctgacctagacctgggaatctgaagtcggacctagacctagacccgaaaccttccccggacccaaaccaggataggaacatggacacgaacccataccaggac

SEQ ID NO: 265297 - DNA, 702 bp, Cannabis indica
ccgaactgagactaggactcgaacccaaacctagacctggacccaaacccacacaataacaagcacctggacccataataaagatagggagctgggaaacagaacaaggaccaggacctagtacccgacccagacgcaaacttgaacctatgacctagctcgtgacccgacaccagaaatggaaccacactgggacccgagattgagatccggatctggacccaaggcttgggaaaatcccgttatagtgtttggatttgggactcagccccggagccgaaccctaacaaggacccaaacccacacccggacctaaacctagtcccaaacccaaaagtggactcgaactcgtaccctgtgaaaaaaaatttgaacaaaaactggaagttcactaggactggaacgaggacttggacatggaatcctaactgaaattggacgtggatccagaaccgtaaccggactaggaccaagaccccaaatcagacttagaccggaattgggagccgacacggatcccaacccaaacctggagtcggcacctgaacccgaacctgaactcatacctaaacatggaactagactagggacaaagaaccagggtcgggacctagagccacaaccgagtctcgatcccgaacccaaattccaaaatgggacctgggccctgaaccagaaccagaccgagacccgtgacagtga

SEQ ID NO: 265298 - DNA, 817 bp, Cannabis indica
attatcctccaaatatttggggtcctttttagttgagaggaataaaaacataagaatagaaataagattgactaaaaattaaaatgcataaaaattgtatgtccttccatttcacaatagaattcattctacacatactttaaaatgaaacaaacaaagaaataaaatgaaaattgattcctttctattccattccattcattacttccaactaatttgtacccccattaaagtaccaagttccacaagcaagctattattccggggatctccattgaggagcataaaaccctaagaatgcaaccatagtgtttacttttgcttgccaacatttgtgttcaatcagatacaaaattcaaacatgaataatattttcatacctcaacacacagtctcacacacacacaccatacaaatattccttacattttaagtaatgtgattaatttcaaaggtcaaaaattaacaaaaccaaaaagtttagtataaaaggaaaaagataaagaaaagaaaagaaagaaagaaagaaacccgatcaattctctcctggtcttctggggtggcagctgcgccacgatcaagaggggcaatggcctcgagaagctcttccttgagctcttggcgttttttgggaagagtgaagaaaagaatgagaccctgactctccacttctggggatcagaagtagtagttaacggcgtgtggaaggcggtgaggggttcggaggttgggaagtggtgatttaatgacgttgatgtcggagaagaattgaggagtaatctcggagctggggaagaatggacggtggcactggcga

SEQ ID NO: 265299 - DNA, 741 bp, Cannabis indica
cctaacctattccaggtccataacttattcccaaaagtcacgtataaatcagtagggtacccatacttcgaacatcaagaaaatatgaaaaaatagggttctaaacaccactagaaatagtctgccattttgtaaaacggttaactgtttccctggggtttcctagcaagaaacgattaaccgtttgccccaaaatggtgaatcactttctgcaggaaacaggaaacccaaattttacacctcttgaaactctaccgaaacctaaccaaatcattccaattaatttatttcttgatttaattttctaaattaattgtcaaaatattctaacaattaatgtggcacaaatattaatggagtatctcacctataaatatcaggtactggtccctgagctcctcattcattttgtataaacatcaaattctatctaaagagagtagagaagctcgattacttacactaactcattttcttttcttttgtatagatttgaagcccgtgtgggattgaagatcaaagaatcattagttagatgtatttcgatctcttgtgtggtttgcatatatgtttgatatgtttatattatttcacattctatattgattgtatatgctttatgaaaattattttcatataataatcatttcagagtaaaagacgtgtgttaaaggtcgataagtggaatgagataaataataagtaaatatagggtgtgttagtaatatttttttaattagt

SEQ ID NO: 265300 - DNA, 2576 bp, Cannabis indica
aaaaccttgtattattgtgtgtgtgagcttatttttgggatcatgagtagggtttttatatatttatatagggacctaattaataaaggctgtactactcttgattgatcagtatagtagtatagctatagataactattgtaataagtaatgggatgaaataatgtcttttatttattttttttattgtgtgtaattagtgcaactctgatcaaggtattcgcatgcggattggagttgacattctgtccacattgttttatggttctctcaagaataaatgaaatataaactatatattactatatttcttataataaagaggattattcttcaccctaactctagggctttactcttcttttagacctataaataaaaatatatgctctcacctttcacctttgcttccgctttgtttgatcttgaggaccaccttttgattttctctttgcagaatattgtgctaattaaattttttctttgattaattagctgaatgtcattttcttaattattatttttgttttgattatttatgcatactacatacacgtatacatacataccttcatacctacatacataatttacgctatattaatatatatatgactgctagttacaaaacagtaattaaaaggtataaattagaacgaagaagtgggactttaaactatacatggagttatatattttttcttgtgtatattttattagtgtgaacaacttcttttctgttgaagtacgaacactcacatatacattacctgtacttaaatgttctaataatatatatatatatataatatacctcatttatatcactagtgtggtgtgtgcacatatattttggtgataatattataattaatctactacatacaatttgttcatgtgaaactgattctctatcctctacctctcatttaattacagatagtatgagatatccaaaacagtactatatataaatcacagttgttttcccctttatcagagagagagatagattggattcacgaaaagttttatttaattttcttctatgcatatatatattatatgatcactgatattgatgaaacagcttttccatgcccaagttaagcccctttcatgatcagcaatcaacactgctgtgtccattatctgaccaacacttacaccagacaaaacagtgaaaccttagacaaaagtcttctcacagtgaaaccccaggtcccccccttctttttttctcactctatatctcattattgttgcattaagttttacattatatatgtttcacctcacacatatatatatatatatatgacatcttttcctgacaatcagaagctagctcttaaattaatgcatgcatataagttgtttgtatataaaactaattaataaagctggccggctctctccaaaaactaaagtatatatttcatctatataatatttattaaagattctctgattgacactaatataatctttcagtagaatcccaaaagaagatatatccaaattaagttaaagtacagattttcagaaaataaaaaccacaagaaaacattagttttgttagggtttatacattttgatgtgtcaaaatcagctcgcggcatattctcagggacctcacaccagtcataaacatttatatatatgtatataatatatattatcgtggaaattaaactgtgttatattatattatttcttcgacgatcatgatcaatttgatgatattaataacatttttcatattaacaaccatatataatatatattattaagtgcattcctagttgttatattcattccctagctaatcatgcaacatcatgatcatttttcttacacacctgacattaatgacacaaaataaaataaagagctatagatatatatatagtgtcactgacactgtagtaaagtgttagtctcattacaaataaaataaaataaaataaataattaataatgaaccaaataacccttctctatgatcaattactatattgagagaagagtagtatagtagtagtagtactatactattgcaactaacgcaaaaacacacacgagcatagatagatgatcagtctgaaccatatctggatttgagtcacatctattattatttgtcatttaattcatcatcatcattatcatccatcgatcgatagatcgatctacgactcttttctcctctgttaactgtcagctaaaacccccccaccccccaaaatttctcgagatcaccaaaagcactaactttatttatttatttcttgttgcttgaaaataatatttggtgaaccaaatctaactcttctgatctcatatcccccaccatatcccacatatttaattttttttttttctactcctttaataatgatgagaatgtagactttatttatttattaatattgtttttatatatatatatatgttttttttttttgaaagaactgtaagaagttcattgaaaaagataatttggaatcacaaagggggatccctccctacacaaaaaaaccattgcagtgagcattgttcctggcccatctagc

SEQ ID NO: 265301 - DNA, 517 bp, Cannabis indica
gtccccaacactgactacgggtcagagatctcggatatagtcctaaacctggttcgagtcctttgtaaatattataatacaaactaatacggactatttattatatattaaataatacaacttgcattgtattaaaatttttagtcatgataattaatacaatagattgctttatctaaatatagtgttacttattatttaatacaatactacttttatacggcctaccaaacgagcccaattattttgtgtcatttgcttgttagcttttttaatctactcataactttaaaacataatttttacttgcacttataatctctcaaaaaaaatgacgaaaattagaactcacgatttttaggtttacaaattaatagatcttctaattaaaaaaaagttatatttttgcattttcacgaaatgaaaaatacactttaatattttaaaaaataaatcttaaaaataattttaaaaattctattataatatttttttaagaatttttctcttacattta

SEQ ID NO: 265302 - DNA, 637 bp, Cannabis indica
ccaagcataggtatgatctcacctgattaggtaatgcaatttttctggcaacgtatcgggcataggtacgggtgtcagtaacatatgataagtatcgggcgtaggtacgggatcgtccgattagacgatgcgatattggtgccagattatggcacaggctcaactgattaggtgatgcaattttcctggcgacgtactgggcataagtacaggcgtcagtgataaatgatgagtaccgagcgtaggtacgagctcacctgattaggtgatgcgattttcctggtgacatactggggtaactacgggcgtcattgatatacgatgagtacagagcgtaggtacgagctcaccttattaggtgatacaaatttcctagcgacatactgggtgtaagtacgggcgtaatcgatatatggtgagtacccagcgtaggtacgagctcacctgactaggtgatttgattttcctagcgacgtactgggcgtaagtacgggcgtcagtgatatatgatgagtaccaagcataggtacgagtgttgggatttatgccctaaataaacccatttcaatataatcaaatttactaattaataaatatgaaaaataacatttttatgttgcatggttcacatgattta

SEQ ID NO: 265303 - DNA, 1186 bp, Cannabis indica
taattggttacctttaagtaactagttagcttttctcaatatttttttaatttttttgtataaaataatttcttttaaagaaactatattttattttcacacgtataatactcataaataatttcgagtataattagtgcaatgattcttaattacatctgtggtattagtaggcaaggcaccatatcccataacattgtcttgttccaatacttcacttaaaaaatagcatatacaaaaaattagataacaaagcttattctgaaattaatcacacaagatacaacacacataactaaatattcaaaccacaaagtactctaatcaatgtcatttgacttaatcccaatttctagataatatatataaatatactccacaatatatatatctacacttactatatatatataaattcaacaccaacaaattttgacaaattgaagaagagttccaccaactttactagaccacaggttcacaactgcataaaaatacaatacataaattaataacaaatattattaccctttaatcaacttataatttatgtttttttttaaagattttatgtagaaattacacacatataattataatatattggaaataaataatgaagtcgatttatttattaattactgtttcttcttcttggatgaatgttccttctccaatctctcgaacaagcttccatcataaacacctctaacagtctctttgtgaagcaatcccttcttgtctttgcatagaatatatagaattttccattctgtccatgccgcaaccctaatcacaaaatttataataatccattaattaatcattagctataagtatgtttttactaggggtgttcatcaaaccgctcaaaccgcccgcaccacaccgcaaaaaaaaatgcgggtttgcggttttgaattgttaatatgcggttcaaatcgcaccgcactgcacattataaaaataccaccttttatatttatttaagtccaatatgtgaatgtccaacccaaagttcactaattattgtaggaaaatttacatagtatactagcttttgccaattttttttagctagtatttttgtaggtcggtagttttttttttactttttttacttgtatttttttattaaaatttctatactgcagtatactgtgttaagtttctactagtgttctac

SEQ ID NO: 265304 - DNA, 576 bp, Cannabis indica
ggttgaagctaaaagttaaatttcttcacttgaacatgtgattttgagttagagattgaatttttgtgttttgaagcttggcttatgttatatttatgttattgtactgttttggaaggtttgagcaggtttggtggaggtttgattagtttttggggtgaaaaatcaaaaatcaccatggctgcgaggaaaaaaaggcaggccgtttttctgggtgtctgaaaaacggtcgaccgtttttcccaggaaagggggattttgggtttttctcctcaagtctgatctgatccggggtgtctttcggagtggaattcagggcgttatagagatggttaagctagtttgatccgggggaaagtagggtgtgttcaattatgagaattagagttgattatcaaaaatttgattaaggtttttattgagttttggttgtcgtgacataggaccggaatcgcctagcttgttttccactcaagtcggcccgtacgcttgaattcagaactaaggaaagaaaagtggtaagcaccgtatgtggttaaatattaatggctgaaaggttatggccttgattattat

SEQ ID NO: 265305 - DNA, 844 bp, Cannabis indica
atgtcgaaagtagacaactaacaaaaatatataacaataatatatcatgtctaacggatcatatattaatttaaataaaaaaaaatctattcttaatttgaaaaggacaaaattttcacaattctaatcgactaggcgtattatgtcaatttaagtaatatatcaggaaatgtctattgattccttattcacgcggtttcgaacacaactggtatattccaaaataattattactcggacatctttacccctagccatgaacctcctttgggtttttgattgattcaacttttctatttttttatttccaatccaaagcgaaaaagaaaaggaaagaaaaaaagagaagttgctaacttgaaatcgaattattaaaaatttcgttgcaatcaatatagtaatagtaagtaatacaaaattttttacttaaatattttatttaagtattttgaatttataattgttgtacaatattgagattttttgtatgatattgttgcccagtccattttctttctcatactattattaattaaatttttagcctggaaatgcaagttcttagtttcacgcgagttaatccgcttttattctttttcgaatttattttgaattctaaaaattaagatagtaagctacatgttatcccatatttgactaaatagatatttttgctattgctgaagtctagaaaaaaaaatagaagaaatttaaccaagtaatatctaaaaaatcttgtttttttttttaacatgaagagataaagaaactattgcaattgccagaaatactaagcccactaaaggaacaaaaatagcagataagttgctgatagttgtcatag

SEQ ID NO: 265306 - DNA, 538 bp, Cannabis indica
ataaaaaatcaaatttccctagtcattccactagaaaaagcatttcattggaatgtcattccaatactttaaaatgtaaaccaaacagtaaagaattaaatgaaaattgttttctttccattccatcttatttcattacctccaactaaacgacacctaagttcagagtactatattatcaaaaattgaaaaattagagggtccttcctacaatagggaaatttgattttctatacttaaaaaactaatattttattcttaaaccaatacattttaaactaaaaaaatatgacacttttttcaaaactccaaaaatacccctctcataactcaaacactttctctctccttccctcaaactctctctgcatctctctttctctctctatctcggcatcccacaaccgccccacccaaaccatcccacaaccgccccacccaacccatcccacctccgacgaccaccgaggaccacccaccaccgaccacgcacgacccagcccctctctctcttcgtctctctcaaaaccgaaaaaaa

SEQ ID NO: 265307 - DNA, 702 bp, Cannabis indica
agaaggatgagtgcgaaaaaaagtaattattgagttaaattatttgaaaactcatttattactttattatttttattttaaattaaaagaaaaaaagtataaatactgtagtaaagaaattagaaatgtgactcataatattataaaggggttttttattttacacttcaaaaaaaattttttggtatttttatagaattctacatcgaaatgcaccctattatatatatgtgtgtgaatacactgtttaataagactaaattatcacatgcaagtcaatcaattaagtgttgagattattgcttaaaatttatattaattttatcaatatattgtaattatattttcatatttccaaatcacttgataataagattttgtcaagttcgactagggatggcaattataatcgcgaatttgggtacctgcgaggtacccgcccctaatggagcgggtgcgggggttgactttcgggggcagggtgggtatgggtttaaagatttatacccgagtcagaaacggggcggggacggatgaatagatactcgtcccgaacccgccccgatatggtatatgtatatatttaagttttaaaatcataactactacaattaaaataatttcatgctttaggctttttatcgattatactcttttttttttactatacacactattacacttaagtttattgttttacta

SEQ ID NO: 265308 - DNA, 997 bp, Cannabis indica
ctttctatgctataaactcatgtgtttatagaattgttatccccttaggttattaattctggacctactaaccatgtttgtttgtttttcttcttatttcagctctagctgcttgaactcggatgctatcttagcgagttgaataagatggttggacagatgggtggagatagtccaagatgaagatgaagctcggaatttttttaaatgattatttttgaattaattgttttagtttcagaacaatttggatttcaattattagtttgagtttttattccctattttcatattgttgcaaacaattccttttaatttggagaattttataataaagttttctactttgaaaatgaattgcatttatgaattgagcttcatttactttatcttgtgtatgccagtaccaattatatttatatgttttaatgtttgtatgtgtgtgtgtttttattattgatacaaatttatattatattcaactctgtaaagagttaatactacataaacactcagaatctcaaatctaggtttatgaataattgttaattctaaaacagttattaagaatttctttaatagaaagatcttttgatctgatataggggtggaaaaagttaagaataatatgcagttaaccgatcttttatatctattgaactttggattatattcataactccacattgtctctatatcactaagagataaaccatgatctctatatcccttaggggtggatcatgatctctacacacataggggtggactatactattgaaatatgtagttcattttgaactctagactatgcttaatacaccacagtactctatgacacacatattttttaaacatggatgtaatataataaattagctaattatcagaatatattcttgatcttaatttatgttccaatttatatttactgttgtaataaaaattgataccagtaaaagttctttgacattgtatcacagtaccttatttgagt

SEQ ID NO: 265309 - DNA, 685 bp, Cannabis indica
tattgtattaaaatatgttttttttctttttttcttattttgattatgtttcattattatttacattattttttgttaatgtttaggcaaagttgtctgattccataaatgatagttctgagcatattgttgattttataagtaaagaaaaaaagaaaaccctgttgaagtctgtgacaagaagaaagcgcccgatggaaccgagtggttcttctattcctgctgcccctacggtaattataacatgaaactggtttctttttgtcaattgtatattttgttataatttagttttattgttgtgaaactggtttttatcccttatatatttatttgtaggttatatatttcattattaaactggttttatgtacatcaaagttgttttgatttttgttgaaactttttttttttgtttttgtatttgtttgtttatttttgttatttgatattttaaattgtttttctgtttgtttcttgaatttatatctcaggtgttttattttaaaattaaacccaaaaagagattcggaggtgttgctcaagatttcaacgatacaagtgtcctccttgaaatgaagttaagattttcacgtgagcaagaaaaaatctttcgaaagacgccatttgggtttttgtttgatatgcatacacttgtttttcaaaaagaattggtgcatcttat

SEQ ID NO: 265310 - DNA, 961 bp, Cannabis indica
gttcgtcgttatggtgtctcaaagtctattgtttcgtatcgagatccaaatttaacatctagattctgggagagtctacatcgaggtattacgactccttacttagttcatccagggtcaacaaagatgtatcaaggcttaaaagtcatgttttgttggccaggcacgaagaatgacattgctgagtatgctgctaagtgtcttacctgccagcgaataaaggctgaagatcagaggcctgcggggttattgcagccattgaacataccatagtggatatgggaagatattgctattgacttcattttaggttttcttagaaccactggatagtttgactctgtgttggtcatagtggacaggtttacaaagtcagcgcacttcctacctgtttggacgaatttctccattgaccagttggctgagttatatgtcagagtagattgttcgtcttcatggtgtctcaaagtctattatttcggatagagatccgaagtttacattaagatttcgggagagtctacattgatctattacaactccttcctcaattcatccatggtcaacaaagatgtatcaagacctaaaagccatgttttggtcgtgaggcatgaagaatgacattgctgagtacgttgctaagtgtcttacatgtcagcgaataaaggctcaacattagaggcctacagggttactgcaaccattgaacataccagagtggaaatgggaagatattgttatggacttcgtggtagatttacctagaaccacgggacagcttgactttctgtgggtcatagtggacagatttacaaagtcagtgcacttcctacctgttcggacaaatttctccattgaccagttggctaagttatatgtcaaagaaattgttcgtcttgatggtgtcccaaactctattatttcggctagagatccgtagtttacatcaagattctgggag

SEQ ID NO: 265311 - DNA, 623 bp, Cannabis indica
atacctacccttgggaacatatatgagagcgtcgtctgtagaggcacatgcagcttcccatgcacgtaggaatgaatcagtagagtctgttatgccatcaggtttcgccccaaaacctatcaatacattgaaagatgtagtggttggtgttgctgcagctgacaacataaacatgatcatagggcaaagaatgaagctcatcatgaaaatattattggaagacatattatacttaggagttatgatggtgtgtatatagtttgagaaaggtataatgatatatggtttagatggagatataaattgtagtgtttgattattattattagaatggtatgtgtgtatttatattgtatgaagggaaatgtttcggtttgattagggttgaataaagtagggaatacgtacattaatataattaattaattaattaatagaattagtggaatgtttgctaattcattaaattgttatacatgcatgtaccatatctaatcttccaatgaagaaagctgcaccatttaataatatatatatcccatttcaaaaaaaatatatatccataagtatatttatattaatcttttctattggatcagttaattaatagttacatcatgtga

SEQ ID NO: 265312 - DNA, 1185 bp, Cannabis indica
ttacgtagcaattcttaattagtttaggtcattaaattttttaaaaatatattaataagaaaataacacgtggataattactggatatttaacggctaggtacttacagaattttaaaattataacttaggtatttatgccgcaaattaactttaaaaaaaaaaaaaaaaaccccaaattatacgattggataggatcattcccaaaattatcatttcattcttgagtgttgtcaccttaatgaacttaatgaaactatcgttttattcagaagatgaaaaaattaaaggaagcttataataatatatattttttgcacctgatttataataataacattatttatatttatgatatgtcacgtcagctaaatttaacgttttttttatgtttttcttttatgtttatttttttgcgtttttaaaagtaattttttagttactaatagtgttgataagaaactaattagttacatttatataaaaaatttatttttatatcatataatctgatatacattttagttattctctaaaaacttatttctatacatttttgtaactaattaatttataagttatattatggtagattataatttaaattacatttaggtaaccttaaaaaatattttcgaaactaatgagctgccatgtaatagaacaagctaccatttttatataccgcttatttaaatacatttttgttattttgaaaactaattagttattatataatataattcaattaataaaattttaaaatcaatgttaactaagattttaaaaaaattataaaatagtaactaattactatattagtaatcaaatggtttcttttctggaaataactaaaaaatatatacttctctacttcttaaaatgttcatattaaagagtaaattgcaatattatctttttgggactttttcatttttacacttcaaaatagttttttctttttcaatttttacgaaagtctacatagaaacatctattgcaactaacagagcaacctaaatcgtaacccaaatcgtatagcaacgcatatagaaactaccggagaaactactttagaaacacaaaccgtaaatttgaaaaaaaaaataataaaaaaaaataagtatatagagtaatttctctatcttttttagtctcatccaagtaacgacgtgatcagaaatta

SEQ ID NO: 265313 - DNA, 1161 bp, Cannabis indica
ctcacattatgtaggaccaaggaacagatttagctcgcatataccaagatatatgcgagcatcctctcgaccctcctgcgaaaacgtagagatcgattctctataatgcgggctggtctcgatgacccaacagcctcgataaaccaatatagactctcatgtcttggttctatcagctcgttatgcgatgtccgtaagtgcgactatataagaacgcagacatcgtgttaggtgtattctaagtccacgagcttacgcaagaatatgaacagccaactcgcacattagaagtcgcatacgttgctgtatttagtgaatataaattgttctttatttttaatgtttacgttttttagcttaattattgtaaatcaatgtacaaatggattgacaatgaatgcaatccttgtgtaaatgattggacacttgctttgtatataaaggagtgatccaccatgaaatgggacacctacagaatccttgcaacagtggactaaagaccgtgatctgactgaaccactatattcccttgtgttctttgtatttccagttgttgttaagtatttgtgttcccggttcgagtactcgccattctaggttgaatactcgcacttattcatcatattattattattatcattattattatcattattattattgttatttgttttggtgctataaaattccttcaacaacatttggccccgtctgtgggaacgagaagtactttcttgctgatttagagagagaattataatggctggaaaccaagcaaatgggggtcttaacaacgaatccatcaatatcggaataatgaacgttccactgtcaggaaggagagtgcctcccgtagatgtcatcaacggcagagtaggtcggggtaatgtaagacctctcaatctattccctgaaactactggccctcacgctggggaaacgtttacatcggcagccacaacgggacattttccaccttttactctagcggtggtatccgaaggtattatccaactgaccaccgatcagtacactgcaattcaagactagctgcgtgctctgcaggccgaggtggatggacaaaacaggactcgacgtcctccccgagtacccgctactcgcagaaaaccctcaggtaactaattctagatgtcgtaataa

SEQ ID NO: 265314 - DNA, 791 bp, Cannabis indica
acctactgcccaacacactcactgacgatgtgtttttgttaaatttttaattaagaaaaatgtttaaaaacttactattcttagctatttatcatatttctcacaaaacaaagaattaataagcagtgtgattctatattttaatatttttataaaaatagttacgctaattaaatttagacaaaaatataatattttgaaataatttcaaaaaatacaaaaataatataaaaattacaaaaatatgattgtacagaattttaattattttttcaatttttatattttatttaaaaaaatacgatcttttaatgtacttctatatataattttataattttatttacaaaaatttttttagggaaaacattaaaaaaatacgacaaaaaagtataaagtaattaattatcttaaggatgttatattttttaatttttttagatttatctaataaaataatttattcgaagaaaagtcatattttttttaattcttcctttttgaactattcccttttctttctttttcttattctttcagttgtgtcatttttccttatacattatagcatgtatctgcacctagagaataatgatctgaactttattgaatgaaaaagaagagtatttatacaaagtatttgggtaaaagagaagtaacacattctgctaatcctaactgaaaagtactgactgatatatatatatatatataattaggcctattcagattcgatccaattatatattgaatgttagtattttaccatccgatccgatccaattgatttc

SEQ ID NO: 265315 - DNA, 533 bp, Cannabis indica
ttgatgtagttgttgtccaaaacgtctttcttcttctcttttatcatattcacgatttcagatagagatttctcttctagttctccacccgtgagttccactgcagatgtcaaaaatgcattcccataatacccttcaggcagaggaggatctatgagtttcctcagccctgtagcgaaatacagacatgttttcccatcatgattgagctctaaagctctcaacttggctttccaaacgaaggcggcaagtatttcaaatgtagtaacattattagaagaaccaccactgatgatctcctctttgagtcttttcaagcaatcactcttcaagtaaaagatctcatctacaatgtcggaagagggcatgtaaggtgacttggcaggaggacacgtgctgagcttgagaggctccttgatgggtgttcccacaagtctttctctttcccatactggcttcaccgagagttcttttcctttggagagctcagccaaggccttgaaaatttgggcagccccgaaaccatcggagac

SEQ ID NO: 265316 - DNA, 1001 bp, Cannabis indica
taaaacatgaaaattaaatatgtcagagattaaataacaaaagttagatgaagtctttaaaaaccaaagacgtaaaaagtactttaaacttacatcgtctccaagccatgtcttcggagtatgtagttggaagaaccaagctgaatcgtgtctactagaagaaacactctcgggtacttgttcccaatctggccgagaacccaactgtgaaaagtcgtgagcagctttcaatcaatgacactaagtgggtctacattcacaagtgtcttcgatgccctagacttcttcttcatttcaatgtagtcatcgaatcacctaggccactttctcttccttcggttctccattagttctggagctgtctctaacacctgtaccttagaatcttaagtatccccgatgctggtgatattcatgttctcaggtgtactaaacatatcatcatcattcagtctataattatttgggagaatgatttcattttccggtgactgaggatcttcttctggttgtggctgtggttgtgactgtatatctggtgttgcccttccagtatcttataggagtctcattatggtcttcaactgatccataatcgatgtctgtcctcttagcagagtggtctgcccttctctcaaagcaatttgctccctctccacagtctccaaccttgccaagatggcagggtatgctggttcccgagcctctgaggtgttgggaatagatgctgacgggtgaagaggaggaacctgttatgctacagatggggcaacaccagactcatctggtagtgaagacggtgcacgtggtggacacagtgcaggtggtgtagagtctctaaatatttggtctgcatatgctcgttcttccaatgtcgatgtaagcttttcggcttggcttcacaaagcatcctgtgttggttgctcatcgtcacccaacataagttcctccaagtcaacaataaaggcgcctgaacgccagtgatgcaactcacaaactca

SEQ ID NO: 265317 - DNA, 950 bp, Cannabis indica
gacttagacctagaaccgaaaacagaattaaacccagacccagaactgtaaccggaccaggtgccagactccaaccaagacctagacccgaatcgggacccaaacctagatcccaactcatacctagactcagtcccgaacctagacccaaactcagacccaaacatggaaccagactcgggacacaaaattggggtccggacctgtaaccgcaccccagtctcggtcccaaaccaaaactaagacttgggacccaggacctgaactggaactagaccgggacaggtgaccgggaccagatcagggactcaaaccaggacccgaacccggactaggaaccaaatgcggaccctgacccagacccaggagacggaactggaacttgaacaagaactgcaaaactaggaccctagaacaagattaggattgtgaccaggaccaagacctaaacgtagaactgaactcagagctagccccaaacccaaagcaaaaccaaactcgagcccaaacacgatcgtgtacccagactgggagcaagagccggacctggacctagacctgggacccgatccaagacccagactcggacctagataggcatcaggatacgaacctagattcgaacccagacccagacccaggtcgggatcgaaactagggacctagatccatactgagaccttgacccagacccaaacccagacccagacctagaaccggactcggacctagactcaaaccaaggcttagaccccaaccaggtctggacacaaactcgaactcagacactgaatcgaaataaaaactgggactaggacccaaacccgaacatggaccaagatcaagacctaggacccggaccatgacctgcgcctcggaacccagacccagatccgaacacaggactcagactcaaacttggaccaggactcaaacccagatcctgtcct

SEQ ID NO: 265318 - DNA, 2333 bp, Cannabis indica
gaaaatataaaaatgagaataaggattggaatcaaatttaaaatgtatttctttttatctggtcattccttctatttcaaaattgaatagccattccaccaaaatgatgaaaaagctattctattcaaatattttaaaatgtaaccaacaaaggaatggaattgaaattgtttcctttccttttcattctattccatttcattacttccaaccaaacaccacctaagtttcggtttccatactaagcctgcagttacttgtttttcatgccaagtgaagaagaagaaaaagcaaagaattttacctcaagaaccaatgttgttaccataacggtacagacattgccatcgatgttgactctatgacgcctaactttctcaagcaattgttggatgcactcaacaggatgtattacctcaccttctggtgaaccccaaaatgtgaatgattcctccacatcctggaagacacaacaaagttagattgaaaaaaagaaaagatcaaatctttatgcattgtaatcccaaaacctgttaaagaaacaagtagaagagttttgccttaatgaaagcctttggatttgggcacttttgttgtttagatagcctcaatgtgctctcagcagctgtgcgaccatcccgacgagcaacggctttgaaaaattctagtaaatttactctgtcacttccagatagttcagcagtcatgcctacatcgaggaatacgacatgaggtttagatttcaaaagccgttttcgaggagaatcgctctgacctacccgaacaaggatatttcccggatgcatatctgcatgtataaagttgtccacctaaaaaaaaatattattgaaattcagaactttgtactgcaaatttaaaggaacgaaagctcatgactgaaataaagataatttcaaaatatggtataaaaagtaatccacttgcataaaagaaacaagcctctcctttaaaatttccttttaacaatacaaaataaaggtgatcaaattataaacataataacaaaacatgatttcttggatgtcatagtaagatgtatggctataaaagaagtgactccattttatatgtggtattaagtttccacacattatcagttactaatgtgggattctctattatttttgtattttttattctaacactatcaaacaacaataaatgctattacacataattttcaaaatatattcatgaactgtgttaggaattgatgtctatattgcattatcaactaattagcactacaatttttgaaatcaaaactaacaatgtgaaatgctaaaatttgtaaaataacctcacttaattaactctatgcgactatgataggcacagtgtaaatctatgatcgtacattataatttatggtcgtttatgcgaccatacaatattttgctcataattttttgtaaagttattttgctaataaaaaatttcaaaaaggctatttttacaaaacactctaatatttatcatcttcgttattcgggctacagttatttatttatgtgtatcatcaactgaaaactagtaatgcatgtaaaggaacaaagttgcagccactacttaaaaattaaggaaataaccaactatagaagtgatattttcatagaatgatcatgtgtaagaaatgttaccaggagcatctttaggagtgcatttgtgccaatgtgagcaagtgctgatttgattcgagtatggccttcgagttcatcaacatagtgtgaaacacactccccttgctcaaaagtttccaccagaacagcagggtgcacaagcggatagacaggcttagggaatgaaacatccttccattggcggaaattgtatataaatcggctcaagtgagcagcttctcttgcgagatcaacttgggacatcatgaaaaccgcaaactgctgtacactttcatccagtcttaaccatttcaatgtaggaatgaaattagaagcttttgctacaaaatttattatcataaaatctctcttaatcaagtcaccaacaccaggatgcctgactttcacagcaaccgtcattggcttaaccttttgaccagggtaacgaaacctcaaagaagctcgatgcacctgagcaatacttccagatgccactggtgtctcttcaaaattctcaaatatttcagataatttgcggccaaatgctctttcaatacttttctttgtatactcaaaactatgttcaggcgcttttgtatgaagctcagaaagctggttgcataaatcccgagggaaaagatcaggccgtgtagcagcccattgaccccatttgatgaatgctggccctgcttt

SEQ ID NO: 265319 - DNA, 4257 bp, Cannabis indica
acaaaatttgtgactaaagataaaaaagttgcggttaattataaattatcgttattatattgtgactaaaaggtctgttgctaaatgtattaataacaaaaattacaatttgttgtaactaaatttatttttagtcacaatatttgttgtgactaaaactaaattagtgacaatttgtaactaaatactatgcattagttacaagtaactttttgttgtgactaaaaattacatttaatcacgaaaaatttatattattactaaaaaattgtcactaaaagtagtaatttttttataatcatacactacatatacacgtataaattacaaacaacaaaaagattagatgcgtaggtaagttacttgctctatttgtgtgtgcatatatatatccatcattactctaaaagtcaccacatatcatcatggatgtcttagggaaacataatcacgtgatcgatcctaggtggaaactaataaaactggtcaattattaatatataagggtcccctaagtggataattaatgctcgtagtagtggtccaactcattatgacatgaccaataaaataatcaaacgagaaccacctacttcaacatgtagccttatcaacatatttttttgatgactcaaaatggaaagaacaaatgttttattttctataataataatatatatatgaatgagatgtctacgaaaaaaatggtaaccaataaccacactatggaatacgcaaaagagttgatgatgaataacaataacaataatgattgtagaggtcatttagttcttgtaccatgtcccttacaaggccacatgagccctatgcttcacttagccaaacttcttcactctagaggcttttccataaccattatccttgtctcctcaaatgagctaaacccttgccaatatcctgaattcatgtttcattacatggataacatcatttcctacaattcctttggtggggatgttatgctctatttgctgatgcttaataacaagtgtacaaccccattcagagattcattgttgaccttgaccaagcttcaatttggtcccgtcacgtgtgtcgtttacgacgccgtgatgtacttttctgccgccgttgctgatcaacttcagattcccaggattgttctgcggaccagtagcgcctcaactttcttggctctatcacttttgacccacaacgctaatgcctttatcaatcaacaaccaaaaggtatatatatatgcatgatgatgcatgtgagagaatacatattataaatatatatatatatattataattgttaatataaatcgtcatgtacctacgtctacgggactagacgtgcgtgcatgtatgtatatggtatagtcacatacatgatccaattattattacttggcaatgcatatatattgcagagttttgcgttgagatctatttatttaatacaaacttatatcaaagaagaaaaattaaagagtactatgtattagtgcatatatgcaggtaccgttactcaaatttaagatttccatctatttcgaaccggactctcaaaaaaatatgatctataaaataaaaatcagtttcataaaagcagaatcgacttatagcaataaattaagtagatgtttaaattaggaattgtggacaattaaagtcaaacaaacggaagaaattctttacacaaaacattttgtgtacaatttaattccacgtaaaactctttatataaatatatatatatatacttgtcactttttatttattaacaaattaatgttatatatgaaccacagagcatgatgaagcagaggaagcaatagttgcagattttccgatactaagagctaaggacatgccagttttcgagacatctgaccaagaagccgccgaaaaagttctagcaaaaattcaccatggaacaaagacagcctcagcactcatatggaactctctttattgccttgaaaaatccattttcaacagagttaaagacaaaatttcagctccaatctaccctatatgcccaagactccaattacaattttaaaaataataataaccaagtaataacaaactcatcatcattcaaaagcttaatgtacaatggaacttgtagtgatgatgatgaccaaagttgcatgtcgtggctagactcacaaccctccaactctgtggtttatgtgagcacaggaactgtagtgagagtaagcaaaagtgaagtaggtgaaatggcttggggcttagccaatagtgagcaaccttttttatgggttgttaggcctggtttggtgaatgggtcaagtagtaatagtgggcttgaggttttacccaaagggtttttagagattacaaagaaaagaggtaaggttgtacagtgggccccacaacaaaaagttttgggccacagagcaattggaggattttggacacataatggatggaactcaactattgagagtgtgaatgaaggagttcccatgatatgttggcctaggattggggaccagagagtgaatgctaggattgtgacctctgtttggaaagtgggaattgagttggaggaaaataatttgaagaggtggaaagtggagagggctgtgaggaggttaatggtggatggagaaggaaaggagattaggaacagagctgtaaagttgaaggagaatgtgagactttctttgggtcaaggtggttcttcttctgagtatcttgacaagttggttcaatttatcaagttgctgccataagaaaattatcaaatcaaagtggttgagaataaacacaattctattcctgaagctgatcaatcactgatatagattgatttttcagttataacattaatttatcactacttataaattatatttacatttgtgtgcactagtttatgaaatgagttaagagtgccgcaaacgtcaattttatatttctaaagttcatatatgtatgcgtgtttttcttttgttatttaaattcaattaagtggtatgatctttcgactgattaataatattttacatatattattgaaatcaatatatataggaaatatctatggtagagaccttggttttgtccctatcttagggatacttttttagcccttgattgttgatctaatggtaataaagttgaggaaatatgatagtaatactgtaatctagatagcaatatttttttacacatttttttcggctaattagtaattttttctcccgaactttgacatgtaccaaatcatgtcccttgaacttttttggtcgttaaaaatttcccctgaactattgagattgttaaatttaaggacttttgtctaattttagtaaaaaaattctaacatggatgaaagttcaaggggcatgatttagtacatatcaaattttgaggtgcatgatttggtagatatcaaagtctggggagcatggtttagtacataaacaatcactgaaacagtaaaattgaatgaatgattaccatggctgttaaagttagaaatgaaggaattgatgtttaagaacttaagtttgctcaatcatggtgttttgtttattttgatgaatttctgggtattaattgactggttacaatgtttttatgatatggaattactctggaaagtttgaacaggtttggtgaagaattggttgagttttggagcaacaaaccagagtttttccgtttctgtagcaaggaaaatcgattaaccgatttcacaggcatagtgaaaccggtcaaccagttttgccagcagaggaaattttggttttaggcttcgaaaccaattttgttcgaggtgtttcccagagcttagaatgggatattttaatgacggatgagttattttaaaccagtggggagttagaaatttgtccagttatggagctagggtttgtttagaatatggataagtcgtttatagaatttctttatcgtgacataggacacgggatcgtcgagctttattccattcaagtcggcctgcatgcttaatttctggactgaggtaacaaaagctatatgtgttgtacatgttaagtgagaaacaattattactatttgtgactcgattatgatcaagatagaaattattactgtttgtgactcgattatgatcgagatagcaattattgctgtttatgactcgattatgattgaggtaacgattattatcgtttgtgactcgattatgatcgagagaagatacggtcattaccgttattagtaattactcttgaaaccgcggttag

SEQ ID NO: 265320 - DNA, 3399 bp, Cannabis indica
actaaatcaagttaccctaattccttttacacctaatatacagctaatactctaacaacaagaaaccatttcacgtcagaggacataatctcaagaaagacataggaaatgcatagcgaggcatctacctcacgatatatcaagaggtgttgacgaggtgaattgactgttagaacacttagcgtatgatttacattatactaactaaatgtaataactcgaaggataagattgtctagtctgcaaggccttattgtcaaagagcagttcttaaggttgctcagtacactggtgctcatgccattgctggaagacttatggataaaccaagttttttaagtactaggcgagacacctcagcgagatacctttggcaacgtgtcttaatccacgtcagcattgacttccttcaaaacagtttaaatcacaactgtgtgattttcaaataataaccgtacttatttatgtggagcataattaaagctcacaatttcaggaaatattgttatgggatttaattttacatgtaattaactgccaacctatattactataaataggggcagattttacaaaaaaggtgaacaaaaaatcttagagaaaaaggaatacactgattgtcaagaaccctagttctgtaatagaaaaatctgaataagtttgactcgtggactatgcagagttaactgcaaaatcacgtaaaaagctggtgttatttttgtttctattattctttcttagatctcttataatttctgtgccaaatctattacgaaaataggctcataatcgttaacgaaaatctacgttaacagtttggtgcttttattgagagcctacgtgataaaagttcagaaaaatccctcctaaccaaagaaggaatttcttctccatggctgataatggggaaaacggcaacactcaccctgaagagactactcgtcatcctggaaaagagcctatgggttcacggaggtcacccaatgcaagaacaacgtgttcaacacgatcaacgcattcaagaagaagccaacatgatgaggaacaaaacccaaacgctaggaatgaggaacctaacataaatgctatcagttctacgcctgtaagtcagggtgcctatgaccccactaggtacgtaccgtttgtcgagttggaaaatcgtcaagtttaacaatgtttggctgaggcaaacaaacgaaatgctgagttggatagggaggcagcccggccagggcggcacaagaaaacaacacacaaaaccagcctgatcctggagtgagaaggtggtgcgatagacctcggggctcaagaggcagaaggcaagagacagctcaagaggacccccaaaacacgcaagaggagcctcaaaacacacaacaggagcaacctggggaaactgcggatgttcctgaaggtgaacaaccaaataattaggcacctcgccgcgaagttcctcgaagaccccagggaagcataaaccaaggaaacggaaacaatgatttaccagaatcctctcacagaaacgagaaccgaagataactcgggactaaggaacaagaaatccctcgtggtaacgagagaaatcctaggactcaacctagcacaagtgggttgcccctgagacatcgtcaacgtccttctcgcattgatagggatgaggcgaactcaccccagcaggggaggtgtatcaaacctttcccaaaggagaagacctatatatgatgaggcaagttctagcttaggacgtatgagatctcgagatcacagccgatctacgcaagaagggaatagaactcgttgcagtaatgatttagaaagtacgagcacaactaggactgaaagctacttaaggatgagatctataagtaactctgatcgacaacgaccggatcttagtgagcaattgaaccagaagaagcctaacttatgttagcaactcaatcaaaagcaagaggatcctatccaattgggaattagtgagttggaaaacaaatttaagaaataccaagatgggaaactgcctaattatgactccgacgaagagctcgaacctttccatccaaacattatgagcgctgaattcctccagggatttaaaaccctcatgtctcgtcatatgatgggaccacagatacggtcgctcacctcaacaactttcataccatcatgcgagccagaaatgttacgaataacttacgttttattttattccctacctcgctaactggggcagcgagcagctggttcaacaaattcaaccatcactcaattacttcttgggaacaactatctaaagagttcaagaagctatttcaggcaacgagagatagacgacctaaagcgtcttccattactaacataaagcagcaaccgtacgagacacttaaggcctgcttaagtcgtttcagtacggccactgcaagagttataaacttcaaagatagtatctagcttactgctcttcaagcagggatcatgactgatctctcaacggctagaggaaaactgtgggatgatttacaggatcgcctagtgaaaaacatcagcgagttcaatgagagagctcagctgtttattcaaaatgaagaagcaaggaaagagatgaagttgttaaagacaggctcaggaggtaaacccagcactgtcttgacaagcactgtctcgacaaaggctgacaatccaggacgctctagtacaacgaggaaagatgactctaaggaatcaaccaaagacaagaaaaaacagaagaagcacgacaaggatgtgccaatctacactatttatacagagcttaatgaaactcgggaaaatatcttcctctcacatgagcacagggtcgcattctgcgagcttgagcccatgagacatgcaagacacaaaagggatgcaacgaaatttcgtaaatttcataaggatatagggcatacgacagaagaatctcgtcagttgaaagacgagatagagagccttatctcgcgtggttacttccagtaatatgtgaaacgacaaggcaatggaaaaaaccagtcgaatccgcccaataacctcggcaaccaaagattacaacctcttcctggcattttggttatctcgagagggccacatcttgctggagaaagtaacaatgcccaaaaaagatatgttaacgaagttaagaacgagcaataaccttcgctccagaatcatctaagagagccaaggttgaggaacctccaattgtgttttcaggggacgacacaaagcacgtgaggtaccctcatgtcgactcgctcgtgattacaatcgagctttccaacaaaagataaaaagagtgttgatggataatggaagttcagtgaatatcctttataaggatacattgaagaaaatgggactggaaaatgcaaagttaaaaccttg

SEQ ID NO: 265321 - DNA, 924 bp, Cannabis indica
tgggtgattggaacgtagagactatcaagaaaacgatgcatgaagatgacatcccttggattttaggtatccaaactcaaaaagatggtggggaggatgaactaatgtggcacgaaataatcaatggagattatacggtagctagtggttacaagacaattcagatagggaaacagggggctgaaacttcaaataaatctatagtgagggggtggtggaagatgttatggcaatcgaatttaaccccgaagatgaagaattttatttggagggtttgtcacaactggctcccttcaaagagtattctggctcatagaggaattcaacttgatagctgttgtacgggttgctggaatcatgaggaaaccataggccatgcgttgtggaagtgtcctcgtttgaagaatgtttggcgttctgcggggttttggcatcttttccccaaagaacttgaatcaatgtctgatatgcttgcctttttaatgtatatgaagacagaatgttcttcagaggactttgaagtttttctcgggcttagttggctagtttggagtcaaagaaatcaacgcattttccaaaataagactgttgatatgggtaacttgattccttgggctcttgactatgtttcatacttgctgcagaaagataaagctcccaatcaaatcagcccagtcaaggagaatagaaggtggactggtcctccgtaaggttcttatatgctgaattgtgatgcttcaatttgtccaaatacacacgggtgcggcattgctgctgtgatcagggataatagaggttgcttgctggtggcggaagctgggtttcagaccggtcagttttcaattttattggctgagatcttggctataaaactgggtctgcatttggttcaaagaatgaaagctaaacctttttatattagct

SEQ ID NO: 265322 - DNA, 809 bp, Cannabis indica
tagaagccatgacgtaaccaacagcaccaaaagacaaaaccagtgaacaacaaacgacaaacacacacactcaaaagagagcgacacacacacactcaaaagagagcgactccaacaaacttattagtttgtttacccttttaatttaccatcaacatggttgcaaccgtaaatatatattgttttttttatataatattaggagtggaagattcgaacttaggagttgttttttgacatttttattaatctttattaatataatattgatatttttttttttctatttttaggtttttcttgttgaaaatttcaatagttttttaaattattcaccaaaagcacatcttcaacatttgtacgggtccaatagttttgttttcaaaaactcttttattaaagactagttaacgaagccgcacttcgtgcggtatgtataataattttaaaaaaaattttacatcacaatataattttttttgttaggatatcaaaatactttttttattatagataacaaataataaaattataaattaattcccaaaaatactaaaagtacatataaatagcaaaaataatcactatctaataatttttcatatatatatatcatcagtataggaatcaagttaagcttagcttctaatagagaatttggtccttatctccttaatgtgcttttttgcatgaatctccatatgcatttttatagaagacttttaaattaaataaaaatctattattaaacaatatataacaaaaaattagttcatatatatataacatataaaaaatagtgaatcaag

SEQ ID NO: 265323 - DNA, 1595 bp, Cannabis indica
ttttgtattttttttagtatattaatatcatttttacaattttttaagttgtatctttgtataatgattactattttgaatagtaaataatatgtaatattttatcttttatgtaatttaataattttatacaattaaatttttaaaattaacttatttttacaataggggatttcccgccccgtccccgatggagaataagcggggatggggcggggatgggaattaaaatccttaacggggacggggacggggagagcactccctgctaattccccgcctcgtgtgcatccctagtcacactgccacttgtatacattcttcactttctgataacaattaagataatccctaaataattaaataattttaactttgtttaaaattcaaatatttttaggattcattcttcatacctcatatccattttgttgcatatatcaagtgaattattttctagtaacttaataaaaattttctaatatattgttgttatttatcttcatcatccttaatggagaaaatatacataaaataagtgaatcagaagcaaaaaagaatgagagctagctcctctttttcaagaagcctaaaatgagtgctgcaagccattttttttccacttcaacaatatagttgaataatttgtttaattaataaaatagtgactctcatcaatctcttgtgatttcttttaactaaaacttgaattttatatggaagacatgaaattatattttaaaaaagtagctaaattaatctaactaaatccaattatttatgttaatctcactttagatttaatctagtttaaccgaataattcacccgatttgaacctgatcactcaaaatgctcttgaagccaaaagcatgcaattatggtggagttaaagaaagaattaatttgtatattttattttatttttcttaatatcaaaacagttaaattagtgtgaggatgtgttaatactcattcaaaattaaccccattctttatttgcctctacataataacttgtaaacccactaaaaaacaattttcgtatcttctcaaataatatcagaccgaggcagtttcaaaaatcaagtttcaagttgaatcaaaacctttatttatttttttaatttttttatcatattataattttcatttgattttttattttatttttaaaacccaattttggttaagttgtaattgtgtctatcttgtttctttgcttggtattaaacagattattattatatataaagatggtgaggccttcttcttgtgaaaaggccaacttgaaagggggtctttggtctgaagaggaagatgcaagaatgcttgaatatgtatctaaacatggaaaagccaagtggacctctgtgcctaaaggagcaggttgagtactttttcaggtcttatatatgtcatttttatttatataaaagtatacatttatctattttatcaagattcagttaattaattagctttttcaagcaaaatattggtgtataattaaatgagaataaaatcttagttttggaatggatgtttgtgagtgtttttttccaggacttagaagatgtgggaagagttgtagac

SEQ ID NO: 265324 - DNA, 2974 bp, Cannabis indica
tgtctcaccattattgaatttttgaggaatttaaattatatatatatagaaaaagtgaagaatttgggggcgaccagaagcagaagtagggttagggtttggtttgtgaaatacagtagaccaatccaattcaatcgagaaagctgatgctgtagaacaacatcaaatcaatggcaagcgagttggtgatgagcccccagttggagcagatccacggtgaaattcgcgataattttcgagccctttcgtatgtctttttcatccccttttttgttttattatgttgtttttatcatcattattattataattgttgatgttgttataaatttgaattcttttgctccaccacaactactattggtattacattagagaatggaatgggattgtagaagcattagctaaatacatatatagtaatacaatacaatgtaatgtaattggggagaaatgaagcacattacagttgtgcgtcttactagtcgtctctactacttttattgataattttgcgttgaaaagttgatctcagaagcggttttatgattgttgttagaaatttgaattcttttgcaccatcacaaattcacaaccacaactaactatataagtattacgttacagaatggaatgagattatactaacaaatattataccattaggcattaccattagctaaatacattattagtatatacactgctatgcaattcggggggaatggaacacattacagtagtgcgtcctactagttgtcaattctacttttattgacaatttttgtgttgtattttgatctcagaaatggatttcaaaagctggataaaattaaagattcaagtagacaaagtaagcagctcgaggagcttacaaccaagatgagggagtgcaaaaggttggtctttcaatttttctgcttttttacgtaaacatctttatcatttctcttcttatttctttcagactaattaaagagcttgaccgcgaaatcaaagatgaggagccccgaaatcctcctgaccttaataagcaactcaatgatgagaaacaatctatggtttttcactttttccttcagtctgtttatcgtaactgagcattccactttgacaagcatcctaactgatttcgtgatatattcatgtcttagctgttcaaacttatgtgatgtatacacttcattttgcagatcaaagagcttaactcatatgtggctttgaggaagacgtaagttcatttctatttgggcttcatatagtatcttccaaactcatatcctcttttgattccttgttttgaaatgtaaatttcatacttgtttggctggtctgcagttatttgaatagccttgggaacaagaaacttgaactctttgatatgggagcaggagttagtggtgaacctacagctgaggacaatgttcaaatggcatcaggtaagaatttatgtgtatttacagtttattacagtatgttatgaagtgcaaaaagggaaagaaagagctctagtatgtttagttgtgtcttgaacaaaagctaactatatatattctaatgttctgttaccatgcattgatagaatttgacttgctgataacaaaatgtgtaaatttagtgggatatgtgttactataaatatggtcagccccatagcttcaagggtttgaaatgtggaattggaaaccgaggtgcattcccttaacacctgaggcgtgagcctcagcaataagaagaaaatctgtgtaaaatatcatagaactcatgaaattataacaagcgacacataattctgtaataaagtcttaaaattcatgaaattactagttataagtcttgaaatataaactatctacattcaaggttcaaaccaaaaatcctaattaatggaggtatggagatttaaagggaggggctgagaaagatagcgtgatgaggagagggggagatttaaagggaggggctgagaaagatagcgtgatgaggagagggggagaaggtgcttctgtgagggagatgagctgttttggggcctttttaaatgacttctataggcttttctttgggcttctttaaccagatttataagttatgaaagagctcaaataaaaccctaagatcacttttttcttctccttcaactctcaacaccagtcctttactccctcaagtagcagcagtcctcagctcagtcctctctcaatctcctcagtcctcactcatggaagcagcccctcctatcctctctaatgcgggccttacaaaatagcaatgagctgcgtaaatcagaggcgtgttctcagtagcacctcagtagtgtgaggcataagcctcaagaggtgttttttttactgccttgcctcaagatgggccatgaggcatacaggcatacgatgcacacatatgcattgatagaatttaactttttgaataacaaatgtctgtaaaatttgatgagacatgggttactgtgtaattcaacgtacgtgctcttattggtgtgcatgatttttgatcttatatcaatgttctacctcatagctatgtcaaatcaagaactagtcaatgctgggatgaaaacaatggatgagaccgatcaggccattgaacgcacgaaaaaggtacttttgtagcagcaatttgaagccgggtgttttggttgttattacctgcaatgtattcttagatctttgaattttaccactaggttgtggaacaaacaattgaagtgggaactcagactgctactacattaaaaggccaagtatgattgcttcaacttgtcttcataattattgattttttcatggtttagccttaaaaaacattagttttaactattgcagacagatcaaatgggtcgcattgttaatgagttggacacaattcagttctcaatcaagaaggcctcccagcttgtgaaggagattggtagacaggttagtctttgctctatatgtaatttatgtgtctc

SEQ ID NO: 265325 - DNA, 1123 bp, Cannabis indica
aaaaacatagctgaaaatagtagtagtatatatcaaattggccacctcaacgagtagatcacacacgtgccaacaacttatacaaaactatatacgatatcactagaaagttaccaaaaatgggcagagttacaaaaacgtcaattaaaaaaagtaatgaactgtgaaaaatagcttagtggaggttgttcttcttgacgaactaaatataacggtgaagacagatcgtcaaacagaaatcaaacactaacaagtgtgaggtatatgcctaaattttctagaaacttaacatctttaagtgtgctagagggcctaggtattgtaagtaaagttgaattaggtactataaagctaaggctccatgactaaaatcaaaggccaaaagcatgaaggactctactacctacaaggagagcctgttacatagtgtaacaacactgcaatctgaggaccagaaggtagtaccgtgacacaggatattttgtcacattagtgacaagggattatagatcatgagtgagcaaaacttattaggtaaagacaaggtaagtaaaattgatttttatgaatcatgcatcctaggaaaatatcataggcttaaatttaaaactgagattcacaaaactaaactaaatacttgagtatatccactcaggtctttgggatgtagagagaacccctacacatggtggaagttcctattttctatttatagatgatgctcattctacaaagtttgggtatatttactttaacaaaagaatgatatttttaataaatttgtggaattgaaaactctagaaaattgacaaatctaagacttaaaaatatgagaacaggtcatgggttagagcaaaaagataggggtaaaccatcacaagacaacaaagctcacaccccaacaaaatgggatggaaaagaggatgaacaagactttaatgaaaaaattgtgatgcttattaatgcaagctagatagacaaaggcttctggaaagaagcaattttaacaacagctaatatactcaacagatttctctccagtgccattgaccttaaaaccccaaaagaagtctggttagataagccaccagacttatctaatctaaaggtatttatatgtgca

SEQ ID NO: 265326 - DNA, 1928 bp, Cannabis indica
acttcatcgctgattatcacatcagtgtaaatccaatgcactgatgaaacagggactttatcttttgaagcatataatcacaatcacattccactgtgttaacatcaccgtaattgaaatgactatatgttctagactttacagattttgtatatattaaaccataaacatgaaaactacatgtaaacataaataacttctaatctttcattgataacaaatcagattacattgaaatggattttatttagggcataaaattccaacagctgagaccagggtcactaagctaaccaaggagttgcaagacatgccatcgaccacgcagcttgaggcagataatgtttctttttctcaggaaattgcaagtctccaagatgagagagagggtctccaaactcttctttgcaggttgaaggatgaggtcaaggacaagaagatcagggaggaagaactcgaaacagaggttaagagccaaaaatccaaggtggaggagctcaggaagagggtggacaccttagagaaagcgggtctcgagaaattttatgacttctggaaggtgaatcccaaagcaaacttcgactaccttggcacttccaaagacatttttctcgactactgcatggctcaggcgaccaaggagaaccctaaggcggccatttccacttctcctaccaactagagtgttgaggcaccttccgccaagaccaatgatcctctggcctctttagacccagttgagctgtaccaagagcctgggactccagctgtctgattgccttctctttactatcatttttttttatatgtttgtttggctagtaggccttcttttgagataaaatgacaagccaagtggtctttaaacttggagtatttttcatttattttgaacaactagctgactgggtagcctttaatctcgggtttaaatgctttgttatccttaaagaattttattcttgatttatgattgttgtgaaactgtgtttgttttgttttttaccaaattctgtgtataggtataggtggcccccaagtgaccgagcagaattttgactcttggtcacttgtttttcacaagtataattttagtctgttcggggctttgggtacgaacagaccttttgtacgcatttaatggtaaatgtataacttacaaataaacttgactcggtttgaattgaaataaacatctttattcatttattggtcggaaatatatttgttaccatattaacttacattgaagctattatattgatctagtctgatctttagcttagcataaagaaaaaaaattgtagaaaataaaaattttactttaataagtggtcaccaaacctgagtactttgttgttttattccaaccttttggcgtggtccgcccgaaaggccattcagttaacatggtcattcgacctggtactttcactggtagtattttcttaaatgttccccattccaataccttggtactagaacgagttgcattttttcgtcatacttacccagtttgtatgctccttattctagaacttctatcacttgatatgatccatcccagttcggtccaagcacacctgccatgctgtctttggtgttcaaaaatacccttttgaggaccatatctcccacaaaaattttccgtgctttcaattgcttgttaaaataccgacctaccttttgttggtgggctaccaatttcaagtttgctgcggttcgcctttcttcgatttcatcaagtgactctacaaggagtgcatgattaacctcttggttatatgtcaatcttctgtgggacggaggttcgagttctacgggcaacatattttcataatcatatgttcgagttctatggcaagtgtagtcggtccagccactattttctcggttgtgcggtacgaccataatacttcagggagttc

SEQ ID NO: 265327 - DNA, 812 bp, Cannabis indica
ttggatcggtttatgtgatactaatgtaacagccctcattagatctaaaaaatgatattaggatacattagttgttttaaatattaataatttattatctttgcaatttttttctgcttattttttatttttaaataatgtcttttatagtttagaaaatattgatttaggtatcttttttttatacttttttaattcttaaagatttgatttttataatatttgagtgacaaaaaatttttatgagattgtaaaaaattttgtgataacaagataaaatatatatttacatatatatacttagtttggaacttttgagttatatagtaattttaataattttgacaatgaaatagtgatgggaatagtattgtaatgtaatgagttatagttttagtttggaacttttgagttatatagttctagtaatactttgtaagaaactttcaagaaagaaaattattaattaggtggtgtgtggttcattgaatgtaatagaaatggtgataggattagtaatgtaatgtaatgagaatatggtaatatgaatagtattaagatattaagtttatttatgtaatgaatattagaatggaatgtaataaatggtatattgacaaaaatatctatatatctattaattttattttatttttttgaaaggaaaatcaaattctataaccttttgtgcctataggatatcttagaaacatgcctttgacagatctagcatctagcttatcattggattgatgtacatatgctgcacattcaaacactctcaagtgtttcaggtttggtatcttcccata

SEQ ID NO: 265328 - DNA, 2141 bp, Cannabis indica
accttttgccatgaatacttgggtattttgtaatcgcaagtatattcatctgaagcaaggaggccaacgttctttaggttctgctcgtttagcaagaaatctgcagctcgcaacccatatggcagactcagctcggttttgcgatgctcggctatctcaggggtagaaacaaggtctttgaggaaccgctgtaaatagataaaagttcagtaagcaactactaaaagttaatgtttttatagttggtttaatgaggaggggaacttacgaataatgcaaaaaatagttgtgtttattggagataggcccgtcgtctagaagaagtcttctttaaaatctgtcttgttgggcaatctaactatgatcttacgatcaccaatataagttccaagatagtagaagcctctcgcagcgttcttccttgcaggaactgctttgacagagtaaaagcaggctatctccaacggagtagggcactcccagcataatatatggtatagaaccttgaggctcacaaggatcatgtatgagatagggttcaactggaatgggataggcccgagctagttgcaatactccttaaagtaatccctaaggggaagggccgccccagcctggatatgttggaggctctaagctctaacacccgagggttactcgtgctaggtccactacaatcctcgcgtatcattctttctgagggaaaatagttgaactcctcaggtgccacagaccttataatgcacgttttctgatgcttaatgctgcaagacttcaggatgccaccaacgtaggccctaatagacctaaccttcgactcgataagttttgcatcaaaggtaacattggggtcctgaggggtctttgatttgtgaggcttaggagacatgatttcaaactcaaggtcacctggttcaaaagcaacattgactttgggtaacaatattagtcttacgagtggaatagaagttaatatcgtgggtttaggccaggccgcatcttgcaagaaacgacgctagccctcaaaaatttcttgtaagaatcgcctataacgattggcagtctcttcttggttcgacttaattagatggtccctaattttggcatcatttacttctaatttggattgaggttttaaattttggggtttacatggagaggctagatgtttaggatattctggttttaaacattctggacaataaacttctgaaccaaattaggacatttctacaaaagaaaaataatcccaatttcttgatgaaatttatcaaactagaggcttaaggaatgtgataaacctaaattatgtctaagcccgaaaagtcacccagaaaatatgaaccctaattgttaaaccgaatgaagtaacaaaatccaagacaatcataacccaaataaaaaaaaagaaggggaaaggaaaatggatgaggtacttactgtgtgaagtcagaaaaccaggtgttggagaattctatgaataaagatgtgatggccggcgggatgagtttttcgaacattgggagtcgaagagcaagtctgcgtaaattcaccagaagaatgtcaaggataaggatggcatgcacgaatataggaagctcgagtttcaagaagcttatttttttgaaaaggactaaaatagtagaaaattggattcttactgttttatactctaaatttaacaaccatcagatcataatatagaagatctaatggatgaaaatagaagataagggaaaaagacggttcattaacgctatagatgtgcattggaaccataaaaccgccaaaatcaaaggcatgtgtaatttcaaaatgaattatgacaaaaatacccttagcaattattttaaaaagaacttttcactgaaaagaactatttaaggggcaattgttatgcctaaaattcagttggcacttcagaggaggacacatgtcaaccttggagaatacgaatcaatgaatataatggtaattatattaaaaatgatattaaaatggaataactcattaaatgtggagctgatagagtatatttataactttctaactgtaaagtcttaatcgagataaggatgtacaaactactgactcatgcattgacgagaaaccatcctgcatcagaagacacaatcataagg

SEQ ID NO: 265329 - DNA, 969 bp, Cannabis indica
atatataaatatagatataaaacttatacacactttgtgtttttagttttaattttaggaaattttatactaactttgttattttcttacaaaaatactgtcaaacagtatttttgatttttttactgtgttttttttttattaagtttcatactgcagtatattgtgtcaaattttcactggtgttctaccaatgttttttagtttattctactggtgttttgagttgttctgttttgtgttctactggtgttttataaaaatactgtatttttgtaaacttttccgtgtgacagtatttttgtaaaaagttacctcaaattccagtatttttgtaagtttcccttaatttttatatcatgatgtatagttatttaagagatattttgtaaaatttttaagaaattttaaaaaaactttaaataaagttttaaaataatttttgttacagaggtatttatacgtatataaaataaattgtttgaatcatattttttatattgtaaattattcttaattttttaaaattttacatacatgacatgtcttaaataacactataatatacaccatcatataaaaaagttgagattacaacactattcatcaactatcaaaactacgaaggggccactgtgcatcacccacttttagagggttcatcgcaggggtcggtcttgagttgaaatagactatagacaaaaaaaaaaaattgggctcttactataaagataaaggtatttttaaaaattattaacaaaatatgtttattttttaaaaggtatttttttatttaggctcctaaaatgagtgagttctaagcacgggcctagctcacctatgcctaaggccgaccctggttcatcagagcagcatgcaaccttatatatacatatatgtatactctaaaaagaggtccatgtgtattcttatttgttttggtatgagaattttttttttaattatatt

SEQ ID NO: 265330 - DNA, 2055 bp, Cannabis indica
aaaaaaaaattaaattattataacctaaaaaactagctataaaaaagtcttgtcttttgacatgttggtgaaagttttttcaagtctctagtttgattcttttgtcgtgtgtttccatggcttcgagtagtcacgttggtttcgatttgaatgagcaatatgcacaaatcagtttggaagatgaggaagaaggagttttgattggaggggatgatgtgagtgaagaattgccgtttgatgataggtggtgtttggtagggaaatttctaacggggagggcagtggattttgatgcgatgagacatttgatggcctcgctttggcagccgggaaaaggtgtgttcatcaaggagttggatactaatcgctatctttttcaattctaccatgaattagatattcaatcagtcattgatgggagtccatggactttcaatagaagtcctcttgtttttcaccgattgcagaagggggaagatccaaaggctgttccgcttcataaacttgatttctgggttcagatacatgatctgaaaactggcttcatgctagagcgtgtggttcggagtgcgggcgagtatattggtaagtttgtcaaatccgatcccaagaactttaatggattttggcgagactatttacgggttcgcactacggttgatattgagaagccgctgaagaggcaaatgaaactctgtaaagaaaatggtgactggatttgggctaattttaagtatgaacatcttcctactttttgttttgtgtgtggaattattgggcactcggagaggctatgtccgaaacgattcgaatgccctattgagcagctatccaagccttatggcagcggcatgcgtgcccagatgaagaagaaaaattatttaataggggctcaatggcttcggactgggaatgagaatggtggagccgctgttggtggtggtggcgatcggttgtacaaggccggtgatgaagttaatgctcatcctaaaattatggaagttgatagtattgaccaaggaggcaatcgtgatcccttgattgtaggagataagaataaggagaagttaattatggaaagtgtggtgtgtgcacgtgaggttggtgggaatgaatctagccatgatgaggtggatgctgatggtagtattaatgaagaggatatgattattcttttagagaataaaaggaggcgtacagtgggtgaaggagtagttattggtggacatgtgaatatgactaatatggttgatggaccaattggtaataatggatcaaaaaacaagttacaggtgggccttggtgttcaggcccacccatcatcatgagccttttattttggaattgccatgggcttgggaacccatgggctcaacaattcttgaaggaccttgtggtccaaaagaagcccaattatttgttcttgtgtgaaactattgcaaagaaggaagtggtggaacgtttgagggtggcaattggttttgatggtgctcttgcggttgaggctcaagggagaagtggaggggtggccttgttgtggaaagtagaagaagaagttaaagtgctagaatatgggcggacgtatattgatgttgtggtgtgtgatagtgaccgtgggcattggcgtttgacggggttgtatggagagccaaacagaaatttaaggaaaaggacttgggatttgataagggagttgaaatgcaagtcgagcttaccttggtgcatcgttggtgatctcaataatgtgacttctaatgaagacaagaaaggtggaaatccctatccgagttggttgatcgatgggttcaatgatacgttgaccgaatgtggtttacatgatcttgacttgtgtggctatccttttacttgggagcgttgtcgtggtaagccggagtgggtggaggttcgtattgatcgtgctcttgttaaccaaccatggttagatttttttcctttagccaagctttataatttagaagtgtctacttccgatcacactcctttgcatttgatgttggctaatgatgtggttgttgctagaaataatttctttcg

SEQ ID NO: 265331 - DNA, 707 bp, Cannabis indica
tatatatggagattacttagcatttagagatctcagccaagattaacaatatactatcttttatgaggttctcccttggtcatgggagtgataatttggtcaaacaaatattcggaataataggcatatattaaatatttttatttttttatggaataataattgatctatatagttgagccatattatctgttattacaaaattataataataaataatcaagtcataaaaaatagtgaaaatagtcaaccccatctataggtggaaatgtggaattctataaaagggaatcatcattatcatttcgcagagattatatgaacacccattgaatctgacactcagattccttcctacctatttttcttttaactattctcttttttctctaaagtgatcagttgtcattttctcagctaactttttctttttcttttccattgttattaatttttttttttgggttgaaaagagaggtgagtagtgagactgaattcagaggctgtaaggaagaactaacaaaaccccagtttgtcttcaaagcaaaaggtaagttgagtgaattcttttccattgcatttccttttttaacatgaaaaaaattggaagtttgacattctgtaattgaaattttatgcgaaatattttacgtctgtgtatgcgattttttctgtaatttacaaatctgttgcagaaactgatttac

SEQ ID NO: 265332 - DNA, 515 bp, Cannabis indica
cttacagaaacgtatcttagtttcgccctcgcaaagccctctgccttcagctaactgtactcggaagcatgtgcgatacaacgagaccagaaggacgagatagtgcgttcccggaagacccttcaggtttccctttttattcttgcacacaaacaaggaaattccagctgccaaattacaacggagtattgtatcaagataaatgggaaaacttcctataacaaatattatatgcaattaattcacagattgattgcctacaatcagtgcacaatgtgttgaccaaatcaattaaaatctgatcaacctagtcaatagatcgttttctttatgggctggacttcatgagacagcctaagagtattatttattgtaaaatccctaatagaaggaaaagagaaacctaatgtaattttcaaattactataaatacccttcgaatcctatggattaggggttgaactctcttgaaaactttgatcaggcaaacttgagaacatacattctttgtattc

SEQ ID NO: 265333 - DNA, 655 bp, Cannabis indica
aagatgtatcaagatcttaaaccttacttctaatggagcagaatgaaggagaatgtggtagaattcgtatcgagatgcttaacctgtcagcagatcaaggctgaacatcagagaccgacagggttgttgcagcctttaaccctacctgaatggaaatgggaagatatcacaatggactttgtggttgggttacctagaaccacgggtttgtatgattctatttgggttgtggtggatcgatttacgaagtctgctcactttctaccagttaatataaccttctcagtggatcagtattcaaatatgtatgttaaagagattgtaagactgcatggtgtgccaaaatccatagtttcagatagaaatctgaagtttacttcaaaattttggcagagtttacaacgggctatgggtacgaaactaaagttcagtacagatttccatcctcagacagattgacagtccgaaaggacgattcaaatactggaagttatgttacaaccctgtgttatggatttcgaaggctcctggagtaagtatccgccgttgatagaattttcttacaataacagttaccagagtacgataggaatggctccctatgaactgttgtatggcagaaagtgtagatctcccattcactgggatgagacag

SEQ ID NO: 265334 - DNA, 642 bp, Cannabis indica
ttaaacaaaatattgtcgaatcaaaagtggcgtctctaatctatgataagatgaatgaaccatcagaggctcattagtatattattagtgagaattaatgctaaaaaaaatgtattattggtgtctagtatctttctccgtattatattgttattggtgtaattaagtatcaggtaccataaaattttaaaaaatattttttaaaaaatatcgtaaaccaatcataaagtaccacttataaaaaatattcaacactactaatgcctagtataatactcattattagttttaccatcttcacttcaacacatatatatttaagaatctaagctcgggacagttgctccatccggctacatctgacctcgtcaatgattgtaattagtatacactattatataaaaatattaaaattatttcaactatctgaatattgataatcaaagctatatatgttaaagatggggtggaccgttgcccaagccccaaagaggcctccaatcttttctcttaacataatataatatagtccattttaaatctatttctaccaagtagattttgagtatgtagtgtttatcacctttaagtgtcccttaacaatatatatatactacatctacaagtctgcaatgaaagttc

SEQ ID NO: 265335 - DNA, 432 bp, Cannabis indica
gaatacatttagttttttatgttttagttgattatatacattttttttttgttatttttagttgacgtctagatcagatcacgtgttgttattttcataattatgtgtaccactttaaaaaatatatattatcaaataacaataataagagacagaaataattatttaattgagaaataacaataaaatacattattttttatatttcattactttagcttggtcaaaagtagtattggacagtcttttcataattttattaatttaaacatttttttttggggaaaattagtatttcaaaaaaaatgaataatataagtagtactagtggctgacgtggcagtatttggggcagtattgtggacctatgggaagattgtccctcactcgcgcgtgcctctcacataactgtttagttttgttttttttttt

SEQ ID NO: 265336 - DNA, 1870 bp, Cannabis indica
aaatgtaaaaaaaaacattctttgaacgtaaaaatgtaaatattttataaaaaatagtactttatctaattattcctttaataaattgtatttggtttttccgaatccatatttctattcctctaactaacaatggtcaacctttttcaacatttaaaatttaaaaacagagtcatctaatccgacggctccaaattattatttaaggtaatataacaaggtccaattggtttatggacacgtgtcacgccatgcatgtgcttttaaaaataaaagatttattatttctttaacagataaaataataatgtaattaatattcctaatcctaaaaaggaaaagacttttaccaaatctgtggtgcctataaatataaaccgtaaatcaatagagaaactaaatagtcttattgtttatttattaaagtgagtaatcttcttgctttcacaaaaaaaaaagtgagtgttcttcttcttatatagcttaattaatttgtcgaaagaaaaatggctggaaataatatcattgttgttttcgacttcgacaaaactattatcgagtgtgacagtgactattgggtcgtccaacaaatgggtgccacaaaactcttccatcagcttctctttaccataccatatttcaatactatcatggtaataatatatataaattaaactaattattgttattgtcacaattattttttacattgcaacacatgtttacttattttttgtcacaatttttttaataataaaacataattaatccagagaaagatgatgaaaaagcttcataaacaaggaaaatccatcgatgagattgttgaggttcttaagcaaatccccatacatcccagagttatccctgccattaaagctgctcatgctcttgggtacgtatgtatatatatatgtgaaaagaaaatacaacatgtactcatgcttctttttattttccaattaagaatttgatttcttattatacatgcattattaatttcaggtgtgatttgagaattattagcgatgcaaatatgttctcgattgaaaccatgctgaaacattttggtgtgagagaatacttttcagagatcaacaccaatccaagcttcgtagatgaaaaaggaacactcatcattgaaccttttcataattttagaaactcctcacatggctgcactactaacacatgttctcctaacatgtgtaaggtatatacataaactgtttctagctatactctcttatgacattgtaaattgttttgaatttttagtgcgaataacaaatttgaatttcggccacttggtgtatgcatgcattttgcagggtttggttatagaaagaataaaagcttgtgatgagggaaagaataaaagaataatttatgttggtgatggaagaaatgactattgcccaagcttgaagctgaaagagaatgattttgcgatgccaaagaagaattttccattgtgggacttgatttgcagtaacccacttctaataaaagccaaaattcatgaatggagcaatggtgatgaatttgagaaggttttgctaagacttattaactctatttgtagtggtgatgatatcaagtctgttttgagttcagctgatttcattaggccaaatcatcaagtagtaccagtcagccgataccgatgggacaaagatccgtggtcatcagacgatgattgatgcaaatacaccaataatattaattagtggcctcttatatattccctttccaatattttacttttactattaaattttattgttcttttatatcacaaatctaatttgggctataacaataaaatattatatttaaaagtattatgaaatattatttatagatgtcc

SEQ ID NO: 265337 - DNA, 3305 bp, Cannabis indica
atttctttaaatttagatattgtatatgtataaaatagttttttagattatctttagagcatgttggcatgactcaaaaaactaaccaaatcaaaggatatatatactaatcatctaataatttttttcatattctttctattttttttaataaaaataaagaatttgattaaaaaaaaataaagaacaaacaaacaacaaagtaagaagtaaacagttacagagtgttcttttcttattattttttttttgaaaacttaatttattattattgtaacataatatatgccaattgaaaaaaaaaaaaactctttgtacatgggaaggttggttatatttttcatatatatttttataaataaaataaataaaaattattaatcctatatgagataccctattataactaaatcaattactaccatcagattataaatcaaaggctataaaaatattctcacaaatgagagcaaaagtgatgctctgacctaaggagttccctaaatatatatatatatatatatatatatataacaagactgctactactcgtaaacggtagaatcaaatcgacaggttgagaaatagccaagggagttgggttgattgggacaatagcttgctgtcactgagtattttaactctttgtttcagtcatctggagttaattgtcaagtagtcatagactgtgttgataattcaatccttgacattgcccccatgtcgagttccgccagttggttataggagaagaaaaaagaaagacaatcttctaaatgcaccctgataaaagttcggggctagacgacatgatatcggtattttatcgaaatattgatcaattatggacagtgatgttgtgaatgtagttcaaaagttcttctccataggggattttgaagcatgttgtggtgatgctaatattgttttaatcccaaagaataaaaacccagaggacatgactcagcttcgaccgattgctttatgcaatgtcgtgtacaaaataattatgaaagtctcggtgaatcgtatgaagtcttttatggattgcattgttcctgacacccaaagtgcttctattccaggacatctcatctccgataatgttcttatttcttttgaagtgcttcattatttgaagatgaagaggaaaggaaaagagggttttatggcattaaagttggacatgagtaaagcatacgacagaatagagtggaatttcttagaggctttgctctgtaagttgggatttgagcctggtggatccatttactgttgaagtgtgtgtcttctgcccattatacggtggttcatggaggtcatgagatggggatcaattctaccttctcggtgataagataaggggacaccatcgactcgtacctctttattttgtgcgcagaaggcccttccactttaattcatcattttgagaaaagaggcatgttacatggttgtaaggttgctaatggggctcctcagatatcccacatactatttgctgatgatagctaccattattgcaaggcaaccttgttggaagctacaagaattcaagaagttttgggcaaatttgaagcgacctctggtcagaaagttaatctctctaagtcttccatttttcagtatgaacacggccttggcgactcataacaacatcagtaatttgcttggcatgaccattgcgggagataacagtttgtacttaggcttgccaagtactatgtctagaaacaagttgatagtgttgggatttctaaaggaaagagttcaaaaacgtattcaagggtgggaatcgaagtttctctgtcgagcggggaaggaagttctcatcaagacagtcgctcaatccctcccaatttatgcgatgagtgtgtttttacttcctttagacattactcatgatatggagaggctaatgtctaagttttggtggcaatcctttggtaatacttggaaaggaattcactgggaatcttggagtcaactttttgttcataaagcgaagggtggaatgggttttcgtcatcttcgggattttaatttgtctttattaggaaaacaaggatggcgcttgatttctcgacctgactctttggtggcaaaagtgttgaaggcaaggtacttccccaatggttcttacctcaattcttcacttggaaacaattctaattttgtgtggtgcagtgtttgggaagcacaacaactggtttgtaagggcgttcgttggtgtgtggagaatggtcgtgatatcaaagttgctcatgacccgtgggtgccttgtaatgataacccttttatcatttcctcccacccaaatctgttgaacgctattgtacacaatctgatgagaatggatggtgagggttgggatgtggagcttttggaggatatgtttgaagccagggatatagagctgatcagaagcatacctttgcttccttctttggacaaagatagtttgacttggtgttatgaaacttcatgcttatactcggtaaaaagcgcctacaaactagtccaaaatattcatggcaggtgagaaaatacagtaactgatgcttttaaattttggactttattttggcatttaaaattacctcccaaggttaagaacaatgtttgacgtgaaggaagtaattgtcttccaactttatgtcgcttgcaaacgaaaagagtcaatattagctctattttccctgtttgtaggttggaagaagagatcagtttgcatgctttagtcacctacctgagtgttaaacaagtttggaattgggtgggtattggtacatcaattccaacaacgggttattcttttttggactagtgcattctggttttttttggtgtggatacggacaacaagctcttgttgtcaacactttgctgggcaatttggagtgtcaaaaatgactttgtttggcataagaaggtggtgggtggatggtattgtagtattagcaaaaggttatcttgatcaatggacaagtgcttaaagctctcttattgagtcgtcatggtctggtttgtagacgggtgatggtgtttagcaatggtccgctccaaatgaaaatagtatcaagatcaatgtggatgctgctctatttgaaggtggtaacaattatggtattggtttagtagcacgaaaccaccatggatttcttgtggaaggccaaaccgattactttttgagggctgcaactattgaactggctgaagcgattggtgtccgtaaagttggtccaaagaacacatctggaaataagtcatattgaaaccgattgcttaatggtgattcaagctct

SEQ ID NO: 265338 - DNA, 820 bp, Cannabis indica
gctagtgcatgagctacattgagcatatgttggtgttttctttcgactacaacatttcgctatggtgtaccaacataagagttgtaatggaagactccttttgtggcatagaaagtagtgagatttaattctttggcattatcactgcggataactttgatatttacctaaaattgagtatgaatgaaagtgaagaaatttggtatggctaatgggacatctagttttgtttttaataactataaccaagggtgccttgaatatggttagaaagtatttgtagctttcaactgaaggaattaaatatggtcccaaaatatctatataaatgaggtcaaatattgcagcaaccatgtattagaaataaaaggtagtttcttttgctttgcaatatgacaagtaggacaattaaaaggagtgaaaatttcagagaaatataattttttattgattttattagtaacaagtacagatgaatgtccaagacgagtatgccattggagattgtctatttgaacattacaagtattgattggtaaagcatacttggggagggtatactactacatgtagtataggttcccaattcgtttatctatcctaatcttcaattttcgagaatgatcctgaatataatagtagttaaaagtgaaattcatggaatggttgttgtgttgtaagagagcatgtatagtaaaagattaaagttaatcgtggtacaaaaagaacattatgcagagtaatgtgagagtttatttgaatagtaccaatttgttcaatttgtactttagtgccattaggaagagtgacaaatttagtc

SEQ ID NO: 265339 - DNA, 909 bp, Cannabis indica
tgtgtatatatatatacatataaaaattaaaccataaacatgaatacaataatgatttctaatctttttatagttgacaaatcagattagattgtaacgggttttatttagggcataaaaccaacaaagagtacatcctctgatctcaccaggtggagttagatcacctaataaagaagctagtgacttgataaggcagttcaatgaaattattgtcagaagaagtcaggatctcattacagatcctctctaagggagactagttgacagatcaggaagggtctataaacagacggtccaaccaagttcctcaagaaccagaatagaccttccccagcaaggaacaagtcttgccacaaagatctagtggcaagaatagccagactctggcaactgatggcttagggggctggccagggatatctagatcaacaacacccccgatcggccaacattttttcagccaaccccttagtggtgcacctctggctggcagtgaattcttatcccagaacattcaggagcgagtaacctaaaggccaatctttaactggctaggtccaggaacgactagaaacacccaagacaacaacaacttgagaagtgagaccaatcacttcagatacttcgatccacctaactttaacaatcggtgtgatctaccccctgtcaacgcacaggttgtaccagctaataagggaagaacatgtggccaggctctacctagcatagggctagccagccaagagtagatgcgcacaatagggctggctggccatggccagttcccctaccaaggggtggctggccaatgccaattgtcaagctttgggcaagctgactgtgaacataccctctcttagggtatggtcggcaagctctagccaatccaggcctacaacccaatca

SEQ ID NO: 265340 - DNA, 7176 bp, Cannabis indica
caaatcaaaagttacttatcttgactgtaatttgttttcagtgcaagggaagcttgtaattcgaatgtcttatactgttttagctttatttctttacagcccaaacactttaatcgaattggtataataagcatagtaacaatcggtaatagaacttgataactaaagaatttagatctttcactatgtattgaatataaaaatacacaaaaatatacaacgacatgcaatttcataagaaatgaattacacattatgttcattcacctatagtttctaattctaaagacttcataattttttttggcaaattggtatttgttttggacggatgatcacttgatgaagatgaaaatggattggacggaatacttaattcttcatttccttccaacatttgaactacaactttcatattcggacgatttaatgggtgccattgaatacaccgaagtccaacgattgcaagcttttttgcaatcttaccatctccgccttcatcaatatagattcgaatatcttttccttcttctaaaagattaaaaatccattctggatagtagatttcattcatgttatcatttttcctccctcctacaatttcgagtaataacattccaaaactatagacatctgatttgtcggatacatttccaaagtttctagagaatacttcgggtgcaatataccctatggttcctctagcggtggtcattgacactatgctttgatcttttgaacataattttgcaagaccaaaatcagaaatctttggtttgaagttgtggtctaataggatattatgaggcttaatatcaaaatgaacaattcgtttatcacaaccttgatgtagatactcaattcccttagctatgcctaaagcaatgtcaaataatttctcccaactaagagaacatttttcattgccaatcaactgttttgttgataagtgtttctctagcgaatcgtttggtaaaaattcataaactagggctcttctaaatccatcagcacaataaccgaccaaacgaaccacattgacatggtgaatttgacctattgtacttacctcattgatgaactcttctccatttccctttgagatattcaaaatcttcaccgcgacgagaatgtcgttggaaagtttacctttaaaaacggttccatacgctccttctcccaacttatctttgaacttatttgtgatatttttcatatcggcataggtatatcttgatggcttgaatgctatgtaatcctccaaaaacttttcaagtcttaacccattttctctcttttgtttctctttatggtagacataaaaagttgcaagaaaccccaatacaataacaaatgaacctgttgtgaaacctatacatacaaataaatattgattttaaggattagaaaaaacaagaatatttaaatttataagaatttataacattaattatattacacaaaaaaagtgttataaaaaatcattctactatttataatacaaatactcaccagtagtcatcaatacaaatttcaactgatcatgatcacctgtaaaattaacaaaagagagaatataaataaaaaaaacacacaatgaaaattgtttttaatttgcattatataataataagagagaaattaattttactacatacctttcttagttgggttgtaacattcagtttgatcatcattcgagtcatgaggcctcttcaatctgcatttctttcctttagcttcacaattttcgcaattcggttttgaccattccaaggaaaaaatttcatgtttgaatatttctggtgggactggcaaattgctaaacatcttgctacatgaaactaaatccccccaatagttgtatccataaaaattataatcaatagcataaacaaaatacttggaatatgatgatgatgatgatgaagatgagtcactagttgttaaacaagggattggagaatccaaaaccccattatttgtatgattggtagaacatttcaatagcatagacctcatatattgactattaaagaagtgaagaggagaagtagtagaaagattattgagtaataatttcaaattcttttgttggatgcaatagggattataggctttcatgtactgaaatttgtagttcatttgtgttacaaacaatttcaattgaagatttgggagctcaagcatggttttgttggaattagtacatgagagatcgaaaccgagccgaggagagccacaatggggtggttgcttgcctttgagcctgaaagggaatttgattggtggctccatctcaccacatctagcttctttgcactcatcaatatcaccatcatcatcattttgggtggttgcttttgctattctactctcaattgttattataagaaaatatgaaatgattatgagctttagtgttaacatactcattatgattatgagctataataatactcatatgtgctatttgatattaatatttatgtatattcaatcaaatgatactttgatattctattcacatatagttgtaaagtcaaattagtattagttttgtgtggataattgaaaatgtaataataagtcggcaaaactgactgtgaccacagaattatttgaatgagaattaattaaataagatgataacttcttggcaaattatgcataaatggttctaaattattatttttgtggggaagacatatagtaatgtaagccacatacttatatgatatttttatttattgtttttcttttgaatttttccaataaaatatatatttttatagaagtccacaaaatatgtaatatgatatcttaattgttttttttcttttaaatgaaattcatcttccttaaacatgatcagctaatcgctcaaaagaatagcataaagttcagaaaggacatccctttccaataaaaacatacgaccatcatataacatcgggactatatattaaatccgaaaggtgtctagtattactatgaggtagtattttataattgattaacaattttcaaatatttattaaaataaaataagtaagacctgatattagtgctagtaacaatattacagattacaaattaagatgctaaataccatgagtactaccctttaatatttcttcaaattaaaatatgtaatttgatatcttaattaataataaacaatgccgcaaatatacattatattgctgtaattttgagggaattaagtaatagttaattatacttaagaagtcaactaaataattgtgttgcgtgtttaatgcataaactaatttcaaattagaaaagtcatggttagtgatggaaattattaatatatataatatcatatataaaaattatttattaatttatgtaaatagagtcaccaatattgacttcagaagagtaatgctatcaatgattgaatggccagaataatttcttattccatttcatatagataattttatgttgaactatttgtggtgataattattggtggtatggagtgtcttcttcttcttcatctcttcttttggtgatcataacattgctccatggcagtagctatgcagaaaatgttgtatgttcttcttcatcttcttcatgtggtagcatctcaaatataacatatccatttcgactcacaactgatccacttagctgtggagacttcaggtactacgatatcatattagtcacaacataatttttttttttttgagtaaatatcatattttgtagtaacaaaaaattacttgttactgaaaattataaagcatttccatacaagatttattactattttaatttttaagcgcaatatatatgtatatatacttttggtagaaagcccaatatatatatttattataaatttagttataccaaaattttagttataataatgtgtgtgtaaaaatttttatttttgattttttttttaaactacaaaaatgaaatataaattttgtttgtgatttttaaaatagaaaaaaaaaattcatatggtaacttatttatatttttttgtttattggggaaagataaagtggtgggaacaaatgctatttagaactcaattatgttagtttttaaaattttcaatattttgattcttattgtaaacaataatcatttttatgaaacttattttaatttaaaaaatagttacagaagccactcaatattttaattgtaactaaaagtatacaaaattccataaaaaaattattaaaaattagtatttggtaacacttttttataaagtgttatgcaaaatatttcctactcgcaactcattttttgagttgagctttcaggtacaatctttcttgcgagaacaacaatacagtactacactttcttgttcatgaaaacaaatatcaaagatactatgtacgagcgatcaactacaataactatacgattcgagttatcgatcccaactttcacaaactaaatgaaacctacacttcattcaccaacaatactttgtccattggagacttcaacttgtatgatagttatgcaacaataatttatttagagtcaaaaaatcaaaatccttttgaggaaaagtccaaacaaatagcgaaaacgatagtgttgattagttgtgaaagagtagtgaggaattcttcttacatagatgcaaatccttgcatactaagcaataataatgatagttttacttggtcatattatttattggataccgataaaatgagtccttccgagttagaggagtcttgttggataaaacaagtgactcttattgatgacacaagttttcatggagccaaaccttcttgttatgacatcaacaaacaactagctcaagggtttcaactttcttggatccaaagtttcgatgaaacagaagtaggcggtgttcgacaaatttgtcgccttaaccaaaattccaacaaagttcgttgcagttattattctaaatgcttatttaaagaaatattcaaaccaaatgaaagccttgataagtgtggtaaggatgttttctagctagagataattaagaatgttttgaatataaatattatattaacatgttttgttgttgctatttgttatgatgcagataattcatttgaaatttttatgagcaagtttatattttacacaaaatgtaaggactaataatcattttattcttagtgtttaactcatatttatttccattctatatattgttgtagtgcattttttctaatccttttatgtggtttcttttgtttctacacagactacatatactatatgggaacttataaatacattggtaatgttacctttcattcaaatagttttattattattattgggaagaaaatttattttattttattattaatttcgatatttttttttctaatattttactagtgggattgttgacgccaagaacattttgtggatttatatttgtgattttccttgtggtgtataaatggagaagacgtcatttgtcaatgtacaatggcatcgaagatttcctccacagttataacaatctcatgcctatacgatattcttatcgggacattagaaagatgaccaacaattttaaagaaaaactaggtgaaggagggtttggtacagtatataaaggacaactttgtagtggtccctttgttgcagttaaaatgtttggaaaatccaaggttaataatgaccaagatttcatcaatgaagttgctacgacaggaaaaattcatcatgtcaatattgtgcgattaattggattttgtgttgatggtacaagacgggctcttatatacgatttcatgtcgaatggatctctagacaagtacattttttcccaagaaacaacgaatgtctccttaagtgttacccgagtttttgagatatcgcttggaatagctcatggaattgaatatcttcatcgaggatgtgacatgcctattcttcattttgatattaagcctcacaatattctattagatgaaaattttattccaaaggtttctgattttgggctagcaagatcgttttcattggataatagcgtagcatctttatctgctgcaagaggaaccatgggatatatagctccagaattattctataagaatattggaagagtatcaagtaaatctgatgtgtacagttttggaatgttgttaatggaaatggcaaatcgacgaaaaaatgctagtgtaaatactgaaaattcaagccacatatattttccgttattgatacacaagcaactcaacgaaggaaaggaaataaaaattgacgagcatgctacaaaagaagaagtagaaacaatgaaaaagatggccatagttgcattgtggtgtatacaactaaggccttgtgatcgccctacaatgagtcaagtcatagaaatgcttgaaagtaaattcaattgccttgaaatacctccaaatcttcttctatatcctcaagaacaagagagcaataatagtgttgagacatcattctcattaacatcatgtgaagaggattctgcatattgatatcatcaattaatagattaaaactatttatcaaacttgtaagcttgtacgtgaattttttgaattgatgatcattatgttgtaaatgttcgtttttttttctttttagtatatcttgtggactctagtgtttctattgttgtacgtattgtctgtagagcagatttagtatgatgaatcttcttaatgttagcacacttgtacttctagtactcgattttccttgattcgacctaattcagtaaaactatccatatctctgtcactagaattttagagaagatgaatttgaagatgctataaaaagttgagaaagagatctaaaacgtttaagttatgaaattttacaaaaaaaaaatttatattctgcccgttctgttaatttgtcgctgtaaaactggtttctgcagtagcagaattacattctgcttctacaggcgtatacagttttatattttcgtatatattaattattgacatttacaaaaactcaattttttaaattatttattggatattgaattttgccattcgatccaatccaattgaattgagtcatccgatccgatccaatggatgtattggattggatcggttccatccatttgatgcttttaacattttttattggattggattggatccattc

SEQ ID NO: 265341 - DNA, 2985 bp, Cannabis indica
aaaaatttctcttgaactattagaaattgttagagttaaagacttttatttaattttaataagaaaagtctaatacctataaaagttcaaggaaacataatttggtacatgtttaaatttgagaagcataatttgataaatatcaaagtctgtagagcataatttagtagacggacaattatcgaattagtaaaattaaatagaaattggacaaaagttcttaaatccaataatctcaacagttcaaaaaaaaaaaaaaaatttaacgacaaaaacaaatttaaagaacatgatttggtacatgttaaagttcaagaaagaaaaattctaatttgcagatatgacaccttgcttcaaagaaataatgtggaactagaaaggaattcggttctgaaactatgatcggttataatttggaatatgatcattgaacgtgggattgtttgattacatacaagggaggatcaaatgtgattataacgaatttctatttctaagattccttctaaagagctctccaattaacaaaacctatcctgaatttccatctctcattcaaaccccaattccaattccaccctagaaaatgtgccattacaatttccaacattccaataatagtagagattcctattgaaagctatacaaccatgttcccaagtttagtgttcacttttcagacttcttcttcttttgtgcccattgaggaccataaatagccaagtgagttcggccgaatcgtctatcggttatctgcacttacattttgagttaatttaataaaacttgaatgccttaagaaaatgaagaaaagaaatcacagtgctttaacttaccttaaccaggttgccacatgaatccaacatgtctgttcttagtgcatattcaactacaacaaatgtatcttctccaattaaggctgaatttgaaatttggtccatgagtaccccatagtcaacttgtgtataaggaggggtaatactaatgtagtcaaatggtgcattttcacctaaacaagaagtcatattagtgagagttttcgaaaaagctaacacggtccaactcgaaattatgttctaagtatttttcattacttgaagtaggcagcagaagagttcaaatcattaaaatgagagagttaaaacattaaagaagcacataccaacaaatttgtctgaacgttctaagaacttttcaactcgaacggtatgaataactgaggcatccagaaaccctgtccattccaagttcggacgcaagacattcgtaacaacccacgggtccatctcaacaaaatgcacctggaagttaaccaatagaaagaagtaagattttaagggcagtgtagataaattatagaacataaagagaacaatggtatagatttgacacatgaacttcaataggtgtacctcagaacatccgcggctaatagcttcaatcccaacagagccagttccactgtacaagtccagccaccggccaggccttaaagctgcaggacaaccaccagcagcctaaaaaaaaaatcacactaactattcaatcaggcgaatagtgcactgaatattgaccattaacaaaacatcttgatgaggggcaaaattaaaaaaagtaaaaaaagataaataaactattttgtcagctattaataacagataatggtcttcaagagactaaagttcttgagaagggtttcactgcaaatttagaagatcatattattctaaaatcgattttatagattctgatatgctttattgttcgattctcatgaattaattaggactaaattcaaattacagtatttcatcagtgtgctcccacaaggtctgagatttgagtctctcttaagtacctacatagcaattgttatagtttctggtgcccaaatattgtagggttaaagaaataaaattaacaaaacatctagctattgagatagcaaaataaaatcatgaacaagcaaaaaactttaaaatttaagcatacttagattgggactcaatcattacctgcaatatatcaaaggctgcacctttcacaacctccatcatgggccttacatccataccctttggtgataacaatttcattctccgagcttttccacccagcacctaaaaacaatggcagatttataggctgctgtaaaatttcatccaccaaacaagtaattacacacatacataccatacatatctctataaatatcagaaaaataatgcaaacctgaagaagtttatgagtggttcgagttggctttggttcctcttttgggagttccttatcttttcctctacttttttgaccctttctccttctagtctaaatttccacattcaaaatcaccaaaattctattaaaattcaaatacccaattgaaaattttcaaaatttaattgaattgcaacatcaaaaatgaaaaataataaccttaagagaaggttcggataagaactcatcaggattgagaccatatttctcaagtaattctttcttggcctcttcacttactgatacattcccagatgtttctaccattaacccaataaattaaattaatttcagaattaaataatgaagtgtttttcttttctaaagaacaaaagtcaaaaccattaatttcaaaaatttacttgaagagaatacgataatggttgattgcgttcgagtcctgttgggtctggcatggagattgaagagaagaagagtagaggagtgtgagccaaggtttgtttcagtatgtgatctgagggagtaaagagatggaagcaatgaaactgccattggagagagttgggagctcaaagcaatgaagtagagtgagtttagtcacagcctctactggaactggatggatgaaccagacttcatgaggcccacttgttcctcgtaagcccattgactggcccaatctttgaatttttttgtatttgtgttatttaaagaggaaattacacttagtatgggattttaaaagtt

SEQ ID NO: 265342 - DNA, 502 bp, Cannabis indica
agacaaaaatttttaaatccaacaatctcaatataattcaagagaaatttttagcgagatcagaaaagttcaaagaatacgattttgtagatattaaaattagggaaacaaaaattctaattagtcgaatataattaagaccctgaaattacaaatctaacctttggaatgaatgatattcatgaggagtagtagcagcaccaaaagaaggatggtggaagacaagtagaacaataatgaacaacaaactaaacaccctcttcatcatcatcatcatcatcatcttcatctgatcttatatataataaccaattataaaaggcaatacattatatagaacatacatatatatatgtataaatatatttatagaccaactcaggaagctcatgatagaaaatacatgataattaattagtttgactatatgtatatataaataactacatttttcatgaatagcataattaatctatcacgcgttatttcaagactttttggt

SEQ ID NO: 265343 - DNA, 1454 bp, Cannabis indica
tatatagaatagatataagtaaacttatatttatgccattattatactacacattcttctgacctaaaccttttatgaccaacaatatttcatttattttgaaaataccacttcaaatttaattttatcatttttttttttcaaaaaaacaccttcaagtgttgtttttaaaaaacatcaaataacacagcaaaataaattactttattgttcaaaaccttgattatttattaccttttattagaattatttaggacttttacctcttgaattatcatttatgtatttattgtgccctataaatttttcagctcattataaaatccttaaactattcacagtattataaattagtcattttgtcaaaatttgtcatatagctaagcaaacaaaatgataacacggatacttaaaaaattaccatatcagcgtcacatatataatttaacataaaaaagttatacacctttaaaaaattattaaactaaaaatcaattaataattaaaaaaaattagataaaattaaattaaaaaaactaattattttcttttaaattaattagcgtggaattaacgggacaatgatataacaattggctaaagactcatgtcattattttatttaccattaccacgtatatgttagagaagttgacaaaatatctaatttataatacctgaataatttaaaagctatttttaacacactagaaaattcggggacagattaatacataaataacaacaattctaaatagtgttttcttttaattattgtttttgcataaagtcaatattgtcttgaagcattatgattcgaatatgaccgtacttggttattttatttttttttatatatatatatataaaaaggaaattatccttatataaattaatcagtaaaagccaaaaaagaaaaaaggatagaaatgttggccaaaaatgctatactgaaaattatgatctgatggttattatgaccaatgatttaaagaaatagcatagaaaaactcacttctcatgtttggtatgaagttatattattattgtgaactttggaaagcatgtaattcataataatataggattatttaatcaagtttccattcgtaatttcatcaaatatatttaggggttttttagttttaactaaaaaagattacaatattgtaaaaatacttctaggccaccaaataaataaatatacagtctaaataaaaaaattacacaaatactacttacacacaccttcaactcacgattcatgcttttcgggattgaaaccttcgggtaaccacccagcaacccaacgcaactgaaacgaaattcaaccagaaagaaaaccaccattaattccgttaacttcacctgataagacgatcggaatcaatcaaaatagggattgttttgaattcatgaaaaaaaaagtacagaaaaactactatgaaactaaa

SEQ ID NO: 265344 - DNA, 678 bp, Cannabis indica
tactaataaaaaatgacacatgacatacttatatttaacggtcaggtacctagagagttatagaactataagttaggtattattactgctaaaaattaaacttaaatatttatttacaaatgaaaattaaacttaagtatttataccgcaaattactcttaattttaatatcctacttcacaaactattaatgatattccagaactttaatgcagtatttgcgaaattaccttcttcacacttttatgtcagggtaaatttaaggagcttgtatatattttcagcatatatattttgaaatataaaaaatgatctttataaaatatatgtaaagagtgtcaattttaaaattgggctacaattcaacgggactctaagccagggcctgtcctggccaaaccaaaaccgttggatgattttcaaaaatgtccatgattttgaaaagaaaaaaaaatacaacatacggtataaaattactgaaatatgtggggcataataataaatacgaaatttattttaggttaattacctcatatattattttttttaactttattttcttcaaattgatggtttgagttacttcagtaatttctacgtgtggattttagttataatttaagttgttctgttagttgctatatagaattttatgtgaattttcaaaaaaaaaaaaaa

SEQ ID NO: 265345 - DNA, 607 bp, Cannabis indica
gaaatttattgagaacattattgattatgttggctcgggttagtgagttaatgagtgttgagggattacaccatggatgacttgctgtgattattttcttgtagctcctgagattgatatctctaattctcattatcaataaagattggtggcaatactttcaaactagagtatgaccaagttcacattgaacttaggatcgaaaccagtataaatctcttgtgttattgtgtctgacagccatttagattcatctgtgttatattttttggtttaatgtgtttgttggtttttgttcttgatttgtttgttttgatttaacttttgtttgtttaagtgtgatcttgaagctggaattacagaggttaattcctatgtatcagagctaaatttcatacaaatcaaagcttggttcttcgatcatcaagggagattcaaagatcacttgcttccgcaccaagaactcatcaagaattcatcaaggaattctacaagaacacagattgaaggagaatgtcgatggcaaggtttgaactagagaagttcaatggatctaatgatttcgcactatggcaagaaagtttgaagggtatacttgtgcaccaaa

SEQ ID NO: 265346 - DNA, 818 bp, Cannabis indica
aaaaaaaaaattgaaaaagctttcccaacgacattcaaatgtcgttattgataccttcatttttaatgagaacttttaggcgttggtaatagtggcgttggtattgaccataattcttgtagtgctttttgttaaataagctatattttaactttttaccacttatgttttacttcccaatgtaacaacgaggtgtcacatttgttctttccagcgaaaatatattctaagaaaatttattgcttcatgaatcataacccaaatctacaaaactaaaaattaaagttgataaattagacaaactaaagacaatatcataatgtttaaatattaagggcattttaaatcttgtatgcattattttaagggatttttttatttttacacttcaaaatagttttttttttcctttgcatttttacggaattctacataaaaacccctattgcaactagcgctgcaacctaaatcgcaacaaaaaatcgtatagcaacacacatagaaaccaccagagaaaccactttaaaaacccaaaccataaaaaaaaaataaaaaaaaaaagttaaaaaaatagtatatggggtaatttaccttattttaattaattagaaaatatgtgtaaaaaaatttattaccattttctcatatatttttagatacaattagaaactttttttcaatttttttataatatatatggtaataattattgactattatatatttctttttttagattccataattcttgctaaatttaaacatcaatgtacttaatataaatatataatttttatactattattgactattatgta

SEQ ID NO: 265347 - DNA, 991 bp, Cannabis indica
atgaaaattctcataattgggctaaaaattcccctatacgtgtggcataatggcatatgacaaaaatataaatatgaataatacatataattactaaattttcatatgtaatgtgtagataatgacaaaaaagatttacaacagtcaaagaatttattagaatttatgaatataggagttggaacgaaaaatctgaacagagctttgaacacgatcgtaagtaccttttgttttatggcgacataattcttctcgaccgacaaagaagactaagccgcacacgatcaatactccgactttgctttcaccgtcgaccgtggaaaacacttgatggagagaggcgtatctgggcagaagcatctgacatgatagatttctcaagggaatccacactaacataacttgagaagaggtacaaccgttattctccagtactatataaccgcctctcactctttttctagttttttaaatcatttttctaattcatcgaaagatcaccaccaacatcatcatcataatccctccgacgtcgtcgatttcgaacagagattggctttcatcaatactctcttaaggtccgaaatgacgcttcatcacgaacccacaaaaccagaccacttgatcgaaatgtctcacaaaattaaacatctcgaagcctcttatcgagactctgattgttcttgcttaaacgataacggagaggcccaaaaaaaactacaattgatcgctatataaagttgtttaataatgaatgtacacaatacatttaataaaaaaacgagagaataatttgagaaagggggaactatcttaattatacttagcaacttgattttaatagggctatttttaaaatcatgggaaaaattattaaggatatgataaatatggcataaaaagtaaatgctactaaatatggcattatctaaccaatcaaactaaaaatatggtttttttggaaaaaaaaacatataaaacattaaaaaga

SEQ ID NO: 265348 - DNA, 594 bp, Cannabis indica
ttaattttttcaaacaaaaatttgtaatctttaaaaataaaatacattcaaaatcttaaaaagaccaaaatcttaaataaaattagcaatacgtggctcggcacgtacattcacctagtatatatatatctatataaatatatacatataatcaggttcgtcaaaaccgattgcggccttggtgaaaagatataatttagcttttttcttagtacaagtttttgacagttaaattatctcaattatcatttcacttgtaattaattctcgaatcttaaattttagcggtaaaatcttctaaactactaaactatagcaaatttaaggtgtcatccggttaacaaccaccatgaactccttatgtgcatactcacatggaatattattatttgaaaattattttcaaaatttatttaaaattaaataaaattatacaaataaaaaatattataaaatttgtaaatatttttttttttaaattgtataatattagatatacaaatataaacctgtcacgtgtataagagtgtatacagaagcaatctatgttagcagttaactgtagaatgaggatgataccttaaatttacaaat

SEQ ID NO: 265349 - DNA, 830 bp, Cannabis indica
gaagaagagtcatgattcaacaaactgggatttatctcaataatgttgtccgcatcgatattcctacttctttggaagttctcaatggggatagtctccactctatccttttctgggttcaagtgcataatacacacttcctcaagtgtaatgaagacttggcttgtttgattgcttctaaattgggccctctggttgaagttaataagctctcccttagggagacttggggcccatattttagagttcatgtcatgtttcatgtttctcaaccaatccctagaggaatccccgttgagtttcaaagtattaacagggtagtttgactcactttgaaatatgaacatcttcctgacatatgctttttctatagaaggatgggacatatctacaataatgactgctttgattacatgaaggcatgcgacgaatcatcatctcacccttacctttgttatgatgaaatgattagaggtaaggtttgggtttcacaaactctctcttggaaagctcaaaacacttgaactttgtttttccatttgttgttacttttatgtccacaaatcatgttagtggtttatgcgtgtcaagccaaatcagcccaaccagctcaatgcaacttcaattggaaaactttaaggccaatgtagcctcttcacatcaagctggtctttttatgtccacaagcgtcgttaattggactcaaagcaaccgttcacttgattctgacctaaactctaagaaccattgtcatcttttactgcccttctcaatgtcactatgagcaacctttcaggacaacactgttcgaaattattttaccaagatct

SEQ ID NO: 265350 - DNA, 800 bp, Cannabis indica
gagtactcaacatttctctctattaagccaagctcgaagaaaattatcatttcagttctatgcatttatagaagctatagattctgtatctatgattagtgctcccgctcaattgaactactatgttcttaatctgtatgtcacgaaaatatccaattgatcaactttcacgaacaaattgaagaacataaataatacaactaaactagaaactagccatatcaggattgagatcattgatctaagatcaactaggtgatattgacttagatagatattatagtaagtttatggtatcttatccaattttaatatcggtcccttccgatgtatactccatacatccaatccaagcttactttaccaatgtcctggaatggatatagcacttatccaaggtgcaagtaaactacattgtaaattatcatatcagtaaaatcttgtgtactgataaatcgtaagaatttatttaatcacataatcttgattacttttcactattttgacaacatagtaatcgagaaaatcaatgtgataaggatttagatgaatttataaatcaaataaatgatcataaataaacatgtgaaccaaataatacattaaacaagtaatgaaataaatttatttctttattgataaatgaatattcaagattacattaaaatatagttttagttagggtacaaaacccaacattcctgactttttcaatgtctatcaaaattagccctgctaatactaagatactacaccttgtctatgtgactctataggccaaacgtcgcattccactgtta

SEQ ID NO: 265351 - DNA, 1273 bp, Cannabis indica
aaataaagtgtcacactaactagctcgattgggtcagtcctatagtgagtctagtgtttgttttcacctattcgcacaaaactggatactcctttataaacaatgactaatattccatgcatgttacactctttataattcacacacagacactttcatatttttgttaaatattcattaactttaacaaaattccaacaatatgtgtgcaaaattatacgcatgaagctccattttttttttgtgtgggcgaatacgtgtataataatataacaatattctatatccaatgatataattagtgtgtcctaatgctcatgcatgtgatttggtgaccattattaggttaatgattaaaaaacccacagaaaaaatatatacatatatagctatatatgaaaaagggatggacccatataaaaagtcccacaactcaaatcaccactgatttcagtgtaactatcattcggtagtggtgtgacctaaaactattgggttgtaaagaaagaatataatttatagaaagtatattaaactactattggattggagttactaattatacacatatatattaattagagtctagatttatgtggagctatatatatttatcaaaatttgcataatttataaattagtggtgcaaacgtgactttgttttcttctgtttattttattatcatcatataattataaatatattttttgaagtggcctggtcgcatgaccttatttggcaaaacttttctcagaccacaaacattataattgtcattatctactcagattatcaatttttcgtactatattaagactaaactaatcatatataatgttgaagtcacaatacgatgattattttccagatgtttatatagttttttttaataattgaaattgatcatattggtaggttaattatgttcagaaagattctccataatttcttattattttgttcattatacagtgtcaattttcttaatattccaatgtaactgtcacttgttggtgtcacaacccaagcagcataataaatctcaacaacctatgtcataattatggatttgacgattagagccagaaaaaacaaaattaaaaaaatatatataaaatataaaaacaaaataaaaaataggtgatgttataattggttgtgattgttgatgggattaataagattataaggaaatatgttattgttgagaataaaaacaaaattggagatgaattaaggaagtggggttagaatagtgtagaggtcaataat

SEQ ID NO: 265352 - DNA, 790 bp, Cannabis indica
tgttgtaggagaatttaattaaaggtaagtacttactccaagaaccctcaaagttcatgacacaggctggtaataaatcttcaagtatctgaatagtcctctctgattgcccatcagtctgagggtgaaaagttgtactaagcttcagcttggtacccatagccctctgaagactaaccaaaaatttcgatgtaaacattggatccatgtctgaaacaatggatttaggagctccaaggagatgaactatctcctttacatattgtaacaccctaactaacttaggcatgctagcgtgattttcacgtactgtgcagctcgttgctaatcaacgagattgataaaaacatggttaattaaaattttcttatttaattaaaaacataaggtaatatatttataaaatcctgagatcccatttacaaaatacatttagaaaagcttgatattcatatacacaagttttgtcacctagcgactatacagcaaaagcccctgatgtcccaaagatcgtacgctccaggcctaatcaccccgacatgtacaatcttcatctactctctctctcacggctcctcggctttagcctaataatatcctaagtttaccaagcgcccatacacctgatcataaccctatcccggtatcccacacggtactaagtctagagcgttcatacaacaatactatcgactagggatggacatccaatccaatccaaccttttttttcctcatttgatccaatccaattagtaattggatttggaaaatcatcatccgatccaatc

SEQ ID NO: 265353 - DNA, 1386 bp, Cannabis indica
aaagacaagtcaccaagagtcatacgtctactcagtcacttggggggcacctatacctgtacaaagcatttggtaaaaataaaacaatcacaattgcacgacaattataaacagagaatgaaattcattaaggatgacaaaagcacgtagtaccgggattaaaagctgcccggtcagcccgttgtccaaaaaatgaaaaataattccaagtttaaagaccgcttggtcggtcatgatgtcttaaaaaaggccttgaggccgcatataatatatatatataaaaaggagataaaaagagaagtgtttaaacagctggagtcccaggctcttggttcggttcttctgagccaactggagtaggaggatctgttgttcgaacaggagaagcatcagcagcctggccagaggcttggccggaggttgaagcagccgcctctttcccaccataagcaacttgggccgcgcagtactcaaggtacatgtctttagcctcgcccaagtagtcaaaattggcctggggattagccttccagaaatcgaagaagagctcgaggccggctatctccaaagcattgaccttctccttcaactggtccgcctcggccaccttggcatccctctcctcctttcaaccgaagaagaacgtgccgcaaggaactcctctcatcctgaagactgttaacttcagcagataagatctcgatggtctcctcaaagcgattagcagcttcgaggtcctttgttagcacggagatcttcttctcagcagcaaacagcttcttgttggcttcgcccaactccacccgaacacctccagtttctaccctggcctccgcagcttcctttttgtccaagtccgcctctgccctcaaggtgtcggacagagccgcactcttggaagtgatagatttagcccgggagtaagtgtaagccaacttcaaaccggcctgcacaaagaaaaaaagttagcatatggagctaagtgtggaaagtgaaagggaagtatcaaagaagacttaccctggtgagctccttcacgactccgcccaccaacacatctagagatgagtcactatcagcaccagctagttgttcacagacctcaggaaacagccggttcatatagtgggttagcttctccttgccttttttggcctctggcaacatgggcaaaggtggagttggtgcctgcgcccgctcaggaatactcctgactagtttagacccagtcgttggtggtcctaactctttggacttggcagatttgggggtagaaaggtttgcagcagtcagctcctccgaaagatcaattacctctcttgaaggtctcttctccgaggacccttcaccgcccctagactttttggccggaggagaggcgctaga

SEQ ID NO: 265354 - DNA, 610 bp, Cannabis indica
tacaaaccgtaaagttcaagtggtttagccgccaatattcctaaaataaaatatagtcacgtgtgcaacacactgtttgaacgtatttttcggcgtgttaaactttttcgaatttcttaaaattttacaggatgttttaactaactataatttacatgaccatgaagggtaaataccattttggatcttgtgttttacaaaaattatcgattggaccttctattttgttaaataacaaaatagatcttgtatttttcaaaaatgatacaaataggaccctgaactgattttttgtcaaaataaaatttaataataatttgatctataagtgttatgacaaactgtttatattttttgtatctgttcgtgttaaattgtcttcaaattagttgttaacgcagattttcgttaaccaaaattaacttttttagtaataaatacttcacagaatttaataataaataattagatcactctagatatttttatgttattttgtagttaaaatctacatactccatgagtccttcttattaggaatttttatgattacagaatacaatatttggataataataatttctctctcaaatgtgtcgtcccttttctg

SEQ ID NO: 265355 - DNA, 567 bp, Cannabis indica
aattcgtcgagctgggcctatactgctgggctgacttgattgacgttttggtcgggttggattacgttagcgtctttctgagcggggatttgagtatggctccgggctgcacgatcgttgtagtatcctgctcgtctgttctccttcttctgtttagatcgtcccttaggtcatcggttgttccaagcctatcgaacacggaagaacctggctgcctcagcgattggttcgcttggttgacaagcggaatggctccattattctgagtggatctgtcgggtatggctcctcatgatgaattcctgaacaaggtctgcacgcctacctcttggaccacgagtggaactcgtgaccggggattggacggctgaccattggttgtccgagaggcattcatcgtcaggtcatcctccgtttctcccaggggaatgacgctcggcgtttgttggcctacagtctgagagtgtcttcgtatcagcacagtagcttatcgactacgatcttcgatttctacatggtgagcccttaatgcctccatctctttatccctccattcaacgaacatac

SEQ ID NO: 265356 - DNA, 851 bp, Cannabis indica
tcaaggcaattaaaagaatacgaacagagatacccgacacatgacctagagttagccgcagtggtttttgcactaaaaatttggcgtcattatctctatggagtgaaatgtgaaatctacaccgatcataagagtttaaagtactttttcacccagagggagttaaacatgaggcagaggagatggttggagctagtcaaagactacgactgcgagataatgtaccatcccggtaaagccaatgtggtagcggatgcactcagccgtagaggtcccggactagtttccactttacaaggagtatcaagggaattagtggaagacatggaacgagctggtatagagtttattacagggcaacttgcaaaggtcacacttcaatccactttgttagaaagaattaaggaggggcagacgacagatcaaaagctcagtgaactaaagcaagaaattttgaatagtaacgccaaagattatgaaatatcagacacgggattaattcggttcaagggacgaatttatgtgcccgataatgatgagctcaagaaggggatattggtagaagctcatactacaccttattcagttcatcccgggaccactaaaatgtaccatgacctaaaagcattgtattggtggcctggtatgaaaaaggatgtagttgaatttgtggccaaatgcttaacatgtcaacaagttaaagcagagcatcaaagaccagcgggattattacaaccactgaagctccctgaatggaagtgggaagagatttccatggattttgtgactgggttacctaagactacaaagcagcatgacgccatttgggtagtcgtcgataggtatacaaa

SEQ ID NO: 265357 - DNA, 541 bp, Cannabis indica
agatttttaaatcagtaagtgatataactctgcaatactttatatcacttctaaattactgctgtgtggagaaaaagttactgaccatgaaatgttagaaaaaacatataatacttttcattccttgataagagcctttttggaataattcgagtttttgaagaaaactgatttttatgagtaaaaagtaatggtttggtgtttttatgctagataatgttagtggatggattgacgcaccaaaacaacattttcctacagttttgaaagtccaagaagagtaaaaacctgttggtggttactgcagcgaaggatgaagcgagcataaaaaagataaaaataaaaatatgtggaatcaggccctgtcgtcgcggccacgacttggctagttccggtgaggaccctgtcgccacggtaagcaaccctgtggctgcgcacagtaatcaaaatctgggcaatgcgatagaatcctagagttgcaaaattgagatagaaacacacacacacacacacacacacacacacagagagagagagagag

SEQ ID NO: 265358 - DNA, 619 bp, Cannabis indica
cttttcctaaaataatgaaagtaatgtattttttctttttgaaaaaaatgcaaatcgttctctcatagagtatgttgtattcgttagcttcgggagtctcttttcaaagagctcattctcaaacttcatgaaagatattgttgtgattatttttttacatgattatacatgagagactatcacttttaatagatattatctaagtattattagaaaaattcgagtttttatatttaattttactatctaatttaaaaaaaatatctcatttttacatgattgagattattatattagatgaagagagagccactgctacaaaatggccttatagcttcagatttatcaatcactttctttttttttttttaaaaaaaaaaagaaaagtgaagccatagccttctagaacacactactattagttagtcactcacatataacttctgttatattaggaaaaatgaaactaaaagggaaaaaatttatcgcagaacccctttggctacgattatttgaaaataaccgaagccatagggttacatgtgctaccctactggcttcgattatattcaaataataaaacctaaaagggttctaaacttctaaatgggcttcgacc

SEQ ID NO: 265359 - DNA, 691 bp, Cannabis indica
aaaaacaaaaagaactaaaaaataaaaacaaaaaatgacagcgacactaacatgcttgcagcagagaaaatatggctctttcacacttggtttagcaacgaaaatgctctcagaattagatggaatggaagtgtaattggtggtagtgaatatgccttgacttgtgtgtttcaacagaattttgcatgctatctatgtccttaatacttaccgagagtaattcaatcaataaagtgtgcaaaatcttcccaccaacaccttgaatttctataacaactacccctcgatcctcaagtttaaaaagtatgcttccataagttgagctagtgaaatcctctccactaatgtagcttagctttacaacttagatcaaaaggaatttaacaggcttgaaatgtgaggtttaggttcgggtttggtaaaggatgatattttaggctcatgacctaactacctcaatttgttaaggacttcttcttctctcaagcgctcacccaaaaattcattttcaacccaaaatgttcactacatctagttcccactctcttcctatatgtatgtactatatatatatgtattatattttttcaaatcaactagataaagagagaaagagaaaaaaaacaacaacatttttctttggttaggaatggtacaccccaaacttagccttaaacttgcctcttttttt

SEQ ID NO: 265360 - DNA, 1297 bp, Cannabis indica
cttataaataagctcccatagcataagcattcttaagattaaattaaattgcataccttgccttttgtacaaagaaaattatcattccatttggacacatagcaaaaccagaaaaatgagtatcttgcaaagtctatataaaacattggtgagagtaatatgatgtaaaggaagtcagttgttagttgagcagttagttagcggattacttagttaagagtttgttaaagagtcatttccaagctcgaatttgatttggtccacctcctggttttggcccaaccacaagaagaactcaatcaaactcaatgatcataattttatgttttggaaactacaaaatcttgtaattcttgtagctattcaagtaatagattgcaaaaatatatttaaaatgtagcaccatcaccacagtttctaagtgatgttgttgttgaatttttttatgcaagtgtacgtattgattgtaagtaattacttacacgagtgaagtcgaacccacagaaattgtaattaaatattataaaattaaatttttatttctatttggcaataacaaatttttatagaaaaatttaagactaaaagtaataaaagcataaaataagtaatctagaatgaaaattgacaatgattagagttagggttattgatttcaattgtatctatcttatatgtcataatataatttaatttttatttaccaatttctatagaatagtaggtttactcaaataatttatagtcagctaaaatatataaatctcaattacatgtaattttttttactctcgtgataaatctcaagtaatcttttttattttttattttaattttttaatataattatttacgcaaactaataaaattgtgtcacgtgtacactatgtctatgtgtacaatccaccatggcagttaacagtcaaatttggatggaagttgtaaagtgccaacaatatcgtagttttggacgttttaccgcccaaatttaggttttgaggattaattgcaagtaaagtgaaactattgggagttttgttgccatttatactaaatatatttaagtgaaattttggtacaaaaccatgcttaaaagaaaatttgaaaaccaacttattaaaatctatataatctaggagcttacatgataaataaatctaattaatatatttaaaaaaaagctttctaactttttatttgattaaatattgttttgaagaattaattacatattatattgactttaatatttacacttttttttttttggttaaatactattttggactctgtattt

SEQ ID NO: 265361 - DNA, 673 bp, Cannabis indica
gcagtacaaaagaaattgtcaatgggaaatttgaatttctatgcatacattaggggataattttttccctaaactaatacttttctacatagaaaatactactttttcaaaaccccaaaaatactcctctcaaaaactcaaaccctttctctctcattccctcaaactctctctgcatctctctttctctctctatctcggcatctcttcgccgccccacccaaaccatcccacaacctccacggctcaaccaaagagcacggctccgacgacctccacgacctccacgaccaccgaggaccacccagcccccctctctcttcctctctctcaacccgtgaggaccacccaaacgcaccaccacctccacggctcacctccaccacctccgacgaccaccgaggaccacccaccacctccgacgaatgacccagcccccctctctcttcctctctctcaacccgtgagcctcaacgaaaaccaaaaaaaaaaaaacaggggtccgataggcagaccgacggggtccgatgggtccaatgagggggtccgatgcttgcaagctagggaaaaaattgggttgggatccgatggagtccgacgggtccgatgcggggtccgactggtccgatggggcccgatgggggagtccgatgcatgttggaaattattttac

SEQ ID NO: 265362 - DNA, 638 bp, Cannabis indica
agcattaggacgttacaattttggatcaaagccgccaggtttgtccaccgaagcttgccaagacatgtacaatcttcatcagagaaagtttggtttacggttcaagtacttgtttagtattttaaatgattattaaagcatgttaggaagcatattagattataattgtttattttaagtgtgttgcctttaagtccataagagcggtattaagttttatgatcgctgtataacctgcctggcttatgggttcgcaggctaagtcctataaaaggaagctcaacgaaatacaagaagtctgggtaacatggtttagaccaaaggcggttagggaaatcaaaatccccagaatccctgtggtcgcggtcgtggccgtggcagagttcagggttgtcaccctgtaaatccaccataagctccatcggattgggagcagaggtttgcaaaaatgaaagatcgaatccaccagaaggatgaagaaattccgaggttgaggcagcagggtcttcctatcgtgcctcttcaggaagctgctcaggccgttgcagttccagcggtgccaccagaacaacctgttgctggcaacatggagccgttgtacgaaagattctgtaagcaagcacctccagtgtttctgg

SEQ ID NO: 265363 - DNA, 612 bp, Cannabis indica
ccaataaaaggatcaagagagtattaatacacaacgggagctcggtaaatatcctttataaggagaccctaaagaaaatggggctcagaaaagccaaattaaggccttgcatggtgaacatttgccgattcaccggacacagcatcgcaagccttggcataatcaagctcgcattaaccttaggtaaggcatctttatttgaactattatgaaagacttcttggttgttgacctaccctcggcttacaacatattgttgggtcgtccagtactgataggactaggggcaatcagttcgatcaagcacctatccttaaaattccaaatgctagaaggcgtggaagtggtgcgtggaaaccagatgctggctcgtgattgctattgcatagagctacaacataataaagtcggtcatccattgatggcgatcttggtagaaaaaactgaacaaaaagatgaagatcttaacccccaagttcaagatgaaagaaacttgataaaaccgattgaagaattggaagaggttattctggacccaggaaatcccacaaaatgtatatacattgggaagatcctggacgagcagctcaaattgcagctaataagcttttt

SEQ ID NO: 265364 - DNA, 1183 bp, Cannabis indica
atattttactctattacattctcataccaaactaaatataataattctcacataattaatgttcattccaactacaaatagattcctattactattttttattttattgcatacattattattactattaccattatcatttcattataccaaaaccaaacaccaccactaattattaaataaatcttaaatataatatctttgtgtaaatatatgtttttttttttaacaattttttttaatataataatttttaggaatttttaatttttatattttaaaataatatttttttttttttgtattttttatggaatttcacatataaaaaaacctcatagtaactaacgaagcaacttaaatcactacaaaaaatcttacttttagtcacaataaaatttgtgacaaaaagtaagaaagttgtgactaattataaattgccattcttacattgtcactaaaaagtcggtggctaaaagtattagtcacaaaaattacaattttattatagttacaatatttgttatgactaaaattaaattagtggcaacttgtaactaaatattatgtttagtcacaaataacttttttgttgtgactaaaagtcaaatttaatttttgtgaataaaaaattgtcactaaaaatagtttttttgtagtgaatcgcaactaaaatccacttatataggaaccaatataaaaactaccggtgtaacccaaactgtaaaatttaaaaaaaaaaataaaaaatagtatatgaaataatttctctaatttttattgtacagtgtacactaaataaaaaaaaaaacttcttagagtaatctctggcataaatacctaagtttaataataactaagttataattctataacttttgtaggtacccggctattataagtgaagtaaatttccactagcttgacaatttctaattattagtccaagtcattaattttttttcaaaaaaaattaatttaagtacaccaatataaaaaataatatgtggataataacttattatttaacaattaaatacttaaaaataaacttaaatatttatgtcacatattacttaacttcttaattctattgggaaatttgattttctatacttagaaaatctaaaaatttgatttctaaaccaataatttaaaccctaaaaaaactataccttttttt

SEQ ID NO: 265365 - DNA, 1360 bp, Cannabis indica
aaaaaatattaagggcctggggacgggccttagaaattgtctccccttagaagataataaagaaattgtctgaaagaaaggaaaagagactgtaaatgtaaaggaaagaaaaaattatagtggtgaattggttgaactggtcggcctaatcaatgcggggaggaagacgaggaccccagcgttcttcaagcaaagcgtcaagcctttcttcttctcccggaagcgagcgagggcttcctcaggtttgggataaaagtcaagcatgatgctctggccattcgactgccaggccatgtagacgccatcgtcaaaatgcttgaggcagtgcttgcaggagactggggtcaggagctcatctcttttggcctttttcaaggcttggtccttaaaatcccttagctccttcaccttcatagtcaggttggccgtcgactgcaagtccccctgatgcagctcctccaaggactttaacttggcggccatttcattaatagcctccctggcttcccgcagctcgcgtttggccttggctgtagcctcaccctccgccttcagctcctcccgatgcctcgcctctgcctgagcgtccctctgctgggcctccacccggcgcttggcctctgcctgagcttccctttgctgggcctcctcctggaatgccctcctctcagccgacaggtcccgcaaaatcctcacggcctcgtccatgcccctaaatttggacataacaaacccgtgatcgatcagggtcatggaaaggcggccggtctcggcagtaatttgaaaaaaggaaacaagaataaaagaagggaataaatcacaagaactcaccgcggccagagcagcgctgatgtcctgaacttagtaaaccaagttcactgaggcgcaagcagcgtatctcttggctgggaattgagtcagatgggagacaaactggctggtcatctccgaggcgaagggagctagagtaggcccgacgaagcggttgaacccatccgtcagagggtccatgttcaggtcccaaggattcttgaaggcgtcctcgcgcaaggtgttctattgctcctcctgcaggatcttcttcaaggcctccacctcagcatgtccccgactgaactcgtccaaggcgtagttatgtttggcaacgcagagcatttgcctttccttccgcagggactgaggtgagcacaatgtcgtgcggcacagtatactcctccgcttcggaaggaatcctggagtcagtgctaacagccggagtgtcccccctctgggtctgcttggaacgctcggtctcaaccattttccatccgtttgcgctcaaggtgcctcaatctcgccctcatcctcctcaacctccccc

SEQ ID NO: 265366 - DNA, 808 bp, Cannabis indica
ttttgccatacaaatgaaactgcagttttaccagcaagagtattgcataattgggattttacggaatatccagtctctcagttggctaaatcatatttggattctatacatgatcaggtaactgattagataatattgttttagtaattattaaattgaatccaagcctttgctgaggacatttatcgttttgtaatgactttgctttcttgcagcccatgctttgtgtcagtgcagtcaatccattcctcttctcaaaggtcccagctctgcatcacgttatgggtattagaagaaaaataggaactatactttcatatgtccgctgctcattcaaagggtctatcaataaaggacttggatctcgaagatatcttcttgaaagcaatgatttttttgctctcagagaccttattgatctttcaaaaggggcgtttgctggttaggctctttataccgagcttatctaacttgccttgatatagcttcgaaagttgatttcagaatctatctaggagtctcgaatacattctttcatttgaaattgaaattagatactcttttttacctctaagagcctgagctaatacagatgattcatttgtactcattttgcagtgctacctgtgatggtggaaactgtcttgaagaaaattctagcgcacataacagagcagtgcctcgtatgctgtgatgcgggagtcccatgtagtgctcggcaagcttgcagtgacccgtcttctctgattttccctttccaggtaaatatgtatacactgcttatgtatcctttgcatgcctctaaata

SEQ ID NO: 265367 - DNA, 683 bp, Cannabis indica
ttttttaaattatatgaaacttgatacttaattacaccaataacagtataacatggagcaggatgctagacaccaataatattttttagtaattttctgctaagtctatagcaatgaatgttcatatcgaggagacgagatgccctttgtgtgggagggaggaggaaactatggaacatttatttcttacttgtgatgtggctttccatgtctggcgatcttctcattggggtatttatccgatctgtgacactggtatctcgatgtgggactgggtcaaattcatttgggacctgaaacataaagggactgatgtggatgaggttttcctgtatgcctcacttgtggtcgacattatctggcgcactcgaaatgagaaggttcataataatctcactttagatgtgaggaagtgcattgactctattcgattttcttttgcagaattacatgttactgttttcccttcccctgtcccttgcctgaaggagtgttggtctcccccttcaggattggatcaaactgaattgcgatgttaaagtggggtttgatagcatgtgtatagcagttgttgccaagaaccacttaggcgaggtcgttcgagttcatacggcttgtcttaacttttttgatgctctttgtggggaaccggcgacgtgttgtttggctaattctgttgcttt

SEQ ID NO: 265368 - DNA, 1865 bp, Cannabis indica
tcagaaccctagttttcctcgtttttaggtttttaggggtattgccatgctttttatcgatagggaaacttttagttcctagttttagtccccgggaagtgatttagcgtgtcacttatagcgttgtgatttttatggtttaggagccagtaatccgccgctcagcttcagttccagtcaggttgaccggcacacctgaaatcggaatccaggtaagattagtataacagtatgcatatgtagattacatgtttagcgtgcatgtaggaagcctgttagattacattagttgtatttaggcttcgaaccatccaaccctgtcacgtcggtacaggctggagtatgaccagcagccggagtatgaccggttcgaccgatcaggctgacacttggttggtggttccgtgctattgacctatcccgtcggtacaggctggagtatgaccagcagccggagtatgaccggttcgaccgatcaggaggatacagtaacacgtcggtacaggctggagtatgaccagcagccggagtatgaccggttcgaccgatcaggttgttacgtgtcaatagtaccgtccctatgaacgttcagaactcagtaccatgttggacatggcagtagtggctcagtcgtttaaaaatccttattagcacggtggcttgcctcgtgcgatcatcgatggctgcttgttgagcctttaaagtttccatcttcttgtcccaccactttataaactggcatctttgctcgtcaaatgcaaggtttacagcagcacaaagatcctcctgatcatgatgcaaagcgttattatggtcttgcatgagtccaagggctgtatggaggttttggatctcagtatcatcccccaccgtcctttgagcattagtggtggacgggtcttcagtgttatgagtggattgatcggctgtagaactggtattcccagtctcttgcacacctggtgtgatccaagctagaagggaagtcacaccatggcccactgtaggtggctgtgtactggcctgttcggggtttgtccttggtggtcctctcgtatttctaggagtttgtacattaggatttgtcaccattgggtcaccctgatcaactaggcctctgcgagtttgcaccaccatcctgtatgcctgttaaaacttaagacaaacaaaaaacttgggtttttgctctcaatgaaagcactaaaatattgactgcgattttagccaacgacagtgagtcaattattaagcgattaagaatataattaaaatagagcaaaaataaataagtaataaagaacaccatattttaaagaggttcggccttgtaagtgtggtaatagcctactccccttagattgtattgacttgagacaaagaacaaagtgttttcctctctcaaagcaattctttcgatccttttcatactgaagcttagtcactatttatagggccttaatgcatgaggaaatgtttctcctttgcttacaatgtataaaataggaaagaatattcattacataattatgatacacaaaatgggaaattggaacaggttgccatattcctttgactcaatcccacaatcgtagggattgtcttcgtgcctggacttcacgagatcattctgaagtagttaagtcttgacaagtagctcaaaaaggcagatctatgcctgctcgaatgatttgcctttcaccctgctcgggtaattagaagttatatatgtagatgtataatatgaagttttctcgggacattcatctctgtccagatgcgaggaatgcaggacatgtgtcacttttgtattctgccatgtcattgtgcaaaaaatgggattacacatttcattgagatagaaatat

SEQ ID NO: 265369 - DNA, 636 bp, Cannabis indica
atataattaatccacctaaagtaattaataataaaattgttgatattgtttatttttttattaaaaattattttcaaattttgatatttagaattagttaaattgtaaatattattttaaattaaatttgaatgttttgatagatgagcatttttattaatttcgaagataaatttaggacgaataataattttttttaattactattacaaattataatagtaatttttgtttttatttaaaaacctttcaaatttcaatgattatcactatattgaatattattaattttaaaattataatattgaaaaaactaaaaactaaaataaaattaatatacgtgacttgacacgtaacatctatctagtatatataaatatatatatgtatatttatggatatgcatgtcatgagactttttttttagataaattatcaaaacatttatccttattatgcgtataaaaaaaaaatcataaaagaatatattttgtataatttgtttagtaagtcattttttagtttgttataaaaatagaatgttgtatgaaatattagtaacttagaaggtattgttaaggtaaacgttttacgtggttagtgatattttgtaaatattattatatttaatcatat

SEQ ID NO: 265370 - DNA, 566 bp, Cannabis indica
caatacactcacacacttcactttgcattttataaaatttcactaagttccaacaatcccccacttgaaatttttaaaaaatattttatcgaggtttagtctaagcaataagatttagcatagacaaatgtatttttttgatttgaacctttgcattgtgaatacaacttagaatatactagagtgactcgttgtaccacgcacaacgtttcttaggtgtagtccaaaagctcgtgttttaatggtcatgcacttctatcgcagtgtagtgaatgctttagaaatttacctaaatttcataggaagcgaccccacttccacattcacgtaggcgagtctgtcaatatagtactcctgtagctcagtacttcactccacatagagtatagatcttattaagattttctattatctcaacccttagatcgcttcaggaattcatgcttcacatttttttataacaataacatgatctcattcttatcacatcataacttgttattacccattgaacctatttcttgggatctccagtgtataggccgggttaccattatgagtgactc

SEQ ID NO: 265371 - DNA, 763 bp, Cannabis indica
gtagtgtatgttatttatggacattatctacgtgtaatgtgtaatgagttgtgagtccatatattatattttttttgctaacacctattgtacatttattttttaacattacaaccaagtagttagactgtagatttcaagacttgtaattaatagtaccaatactgtaattgttcaaaataaagaggatgaagaaattgtatatctactagtatcaatttaagaatacactaatttgtttattccactaatattaatagaaaatgtacaaacaagatacgtattttttcaaaacttattaatttttttgtttatttaattaagaaaaaatccaagtataataattatatttattgtgattgaaaactgaaacatattaagaatattcatacttaccacatattaaattgtaatcaatacactcagtgattgattttgtatgaacatagataattttggaattgctaatgatccaagttgtcagattgcataattttggaattgctaatgatccaagttgtttgatttgtgggactaacaaggaagatggaaaccatctctttttctattgtcattttagtaatgcttgtctttttcaaattaaggcttcattaggttggaaaacaaaggttaataatttgctcattgtggtgccttggatagccaaagggcatggtctctcttaactgtggagaagggtgttgctgactgctaatatttgcaggttacttgtcttcttcgagcaaccataaaatcgttcgag

SEQ ID NO: 265372 - DNA, 945 bp, Cannabis indica
aaaagttaatcaaaatgaaccttttatagattctgataaaccttttcccccaaaacttagtgggtaataacttctccacaagaatagctatgcagaagaccaaaggttcgtaagtgggaaaatatgtagcaaaaaaataataaatctacataatgatcgccaataaaattattttttgtcataaagtgggtcatttgaaaggccaaatatatgaccgagcattgctgcccagttaaggttttaacagctagagttggagttgaaaagtccatatctgtacagacgtccgcacagggacttgggggacaaatattatcccaatttttttccacataatgtggcatgtccacatgggaaaaactaaagccacatggaatacaacatgtcaatagaataagcaaagtcatcatgtacaacacatcaatcaacaagggttccaagtaatcgggtaagaccaagttgaaggaaatggccaaccaaggaggtctagtcggaccatatataccttggccgaccaatggagcatatgtgtcgagcatgtttgaagcaaaggcaaggccatccagtacaaataaagagcaccaaaggaagctcgattgaatggtggggtccacgactatcattttggatgggtcgcaacttaattttagttacgagacagctccaacaactcacaaaagtagggattcgacctcagattatcttcctatcttttagggataataatggttatttttgtatcttaaatacatgataaaagagtattttccctattttttgagagagattaacttatttaaatatggatcttttgtaagcctaaactatataaagggcattagggcaaagtgagaggggggctgaattctaagtccctcaagccctagagcactctcatacttctctctcacacgttattcctcagtcattgaacactaacgtcta

SEQ ID NO: 265373 - DNA, 534 bp, Cannabis indica
ataagttaagcaaaagtttcataagttacgcactaagtatcatgaattttctgaattgtcaaaacaaattgaatttggatggagtcgtgaaaacgatattgtgactgctcctgaagaaatatggcagaattatataagggtaagaattaattaactaagtttattattttaaaaagttagtctttaatcaaataaagtgatatgttagctcttttttttgtttaggcacatttaagagcagcacaatatcaaaagaaatgatgtgattattttagattgttagaactaatttttggtaaatcaactgtgactggttcaccatcgttagctgcttcaagtcaactcaatactgatgatgaaggggagatgaaaaatgagttagatcatgtagacatacatgatattgatgataatgatagtgctagttgtataagttctcgtcttgttgatgatatttttaaacgtacaacaaaataatcagcaacaaccaatgcagagcgagtgaaaagaaaaagatcacaacaaatgagtgat

SEQ ID NO: 265374 - DNA, 719 bp, Cannabis indica
atataactttagcagctaggtaattactttataacttgattctttgagccaatatatattgtaggaaagaactctcaatttttttagttatttaaattttttatccaaaaaaattattgtaacatcctttataattaaaacaagttgtgactataataattgtagtttcttcaaaaaaaaaaatacataatgcataattttataaaataataaatacataatacataattttatataaaaaaataaaattatgtattttctaacctaacgtaaagatcgggttgtaaaattctcaattaaaaaaaaaaattaaacccgaccgacgggttggtcagtttggtcgggttaacacgcccaaatgaacttaagagttttttttttcagttttcaacttaaatgaaaatactttgagtgtgattacataaatagatacgagagagagagggagagagaaagggtgagagacaaatagaatgagacgaggggtctcgatcgtgactgtcagggggtcatttcttttatttttttttttaatttatatatagttttttttgaaacagtatatatattatattattatgtttatgttataataataaaagaattaaagtaaaaaattaaacttaaaaaaaattaaaattcgggttaaatcggtttggtcagtttaattgggtgggttggatctatttttaacctgtccaattaactgattgggcggt

SEQ ID NO: 265375 - DNA, 632 bp, Cannabis indica
gatgatgggctgattaataaggtaagaggaatatctatacttttgctatttgtttgttttttggagggaaggggggttttccgtcacttgtacccttcaagattgttttgcttcttgcctactcctattgactctattactattttctttctcaccttgatattttgtgtttcaggaggaatttcaacttgcattgttcaagactaacaaaaaagaaaagtttaatttgcagatcgggtactattcctttcttttctgtcatctgtgtttcattcccattcttgcagatgcgatttcatatattattacagaataaaaagggttaatattaaactagttacattttctgtatctgttcgtgtcatttagcaaaatatttcatatattatttcctatagttttgtaaagtcttttgctatgatcttctctgagattattatgatattaatttaatcatcatggtaagggtttgatgtatgttgtttttcaaatacatctatattgccataatgctattggaagttgtaagcttgtgacaaatttatgcattccactcacatctatattgcttaaactttggctgttaaatcccatatactttataattggatattttacttcttaattacgaa

SEQ ID NO: 265376 - DNA, 884 bp, Cannabis indica
aacgaaagtatttgcatagcctttgtgacatttagattattgctcaatgctgattacatgttagtctaattcagagatgattagataacttgtgatttaaggcctacaagatctgaaaagagttagattaatttttataatctgcattcacattaagaaagagagtagtaattagcattaacaatcaggtaattaaatcaacaggattcttttccctaattttccatctttgattaaatctttttattgctgaattttattttcttattaatccttatttttatctcaatcacaaaattattagtttgccaaatagaaacataagtctagtctagtggtattcagttcaattttctgtgggatcgacctcacctgtgtgaatactacttgattacgtgcacttgcgtagctattcatattttttgtaacattatgttatatatgaaattttatatttttaatattctatgctcgataataatagaatgcgacgatttagctattagattcacttagatatggtgtagttgctggtaagatagttaaacatttggaatatcgtatttatttaaggttatggttttgaactattttatccctaagttattaaattactgccgagaagtaaattgtatattggtcatttgttatgttggtgtaattaattagttggtggaattaattccataattatttaatttatattgggctgaaaggatttaattaaaagaacatttaagttattctcttatttcaaaaaataaataaataaatacacacaacacacattacctttctctctctacattcggccctagaagatcaacgagaaactaagtgcatgtttgacatcataactaaaaaactgttttttgttttaaaaa

SEQ ID NO: 265377 - DNA, 1013 bp, Cannabis indica
ttgattctacaaatctgtattctgcagtgacagaattgcaatctgttgctaattctgtcactgtagactgttacagttgtgtttttactgtaatttaataaaattattgacattttcaaaaataaaatttctcatcaactgcatataaataataatgataaaaagttgaagcacaatgtcatcagaattgttgtgccctccttagattattattatttctccaaaagttaaaggaaaagataacatataagatatgcacctaattcgattctttaaattttgtttagctaaataaggtgaatcaattccttgaaaagaaacaaatattggtctttattcttttgatataacttttataatgatctaacacaaattaaaaaaattagagtgatcatgctatattttctaaatcatatccaaataacagcatattattccttccttactattaatattgttgtgcataaagtataatagaagtgtgtgtaagaaagatcatttttaaatctttcatacttgatcgaatttcataaagaataatacaaaaacttcataagtggcctcatgaacagtagtttgatgccatatatagaggattcttctttatcatgcaaaatgttcatgctttaataaatatatatatatataatttggtataataatatagaaaattaattaatcaaatatcatgatcatcatgatgaagatcaatacctgtttggctcttcttcatgattctttgcattgctgctaattcttcatgcaaatctgataaccagctgaacaaacaaactcaagtgtaagctgagcatatatatttatatatatatataattatatatatatatatttttttgttcaaagatattatgtatagttattatttattactgtataataattaataacaatattaattaatattctgtttgtgcagatgagaatggtgtagagatcagttctgaattatcaaccagagagatcattgactaccatcagaaattagggttagc

SEQ ID NO: 265378 - DNA, 1711 bp, Cannabis indica
tgtgcagccaatgttatgtaggagagaaagacatgacagacttatcggggttgagagcttgaccagaagcacgatagtagatacctagaaccctctttagggaaagatatgagtcctcatttgcttgaaaaaagaggagactatcatcagcaaaaagtaagtgagaaatttgagaagcttgtctcgtaagcttgaaggctactagataattattcagtctatggaaataactatacaatttttggcattattccaatcatagattaactactagtgttactttctgataacatatatatatatatatatatagttggcaaacagtaaagaatctgatatcttaagaggagtaaacataataaaaagaatttcacaatatcaaggtatttgtgactgaggagatgtaatgctggagaaggttgatattgaatacaacatgtcaaatactattacaatgataatactacatactacacttgatatggacatcaagatgttgagattaattaaaatacacttttagttttatattagtgcaagtggaagtttgttgggattttatgccctaaataaaactcatttcaatataatcagatttactaattattaaaagatcagaaattattttatgttacatggttcacatgattaattttatgattatatgtttagtatgtaaatgctattaaatcctgaacatatggttattcatgattatagtgttgtctacacaatgaaaaataatcatgattatatgctttaaactatttagtcctatgatttatcagtgcactggatttgtactgacgtgataatcagcgataaagtttacttacacaatgatatgtggaatgttctttctagggcattagcaaagtatactagtatcagatgaattgaatatacatcagactagacagatattgacagtggaaaagatattataaacttactgtaatatcttttctaagtcattgtcacttagttgatcttagatcaaagatctttattctgagatgattcagctctgactaaatgtatgtgttctttgacttgttcgtcaaaacaaactaaatggatagtcccaatacttacattttggaaatatagtagtgcaattgagtgagagcaataatcataaatatgaaatttatagcttctataactatttagaagtgaaacgataattttcttagagcttggcttagcatacttaaatggaagagctcttattttagtaattatattagtttactgaaatatcatttataagaagctaagtgttttaaggatgaaatacatgaaagggtagaacagtaaagttgtctgtaaatcatctatagaggatctttgattatttagattgaaataatgataaatttatagtgtatctattcttggttaatagagagttctatgtaatcacgagtgcaattctgaatctaaagtggaatcgagaagaattaataagatagagaatctacccggtaaattctagaactacttattgggagcttagttacatagtccctggtccccgcactaattggggtaatattattttgtagtctcaattaattgatttatttaatcaactaggattctaaataaagactatatcttaattgtaagttttatcaaggaatggcacaattgagaagaaaagagaattcaaggtttatttattaattaagagaccttggaaggtcta

SEQ ID NO: 265379 - DNA, 707 bp, Cannabis indica
ttgtcttatgtgaatattaaagagttttgggataaacacttatttgtttattgttgttgtgacatagggtcgagatcatcggggatagttctccacttggattggccaaaatgtatgaacctggattaaatggtaagaaaactatattgcactgcatagtacgttgtgcgtaatacagttagtattgttatgaatcgattaatattgagatatagttaatattattatataatgaaaagactaattaattgagtaatgataatgtaataatattatgcatgtgatatatgggctcacctgatttggtgaagcgattttcctggcgaagtactgggcgtcaatgatatatgttgagtactaagtgtaggtacgggctctcctgattaggtgatgtgattttcctagcgacgtactaggcgtaagtatgggcgtccgtgatatatgatgagtattgagtgtaggtacgggctcacctgattaggtgatgcgaatttcctggtgacttactagacggacgtcggtgatatatgataaataccgagtgtaggtacggggtcacctgattaggtgatgtaattttcttggcaacatactgggcgtaagtacgggcgtcagtgacatctgataagtaccaggcgtaggtgcgagctcgtctaattagatgatgagatatattggtgccagattgtggcacgggctcacctgat

SEQ ID NO: 265380 - DNA, 1396 bp, Cannabis indica
ctgaactggaattccggttctaagcaggaaacactcaaaaattcataactcactcaaatcaaacccaattcataccaaaccttccagacctgttctaattaccccactaaacattttcaaagcatcaaaaccaagcttcaagcaaaaatacacaattcaccatgtgagctccaagctttgagttcaaaactcaagcttggctaaaactcacccacaagcatcaaaacttgatttaatctacttaaacaagtataaaataactgcagaaaccaaacccatgcacaaacaatctctacagcaaccaattcctcaatttccataaaaatcataattttgagctaaaattccaaacttgcttagaatccactaatcatgcattacaacctgctcaaatcaccatgcatcaacataaaattactccagaaaatgaacccaaacataatcaacaactacagtagcttaatcaacatttcaccattgaaaaaaatacaagattttgagtttaaaagcttcacacatgcatagaccaacaactaacaatataattagttcaaatgtactcaatcaagcatgcttaaactctagaaaataacacctaatcacagcagcagcaacaactcaaaaactacacatgcaacctatccaatttccttaaaaattcaagaaaacatcaagacaagttcaagaaccttacaaacaactaatgaccactaaatcctgctaaaaatagcttgaaatccaagagaaaagccaagaatccttgttgctcaaggaggccgaaagatagagaggctagagaggaaaaattggttttgtcttttcattgatttttcttcttttttttttctaactttgaataaatgataaattcccttcttatttcagccagcaaacaacaattaaaatcacataatcacattacacttagtccactaaaggacaaaatatcaatggggcaaaatgaccaatttgcccctccacactaaaataacataaagggtactaaagggtattttgggaaattctaaattctcgaccaatctcgacattcccaatgtctaataaactgtcccaatatactaacatgctaagttgtgattctactgagccaaacaccgagttccatgttgtcgggcaccgaacatgcaaaattatgaaatttcactatatgacataaaatgtatttcagaattaaaaaataacagcataaataattatttaaatatctataaatatttttcataattaactgctaatttctaaattaaactaagcggtctttacattgtacctctaattatcgatgcttccaaattctcactataaaaaatataatttttagtgacaactttttaatcacagcgaaaactttttatgactaaatgtgacttttagt

SEQ ID NO: 265381 - DNA, 1051 bp, Cannabis indica
ctcaatcatagtgtgtaaggcagtgaagaatccagaatcaagagaaggacattcgggctcagattcgttggtgatactctgcgtagggacaggatacaagttgttagatatctgagcagaaggagtcattaatattccgttgcacccaatgttaaaggttccctaaactttatatgttgtttatttacatttattttagaaattcatatttaggatgttaattaacatacatggtagtaaatctagatcctggtaaaacatattccaacacatacatggtagtacatctagatcctggtaaaataattctaacacatacctccttggccaaccagttatggtccgaccaaggtctaattacttgtcttgctcttgacttggaagctgcactgagtggtacctatccagttgttgatgagctgttgtacacatgtcattagcaagttgtaagttatccagccttttacaggtaggctatccaaccttctgcaggttgtaagctgtctggcctgctggtcatcatgccatgttaggcgggcaaaaattaggacaacagtaagttccattatatttatttttatagttgataacttttatggttttcttttaagcatcttctaactcacttgtctcgatttttgacgagcattgatgactatgagctatgcccattccacaccctacaacatgaacatgcaaggcaagaaagtaccaggaggatcaaggagcaccttacaacatgaccacgcaagggaagaaagtactaggaggatatcaagaaattggaggctggtgataacgaggtcatagttgagtgaacacgccttgaggaagtgtttgagaaggaatagtccacttctaagaagactcatgacgcacaggccaaaaaaacagtgatcaagccaatgagataaaagatttgaagtccaagataaaagatttgaagtctactctaaagactaaagatgaggagtaccaaacattggccaaagaggtcacatttttcttttttcaaaaacaaaattttaaaaaataacaatactatttttat

SEQ ID NO: 265382 - DNA, 526 bp, Cannabis indica
atataaatattaaagaaattaacaaatttttaaaatctaaacataatttaataataaaataattaatttttaaatttaaacatcaaaatatctaaaattaataattatctattaaaaattaaatattattaatttaaaattgatatttatgtttaaatattttaaaaataatattttattttaaattttaaggtttgaaattggcaaaaatcaaaattgggtaaaaaaatgccacaaaaatcgattttttgggttgttggctagagaggctgcaaaatgcctcagacgcgcgcggaaggaggatgatgcagggtgtcctgcggagaaatctcgacgcctgtagggtctccatgggccagcatcctgtctgaaggcagtgtgcgtatgaggaagaccgagcttcagataagatttttttgaagtacgcacgtggaatgctaccttgtccaagggtctggtgcgatggtgcacccccttcgacacccaatggacccgatttttcaaaccaccataactctctcatttt

SEQ ID NO: 265383 - DNA, 1869 bp, Cannabis indica
aacagagtagtacttgcaataggcaacgaactgtggattcttttagaatattataaatacttttctatttttatttaacaaaaatataatagaaaatatattgtttggtaattacaatagatgaagtagtcacaataatgaattcttttaaaaatattataaacagtatttttattttattatttttttaataatagaaagatagtttaaatttaaattgcaatgttttaaaaaaaataattcttttgttatatggatacattcaatagagatttataatagagaggatttatgtgtggtgttgtgattcgaaatcatctcggtgagtatctagcatttttgcctctccctttgttggttctccttcaccacgagttgtagaagccttagttgtgcttcatggtttaatattttgttctcagtttattagaatttgagataagatgaatgaggaatcatctcaaaactaattgactatgggaggagtagctcatttctctttatatatcacaatttaatcccacacattaacaatgtgggaataactctaatacaccctcctcacgtttgagcctgaaaagtgtgggtataatgaatgaccttcaagagaccacgtgaccgaatgtgacatttgaaagaatcctacaaggccaaatattgggaaatttgtggattttgaaacaggtcaaagacccaacactggaaactgacaccttggccgaaaggtcccaaatcaaggttaaaagggagacagcgaaagaatctgtttggaccggcagcactttggctcacaacggatcacaaacgactttctggaccggtagcactttggactcataacggatcacaagtggctctgctaccatgttataatttggagataagatgaatgtggttccatctcaaaactaattggctatgggaagagtagctcattcatttatatatcacaatttatttctacacattagcaatgtgggactaactctaatacatctaaggtttcctaacattcaactagaatcagattgtttataagtggtaaatgctttaaattctaaggataagcttatggttgagtttggcatgattttcatagatagtgttcaatgttctttgttttaagtattgtaattgtcttaacaatactatataggttatgatcttgcttcggatcatgctatgattttgtggctggaactcctgaactttttgtgagttttggactctttgcttggccatttatctttttaatgagaatctcattcttttcaagagagtgagatttataataggaaggtactatttagatatgtgtagtgtgttcaactttgaatcttaatgtttaaaaaaagataactctttctcttttataaccacatttaatacaagagagataaaaaaatataattagtgagattataatttataatttactataaatatgaaagtagttaaatatatgtgacaatagtaaagaatactaattatcagattaagtacgaaattattagactatcttcaatgagtggtgtaaaatttgtgctaaagttggcccaagaaatgagtcaatgttatatttggtccaaattttactattgtgttccaatgcatcagagtaaattaactttatttttaaagtaaattgtggcaaaatctcaatactttcacatcgctagtatttagctccccaaatctaaattttaatgtcaaaatttctaaaaccacaatatctttaacaatttacagtttctatctagatttggttgttaactatcatgttgaattgttcacatggacacagtgtacacacagcacaattttattggtccacataaataattttatattattttttgaaaaaaaaaa

SEQ ID NO: 265384 - DNA, 400 bp, Cannabis indica
ttaattaattggtaaataaaaaaagggtatttttcaatttacgtgatgagttggatatttgacaattgtgagttcaccttaaaagattatatcatttatttcttatttaagggtttttttttatttaaatacaatttttttattaattaaatatgaaaaattagatgtattatacaaaaaaattagatatataaaattatcatatatattttttagaataatgaacaaaattttattaaaaaaaatctagcgttgagtacatcaaaaagaaaagaaggaaaatccttcctccgaattagctcatcatccactttaagtgcgtgcacaactaattcatgagaaacttaccgacgaacataaatcaaagatgcttcaaaaacattagatagtagactaaaaa

SEQ ID NO: 265385 - DNA, 696 bp, Cannabis indica
aacaccagattagaggaatctaacgtactacatagaaactcaagatagaaattcccagaaaattcaaacatcaaacccagaaaaagcagatgaatagtaaagcatgcgatgagcacaaacaataaagtacgagatgcgaagaacttacataaagctggagaactgggcgttgttgttgatcggcggtaaaaagttgattgacaatggcgaaggaagatcagtaagaaatctatggtgtttgagggttttctggttcgagggtttctttctctctggaaaacttgaaaaaatttggtgaaagtctgaaagtaaccaaatgaagtgagaatggtggcttttataggccaaaacgcatgtggaacaggcgcgatcatctaccaatcgagcggttgggaaggcacacgattcgaattcccaggatccaacggctgaattggttcgtcatcaaggcggtggaaacgcttgagtgtccgtctgacacccattaatgcgccgtatcaattaatggacaagaaacgaatcgacgcctgcaaaaagtgaatcgctgcagtaatggtgatcattaaatacaccttcacgcgcccaaagcacgtaccaggaaaccgaggagccaaccggaggcatctaagcaagccttgttcatttcacaattaaacaaggcttggggtaaatgttgcccctgattttgcccaatgt

SEQ ID NO: 265386 - DNA, 1031 bp, Cannabis indica
tccgggtgtgggttcgggtccttgtcagggttcgggtccacagctgggtccaaaatccagacaccaactacgggttttgtcgaagccttgggtccagatccgcaccccaatctcgggtcgcagtctggttccatttctggtcccgtgtcatgagctgggtcctaggttcaagttcaggtctgggtcgggtactaggtcccggtcgtagcttagtttcccaggtccctatcctgattcttggtctaggtcccagttattgtgtgggtttgggtcccggtctaggtccgagtttgagtcctagtctcggttagggtttaggtctctgtctgggttttgatctgggttcaggttcgggtttaggtccttatccttgtcgtagtcctagttcggttctatttccatttgtgattctgagtttgagtgtgggtttcagttcaggttggagttcgagtcctggtctgatttagggttcgggtctggtttgaagtctaggtccaaatcaggctccgggagtgggttcgcatcctgggtcttggtctccgttcggtttgagtcccaagttccaatcccgatctgagtctggattcaattctaggtctaagtccttggttcttatcctggtctgggttcgagattgggtccatgtgcgggtctatctttgggtttgactctaggtgtgggtgtttgagtttgggtccgagtctccgttcgggtttgtgtcaaggtttggaccccgatcttggtctatgttctggtccaggtccaagttcgggtcccgagtgcgggtctaagtctgggtgtgggtcaggatctcaggcccgatctaggtccagaatttccatcccagtctggatcttggtcgagtccatgttcgtatccggatccctatctaggtccaagtctgtgtttgggatcggttcccagatttaggtctaggtccaggttaaaattccgttctaggtacacgaccatgtccgggcgcgagttcccgtctcattttggttctgaggctaggtctgtgttcggttcta

SEQ ID NO: 265387 - DNA, 800 bp, Cannabis indica
tataaatattttagaatcctattagctgagccaatcaaaaatttttttaaaaaaaaaatatgattatttctttttgttttatcattagatttgcttattttgaacttattatattcttcctattaactttctaaaacaaggtgccatcatttcaattaattttcaatactataaacatgattttttttagtaatatttaagagtatatttttttgaacaatctcaaaactttatacattattttttaatatcataacttcattattattatttgcaatcagtttcactaacaataatcatttaatttatagatcaaagttgaagacgacattttaatttaaatatatattcccattaaccatctacaaagtaacaccatttccattttccctaataaatagcttaatataaaaatttgatactaaataggcagataaagtgagctatatataatggttgcttttacaatttccctcgaaaacaatcgttgctcacttacagtcagacagtgcaattgcaataatgggttccttcgcttttgtgtggatgatgatcttcctcatctccttctccaatctccactttcccaccttttctcactccccaaacaacctcaccctcttcggcgatgctttctttagcaacgcttccattgttcttactcaagaactcaactcttgttcttcttcttcattggcctctttcaatggcgttggaggagctctctacgcagacccaatacgcttcgtcgactctgaaacaaacgacacagcgtctttttcatcggtcttctccttctc

SEQ ID NO: 265388 - DNA, 559 bp, Cannabis indica
atgtatcgatcatttcgatttcttccgtgccggtgatgctaggctcttcaagaaactggatcgggaccaggttcgccttgtcacttatattgctactcgccaaatgggctagcgcatctgaagttgtattttcctctcttggaatctgcttgaggctgtagcttttgaattgtgcgagcagatcatgtattttgctcagatatgctatcattttttctccccgagcctcgtattcgccagatacatgattaaccactagctgtgagtcactgcagatctcgatgtgctcggctttcatttcctttgctagtttgagtccagcgattagggcttcgtattcggcctcattgttggaggctttgaatccgaatttgaccgctgcatgcaggtgttgcccccaggtgtgacaagggcaattcctgcgccggatagctgatctgtggccgatccatccacgtgaagcttccaggtcggcttgctttcagtgctggtcggctatggtgttggctcgggatcgccttctgggatgctttcagtttttcctgtgcattccaccaca

SEQ ID NO: 265389 - DNA, 671 bp, Cannabis indica
aaaagtcacagcagagatcacgacaaaggaaacagtcacaacaagggaagatcaaactcaaaagaaccacctgatcctacgggaagctacaactgtgcaagccagggcatttcaagagcgattgctattttctaaaaaaaaaggcaaaccaaataaatataaaggacagggataaaattctaactctatacctaatttttctaaaaataaccaagtcaattatagtgatggttatgaaagtactgatagtggtgaagtatatgttgctacatcatcttttaaagatgattggattttagattcaggttgtactattcatatgactaatgacaaaagttatatgtttgattacagggaatctaaaggaggaaaagtggtcctagggaacaatcagacctgtgagattaaagggtcgggatcaatcagatttaaaatgtatgatgggataataaggaccctaacataagtgaggtatgttcctaatctctctagaaacctaatttttattagtgtgcttgatgatttgggtgttgtgagtaaggtagaggcaggtcatatgaagcttagtagaggagcactaacaatcatgaaaaagataaaaaatggtggacttactacctataaggctctcctatttcaagctctaacatcacaactcacaacgacaaaga

SEQ ID NO: 265390 - DNA, 556 bp, Cannabis indica
ccttgaaaaaaaaaggagagaagctactaagcccttaacggttgaggtagatcttgaaactggtaaagttgttggcactgaagcaagcaattatgttcgatttattggccagcaagtaagcatgttgtgcccaggtcatcatctaaatttttctgatgtaccccaacaatataaggatcaagtgctcaatcgaataagagtgagtgatttttaattattcatggttgtaattattttatatccttatttgtaaattaatataatttttaaattattttattacatagtactattttgatatcgatgggaatccccatcgagacctacttatggggactttatattcggcaatggcggagaggtatagtgagcgaaagacactcagacacaggcatttttaacaacattacaaaaaactagaagattgggagacagttctcaaattccctcctgactacttgaataccgagacttggaagtcggtttgcgaactgtttgttagcgaggcatttttgaatcactcaagtaaaaataaagcgaatcggcaacaaatgaa

SEQ ID NO: 265391 - DNA, 2390 bp, Cannabis indica
aaaaataacataaataataggctaaaaatatcctaacagtaatacttaaatttgttcgtccaaataagatatattagcatactctattctagagtgttgaggctggcttggaaaatcaaggtgtggattcttcaacagaagttcttggattggattatcgttgattgtactaaaagatagaaggataccctaataggcttcaagaggtattgttttcttttcagcagtttagatttaatctatatacattatattaagacccttaggcttatggttcattttagataaaaaaaaaactatttttatcaaatttcgcttctacttttataactttgatatggactataaaaattaacaattggttttaagagcaatcttcataattatatagattaaatactgtgttgaataattttgtatttatacatatatgttgatatattgtgaatgaatgaaattattatttttatgcatgaatgtgaatcgttaattatatagtaaaattagattaggaattttacaattttactagaaaaattgtataccatgatttgtggtataggttttgatgtaattttatttttaaatttatttgtaaatttttgttaaataatatatcataaaaattcacaatacctccattaatgagtgagctcgagtttaaggactgataagaaattctgcaactcatgatttggcaaaacatactctttggttagacaatgagctatcttagttcgagaaagtaccgccgtcgattatgaattgctgcaatgttaatcatatgtgattttgatcaccgcgtaaaaaaaaatcaagtaactattgtgctaaacataatttgttgcaatgtgatttagaccaatagcttgttgcaatgttatttataagattgcaacaaagtttttgagctctagaatcagtaacatccatcctgaaataattttccactcacaatggggatttattaaaggaagattcgtaaggcataatataatgatttgccaagatttggtaagacactactgcaggaaagcagacaaaccaagttgtataatcaagcttgatctccaaaaagcttatgacaccattgagtgggaatttctgaaggaggttctagttggtctcaaattccctagcagtttcatacaactaacaatgaactgcatctctcctccgaagttctctcttatgttcaatggaaccttacatggcttctttgaatctaggaggggtctaaggcaaggggaccccatgtcccctctattgtttgtattgggtatggaatacttctctaggctaatggggaagattggagagaaggaagactttcactttcatgacaggtgctcgggcctcaaattaaatcatctggcttttgttgatgatgtcttactattcagtcatggagattgcaaaagtgtggtatacatgttacaggctctaaagctcttctcattaacctcaagcttacaacctaataccactaaaactactatatactgcattaatatgcaacaggggtgtgtggataagatcctgcaactgtcagggtttatgagacatgagctcccattcacatactagggggttccaatttgtgctaaaaagatttccaggaaagaaagtgaggtattggttgaaagaatgacatcaagaattagaacctggagttcaaggaacctatcatttgctgaaagaacaactctaatcaactcagtattcattgctttacaagcataatggagccaaattgtgatcatgccaaaaagaattttgaagtcaattgaagccatttgtagagctttcttatggaaagggcaagctgtgttttatggagcaggtgctgttgctagggacaatgtatgtcaacctaagtctacagggggatttggtatcaaaaagcttgaaacttggaacagccatgtccaagtacatttgggctatctcgaacaaccaagaaagcctatggctaagatgggtgaacagtgtatacatcaaaggccaaccctggtggagttacagtgcttctatacactccagttggtattggaagaagcttgtctccctcaaaaaccagaattttttccttaactgacattgctgaatttcaaaggaacaaatatacaattgcagcagggtacaagatgtttagcactcatcaaccaaaaatggcttggagcaaagaggtgtggtctcgattgaatacaccaaaacataatatgattctatggcttgtaatgctttaataggttgaagacaaaagatctattgattaaaattggaattcaactgcaagagaagtgtagcctatgtggtgagcacaatgagaatattcaacattcattctttaagtgcagaataaccagtcattgcttggtggagatcaa

SEQ ID NO: 265392 - DNA, 691 bp, Cannabis indica
tggaaccgggtctgggtttcagtcctagtacaattcctagatccaaacagcttgggttgaagcccaaggtcccgggttctaggtctagatctgaatcccaatcttgggtctcgatcttattcttatttaggtccttggtcctgagccttgtccgtgtttaagtttgggtttgggactggggtcgggtcttgggtctcgaacaaggttcgggtcttgggtcctcaatccaagtctggatcctgggtccccaattcatgtccatgtcttggatttgggtccaggtccaagtccgtgtcttggttcaggttcgtgtctcgagttttgatcctagtctaggtcccgatcagggtctgggtctatgtcctagtctgattctgactctgggtcgaggtctgggtccgggaccgggaccgggtgctagtctgagtcccattcccaggtcccaatttgcttctggttccactttcaatttcaggtcacaagtcaggtctgagttagggccctggtctaggtctaagtctatgttcgagttcgagtctaggtttgggtcccagatttagacaccgactacgggttaggtctaagctctaggtcaagatatgtgggtcctaggtctggctctgggtttggccctatacaagtggatttgggcctcactttttataattttgcagttttatcttttctgcat

SEQ ID NO: 265393 - DNA, 881 bp, Cannabis indica
tataaccgaagacatacactatcttatgacctcagttattagtgaaataatcgaagccatagggggtctttactttcagttttttcaaatccttttagctgcacatacaatgcctgcggttgcgagttcttcaaaaatcgaagctaaagggtcgaaaaacccatacttaaaggctctttttataatagtagctattggatgtgtcgggttcgaacctcatgggtgggctgagtttcgagcctccattaattgcagccctaaaacacattatgtttcttagttaaattaattaaaagtggatatgattaatattttttaaaaatgaccatatatattataaataaaggtacggtctttttatttttacaccttaaaatagtttttattttttattttttttacaattttactgaattctacgtaaaaattcctattaaaactaacggaataaaagttaaaaaaaataatatattagataatttcctataaatatatatcacatattaattgattatttattaatagtaatatacatgtgaaaagaaatagcttatattttgtaatttaagtaaaacaataataagtagagaataaggatagcaacataaatcgaagttataattcataatcaattaattatttatcatatgtgcattatttcagtaatcatctttaagattgtgcaagaaataatcaatcatccataagattaaagatgaattctaaatcgatcgaatacaataataacattaaatctacaaaaagaaaaaccaaacataaaatcaataaatcatgtagcagttgtaaagtatttagtgaagagaataaatttcttgcttgaacttgggcatggcaagccttggaagagagaccaatatccc

SEQ ID NO: 265394 - DNA, 463 bp, Cannabis indica
gagttatgaagcattggaacttcaaccagatctttcatacgaggagcaaccagtgcaaatattaaacaaaagagaaaaagtcttgacaaacaagacaactgcactgatcaaagtattatggaggaacagtaaagtttaagaggcaacctgagaacttgagacggatatgcagtagagatatctagagttgttcaggtaaattttaggacgaaatttctataaggaggggataattgtaataccttaaggtttaataactagattagcaactccaactagattaattatgtattaatgaggaattatattattatataatttaatatgtgaaactattttttgtttattgtattttaaggccccattagcgtggtagaggtatttttgtaattttgacccgagaagggtaatatcataaatttatgatatattgtgcttatggactatactattatatagtata

SEQ ID NO: 265395 - DNA, 792 bp, Cannabis indica
tgggcgcctaaatacaagtcggttatatatatattgtatgttatatacttttcttactgagtctgttggctcatatatatttctttcatttgtaggtaaagggaagaccaaaactaaaaagcattgagttcagagctcgaggatgattgaacatgtcaagacagtgcgacctggagagttcggtctcgggacgacttgggtttcattttgtagttgctgtgcgacatgtttgtaaaagctattttgaatataaattttaaaataacgggatcccaattttgtatatatgtatatatttataaaattttaaagttaaatcaaaattttaatttatcacaatttttgagaaaaatctttgattaaaaaaggtttgcactgtaattagaaagttatcgtagcgtgcctaagcattagggcgttgcagagttggatcatcttctcttcttggagcatactggcactttgatgttaactttattgcctttctcttaatgaattgtaaatttatggtaatgaaagatatttttcttccattgtcttctctttttggattgctctcagccgcagttgcttctcatttatggcaatggaagatatagtatctctgttattaaatttgtgcaaaattttgtcggtatcgtggatataactaatcaattcaaaattataatatttacaataaaactctattattttataaaatttaaactttcaccccttctaaaatatattcttgaattattaatcacaaagtctaataatagtgcgaaatactagaatatgagaattcat

SEQ ID NO: 265396 - DNA, 867 bp, Cannabis indica
cgagtttttacgagacgcatggactaggcacaacgtgagtttttcaagtggggatatgtggattctgccccctgtaacgttttacttacataggaaataggttgctggtgcttgccctcctctcgcactatggctgcactaattgagaaatagcgttctctagttattggttttgccaaaactagaggcgttgctagacgcctttttatgttctgaaaggcttcttcgcagtcttttgtccactcgaactttttgttgcctcgcaatatgttgatgaacgacactgttgacttcaaaatgaatcttttaagtgcagtcattcttcctgtcaggacttgtacttccttaggccttgtcggtgatggcatgtctattaatgccttaattgttttacgatttgcctcaatacccctcgtgctaactatgagtcccaaaaactttcccgcgaaaaacttcaaaggaacattttttcaggtttagcttcatattatacttctttaatatcttaaagcattctgcgaggtctgaggtatgatccttactttttattgattttaccaacatattatcgacataaacctcaatgtttcgccctatttggtttgcaaaaatttcatttaccaatcgctaatagattgccccagcgttctttagtctgaacgacatgactttataacaatagagtcccatgttggttacgaagcttgtatgttcctgatctggcacatacatttttatctagttatatccagaatatgcgtccataaatgacataacctatccactaactggtcgatcctgggaagtgggatacaatcttttggacataccttatttagatcacagaagtcaatacaagttctccaa

SEQ ID NO: 265397 - DNA, 903 bp, Cannabis indica
acttatttcataactttaagttacataaaatctagtttattaacattatatataaacagtagttttaaaaatgtacatacatactcttataatttatcattagactgctaattatgtatttatttttttatctaaactcttgaattaggctagattaacgttatattaatgttatattaataaattgtttaaataaattaccagaatgcaattgcaggaagaatcttcgcaacatgaaaaaattcaaggacaaaactctacagagattttaatttaaggaggataaatctaataataataaacaaaaggggaaagtggggaaattaacaaaaatgttgatacttgtaggagtaaaccgtgttggcatttggataaatttaaacattcctttagtagtagagtacagtttctaaatttttgacaaattaagccttaaatcgttgacttgacatattactcaaaagagtaatttgcagtataaatatttatgtttaattttcggttgcaaataaatacttaaattatattttttaaacttcagaagtcattaataacttaagccactagagactgttatgtgatcattaacttgacacctaacagtcaagtacttacaaaaattctaaaattataacttgtattattaccgtaaaaaattatccttactcaaaaattaaaatttaataaaacttaactatctgcaactaaaaattaaactcttgtatttttactacaaattacttactcaaactttattatccttcaaaccttctcccagcccaggtgtaattccaagtgatcttttaaatttttttcaaatataaataaatgaataaagaaaatgaggttgtgttgtgccttgattgagttttacaccatcctttggtttttttttttaaaaaa

SEQ ID NO: 265398 - DNA, 652 bp, Cannabis indica
acatgatgctctcatctcatccacttgaaactttgtcaaattaatgtcatcttgactattaccttcaacctagatgagagatttccttccttagtgatttcaaaacttccttcttgcttttcacctgttcgaacccttagtgaatgagtgacatgcccacgcatagcaagtcaagtactcaatcatagtgagtaagatggtggtaaccaaacccgaatgagagaaagagatccaggttcaaatcttgataatgctcttctacataaaggaatcaagggctagagatcttgaacggaaggagttattataatcctctgcaattaatgtaaggttttcttaaacccttatgtgtttatttcattattttagagaattcatatttaggatcttaatcaacatacttgttagtaaatctagatcctggtaaaatattcccaataactggccttagagccatggtaatgatttactttcatgaaatattgatttaaaacaatgattattgtttgtgtgctgattttgatgtgttcatggttgtttatgtgttaattagataattgaatgtgatttacaaaatttttccatgaaaataattttattttctttctaaaattattttatttggatttcttgtgaaaaattaagcaatttt

SEQ ID NO: 265399 - DNA, 784 bp, Cannabis indica
attgctgatgtagtatgacatctaaatgaaggtgttgtatataataaagattatatatgacaaagaccaatatgtaattaagttttcttatcaagcatgtcatttatcataaaaacctaattcatatcataaagattgtcaatagtagatcgacatgaatcctgagatcatattcatgttattagtttctttgattcactcgttaaagtttctcaatgaagatgattcttataacttctattagaaatctaatagtatggatggctaggaacatgatctataattatggaatcctgacttttctaacagatcgaatgttggtttccttttaagtgttaattctagaactgaaaatttgtgcacaaattgacattggatctaaattatactcttagtagtgaattaacagtactaaaggataaaaaagtaaataaaagggtataacgcaaatttgaccaaaactaatgttaactcaaaaacttttcctggtaacgtggacattaatgtttcacacgtggcaagaatgatgacatctcgaagtttaatagttctgtcatagcagttgacctaggaggagtctctagccttatgccaaggttgacttaaagaactccaaaacggaagtttggactttgataactcatttccaacccactatcttttaatattatgtagcatgaagacatggagaaaccaaatccaggtcctaggagctgaaaaaaatacacaaagtagcacctcgaaagtcatcctgggcacctaggatttcacccagcatccatgt

SEQ ID NO: 265400 - DNA, 1378 bp, Cannabis indica
atatgctaaataacaaagttccgcgaaggtgaatcgcttctagaaatatcataataataataataataataataataataataataataatatttatggaaaataacatctcatctaaagagcactaaataattaatattgttgtttgaaagaagtatttcatctactggatatttattgagaaccataactataactatgagctacttttattgtcttaagcaatggatttcaaacaaatttgggtatgggtgagctgagcagtagaaatcagaagggaaaatatatttgagaagtttttttttttgtttttaaataatcaaaaacttttaaagaatatatttacattgctgcttcaagaaagatgcaattcatttaaaaaaaaaatgtaatttatgtctaaaaatatgcataggtatataaaagaatagtttttattttattatataaaaataattctaatttaaactagttataaataagaataacttctaattgtaattagttataaacttttgtataattagtttatttattcctcaaactagtagtaccatcagtattatatttttaatattgatgcaattaataaatattagtttttaaaatttaaattaataactactataaaacatcattaacaatttacaaggtattttctcaagatgatgttaaacattgctgatatctaataatatactcatatataattgtaataactttctccactaatatctaataacaataacaatgctcacatataattttgaatatctatggttgatgcctaatagcaatactatatataattttgaaaatgaggtagtactatgatactccccaaatagtacttcatatggtatgttaaaaatttctcaatctagctactaggttccatttcttcttaccataaaaaaggacaattgctaaatctttttgcccctaaattttgaacacttttattaaaaatttaattcaaaaactttaaatttctattaatacttaaaaattcttaaaaaataattattaaatatatccaataaatttaattttataaattaaattaaaatttttaattttacccaaacaaatatagatttcgtattaaagcaaaaaaaaaaaaaaaatacatattcaaacttatttatatttataaataaaattaattaaaaatatataaatcctgaaatggaaaaacacaaatggtgagaaaataaaaaatgagaaataataaatattattgtttagttataaattatgtgttcatttttggaattagagggaataatgttgtgattggaatatccaaattaaggtaatgaggttttttgtttggcaattagtaggcgatgcgatcggttaccttctcatgttggtg

SEQ ID NO: 265401 - DNA, 648 bp, Cannabis indica
tgagttagaaattgagtttgaaattttttaaatcttaagttcgaacattaatggtatttttcattcaagggcttgattttaatttatgttacgtaaggattgttatatttgtagtgtatatgtgccgcgtgaagtttgtaatgatttgaataggtttatggggtgtttcggtgagtacaaaatttggaatttttgtgccagactatttttagaaattcctaggagatcagaaattgtatttttgtcataatttttcacttgggtgtctgttttgggtgttctatataccattttgaagctttcgacgagatctacattatagtgtacgttttagagctaaaatataagtattattttagtgtatttatgtcgcagggtttggtagaaaaaccctagatggtgacgggaatattaagcagtgttttgagataaatacttattggtttaccattattgtgacatagggccgacttatcgggcaggtttctccatttgagttggccgacgtgcatgaatctagattaaaggtaagaaaagtatattgtattgcatagcatgttatattgcaatacaattattattgttgagaatttattaatattgggattaagatacagtttttattgttatgtaatgaaaagattgcct

SEQ ID NO: 265402 - DNA, 1746 bp, Cannabis indica
tgtggcaaatttgacacaatttttagaatatgtacatatccatgacacaatattaaatatgtacatatccttattcactttagtttgaatcttaactttttttttttcaattatacataactttgtatgtattttttacttgttacgcaccggctagctgagatttttctacggtcttttctctcatgtattttctcaaactaaataagatttttaataatgtgtggctttttttttatcatgattagagttgtgtgttttgttttgtttataccaattattgatatttatattttttttaagcatcacattttttttctattttccaaaaaaaaaaaaaaactcattgtttatactatttcactttttaaaatattgtttaagtcttttctacatttttttaccttttttttcaatatttttttttaattttttttcatatttgtttattattaaatatataatattatagaagattatacaagcatgttttttgtgttagtatatattttattttattaatttttgtgaattattattttattttccttataaattttaattattatttgataatattagagcaaattacaatatttaaatatgttatcatactatgtctttgattaaatataattttttttcaataattatttaaatataattgatgaaaggaagatgattatatatagagaagagtaattggacgatctattaaatgaagtatatatagagaaatagatagatagatatatacctgttgccaagaattgcatggagtcgaataatggtctgttcttcctcagggctgaactctcctctcttaatacctggcctcagataattagcccatctcaatctgcagctcttaccacatctcgaaagacctttattttaagtagaaagccaaacaaacaacagtaccaccaaaatgaatcaataacgattcagtggaaatatatataaaaaaatggacatgtttttattacatatttatttaccagctttctggggcaggtgacgccagccaccttcgccatgttgtttgatgtaagaaaagagtatttggtcttcttcggcagtccaagcacctttcctaagtcctttttggtcacagcatggagtcctacccatctcaattcaaaacacttaatttcactggaaatactagtagagtgttggtttactcgtgtctcgaaagcactgtaactgctccataattcaaaacaatgtactgtattatattatattatacgtgacacgcgcagagcttttcacgaggccgtgtgtggcccacacgactttaagttatgtccctatccaccctcataatatatatacatacaattattacagcagaatggggtagactgggtagactgggtagacgggttatggtagtgtaatattattatttattatcagtgtaattatgtataggttttatataaattataaacaataaattttaataaatattcttagccaatcgttacttagaaaaagtaattcacacttacaaaaaagcccatctttcaaattctacctcatgttttatttttgttggtcttcatgtgtccacacaaaatttattgttatttttattttattttaaaagaaatatttgttacaaaagtcatacacttagttatttaatattcatatcaattattttaggaagagattgtgttcggtcttctgtctccacatttgacacactggtgatgaataatgtgtttagtttgt

SEQ ID NO: 265403 - DNA, 515 bp, Cannabis indica
taatagtgtatacaatttttttttttttttatatttcatcttttgctttggtttttgctttagtgtcggatagataactggagcaaaaaagtgtgggttgctttttgtgtcggtcaacaagtttgaccaaacgcgttgatcgatgcaaaaaaccccttttgtagtagtggtaggttataatttttgagtttattcagaatacagccggtatgctgccgtattttctagaaaataaaaaggaatatgttcttttgttattcttattattttcttactttggttatactgattagagtcatgttgatcacgtttggtacatattgttatttcacaacctagtctctgtgtcatcataggtagatcaggtgtgcactcacctttaggtgaaagacttagaatatgtacaaggagtgaagtaaatctgagccctagtattatggtggttatcaggtgcgactacctgatttaagaagtcattttctatgattgttattgagagctaggggtctagtgga

SEQ ID NO: 265404 - DNA, 991 bp, Cannabis indica
gccaattttgactacttgggtgatgctaaggacatgtacattcgattctggacgtcccaagtggcctatggaaaaactgaggcggctgcttcaacctccggtcagactgctgacgtacctcctattcaaacaacagatcctcctactctgattggcccagaagaaccgaaccaagagcctgggactccagctgcttaaacacttctctttttatctctttattttttatatatcttattcggcctcagggccttttctaagacatcatgaccggccaagcggtctttaaacttggaattatttttcattttttggacaacaggctgaccgggcagcttttaatcccggtattacgtgcttttgttatccttaatgaatttcattctctgtttataattgtcgtgcaattgtgattgttttatttttaccaaatgctttgtacaggtataggtgccccccaagtgaccgagcagacgtatgactcttggtcacttgtcttttacaaatatattgtttatctgttcggtgttttgggtttgaccaaaccttttgtacgcattgtatggtaaattagaaacatgctgataatttcgactcaatctgaattttgaaataactatctttattcatttattgatcgaaaagtgtatttgttaccgtagtaacttacatcagagctatttgatctaatctgatcttttagcttaacatgagataaaacaaattgcagacataagaaactgtactttaaagtggtcacccgacctgagtactttgtttcttttatcgaaacctttgagcgtagtccgcccagaaggccattcacttaaaagcaaatgttcatttagtacttaaagtggtcatccgacctggtactttattggtagtattttcttaaatgttctccattccaataccgtggtactagaatgagttgcattttttcgtcatacttacctaacttgtatgctccggagtcgagaacttcgac

SEQ ID NO: 265405 - DNA, 710 bp, Cannabis indica
ttattttttttaataattaatttacggtactaaaatcaaatatcaaacacactgtattaatttcacaatattattggaaaaaacattggggtataatttgtaagcatgcaaataactttttcaactttattttttatataatatgacttatctttatatataacattaattagtatgatgatttttttattatataactataatataaaatatcatatataaatgtataaacaaaaattacaacttattcaaaggttgaataccgaatccaaaaaatattagtatatatatattttggttattacctttgcatttttatgtcttgactatatacctagctagtacaaatatattattgttttagattccagacatccgagaaaaacggaatcaaaattaaaactttcaaaatacagatcgatataagtatatatatatattatgcttcacatagaattgaggatatagatatatataatatacataaaggtaaagaacacattaattaataaaatataaaaccaatactgtttttatgctcactttttcttttaattttctttcgttaggtgccatatacctaactataagactgtttgtccatgtggaaaggtatacaagcttagttgtattcacagccaattaagctaactagatcacatcttatcaaattacgagcaactaataattagttagcattaattatatat

SEQ ID NO: 265406 - DNA, 527 bp, Cannabis indica
acatcaaaccgaaataaacacggcaacaaaacttcaacaacaaatcttagtataaaacattacaggtatataaacattacaagtttacaagaatatatatatatcatctggaaaaaaaaatgaaacacgacatttaaaagaacatatatataaaaaataactggttaaaccaatagaaaaaattaaggacaaccgtaggaataaaataatcacaaacataacaggcaaaaaaaatataacagaacaaaaataaccagttaaaaacttaaattaaacaatgaaacataaaaattaaatgaaactggttccaaatacaaaattaaaatcagcttctaataaaacatagagaaatgtaagtaaatggctatatttctaactctatagatagttaatgtccattttttaaaataataaagcaaatgtcattttgtagtttttaatatctaaaataccctttattatataaaaggtattatatgttttattcctttaatagaaattacgaaaaacaataaattaaaacctct

SEQ ID NO: 265407 - DNA, 1461 bp, Cannabis indica
tgctttccttctggcctcttcattaggcaaactatctttgactaaatccatagtcaaagtcccttctggcgtggaattagaaattgttatcaccaacgtgtcccaactttttggtaaagaactgaggagtaatgatgcttacatctcatcatctatattcatcttcatggcaactaactggtttgcaagactctaaaattgacttgtatgctcaatcatactaccaccatccttatactttaaatttacaagtcttctaagtagagaaattttattgttagttgttctcttcgcaaagagattttctagctttttccaaacgacatcaactcttgtttcattagagatatgctcatgaagagttatattcatccatcgtctaatataggcaatggaatttttatgttgaactttctattcctcatcatctaacttagacagcttctcactacctttagtacgtttgtacaaatttttacaatagagcaaaccttccatcaattgcttctaagcagaataatttaataagttcaaattcatcatttcattcgactcatccatttttcaacacacaagaattcaataccaatcaaccttagctttgataccacttattgggaaaatctattgcaattaatcacaatatttttccctctttgtatgtcaaaatgggatacttatcaaacaccacaataaacaatatcagatatcaatcaaagtaccacaagcaatataaaatacacaactcaagcataaaagtgagacaccaaaatttttagtagaaacccaatgcgaaagaaaaaccacgggaccgtagtctgctcaaatcatccactatcaccaaagtttaataatgggattagaaagttcttttctagtaaaactagaggctcgcaacaacatcaagattaaacaatcttggatcactaatacaatcatcatgatatctcaaaaagatagatacacaaataaaaagtttgggtctcaccaagtgagtattgtagaagagcaccttagagaggacaatcgccaaatcaaaatcggtagatttgaagagcaccttgcaagaattcaccgcccaaaatttgagctaaaatggatgagaaacaaccacttgatcttcaatacaaagtaacaaaacttctttctctctctaactttttttctcttctttctctctctttttctttatttctctttctgcccacgatacaccatgaacttctttttttttcttctaattgtttcaatcaaaatgggctttagcccttattagttcaagcccaacaacatggggcggatctaacatacatatactaaattaatgttacgtacaaaactcgaatatttaatttattaagtttttttttttcaaatattataataaataatgttatataatttaattaaataaataatcttttttatagagaaagatgtttaatataaagtgctatgaaa

SEQ ID NO: 265408 - DNA, 585 bp, Cannabis indica
actaaaaattatttcggatgctaaaacagataagggtgcatcaatatatccattttaagagggtgcattatagaattttcctttatttattttggtaagaacaattaaattttcaggtaaacttatatagtcatgtaaatattgttcacctgagtaaaattaacaaaaataggctagtaagccgtttatattataatgaacaaaaattttaatattaacttcaactaaattatccataagtgttagaaatagtgtgaaaaatactagattttcatctcgaataagcatatgacagatcatataattcaataacaattagctaaaggtgtttcaataaaaattgagtaaaaatatcctaattattcaaattagtttctactatgatatcatctttgttgttggatgattgtttgaactaatgtaagtttcttttttattaaaaaaatagtaagttttctatagttattagtaaattggattcgagaagaagtgtcattcccatccacgttactttgacatttgaggataaaaaaatattttttacaagataaaaaaattttacaccatcccacaggaaaaaaaaaa

SEQ ID NO: 265409 - DNA, 1142 bp, Cannabis indica
gactggaggaggaacttgtccttagatcttgttgtcagaaacctcgagattgatgggctcgaccagtgatttcttcttatgggcagtggtttgaaggtattgtgcttgaaattaataattaagtagaattttctagaaaattagttattcagatattctttaaaatatttttatgttgaaaatttgttaattttagatcaacttaaatagagatatttttcaaattaaggtgattagttcaagatacttaatttgttatttaattaaattttagaaaataatttttcgaagttttataatatttataatggattttattttagaaaattaaattaaagttaaaaattaattttaattaattgtggatcaacttaaattacgtaattttcattattaaaatatatagactaaaataagtgatcagataaaaatacattttgaacaatgagttttaatcaaagagatattcgatctccattgttggttctacatggttcttgttttagtgagattcatccctaatagatggacgttaattagcaatttaacaccatagaatctcgaaagctatgtattattgtaagtattttattcttagtaacgaccatccgactagttcctgctaagaataggaatcacaaagtatgaaacaatggtggaagctcatgaaataagaatgaccttgactctcaactaaaatgaagcaacgttagattctcttattgatcgaataaaatgttgctaggatggtttccattttagatgagttgactactctattctatggatgatatctttgactctcgactaaaacgaagcactgtatcagtttgttgaaaaccttagaaaataattgaatatgttttattttggtatttttgcaaacatgtttacttaattgttatttttctgaacttgtgtatgaatttaagagaaccaaatgttttgtttctgtttattgatatttgtagtgtcaaaatgataacacacacccctcacctcaccttttacatgcttttgcaaatgaactctataatgtgaaaatgtctccttgtaagagcattaattcacacctgatgacgatgaaaatgaatttctagaaagaaaatttactgggaattgatttatcaagagaacaatgg

SEQ ID NO: 265410 - DNA, 690 bp, Cannabis indica
atctctggtttagtttattcggaccctcccacccacccgtggttactatcttgtgtttatggccctccctatttgcatgcaaagaaaaatttttggactgaattcttgaaattgggagatagatttggaggtccttgccttattttgggagatttgaattttgttctctgtgattctgaaagagaagggtcctcgggaagggacccattcatcccgataatctcgaatctcattgactcctgtggtcttatcaacatggctatccaaggtgacatgatgacatgggataatcatcgttctggtaggggtcatgttaagtctgccctcgataaaggtttagccaacggagcttggttcaatctctttcctaaagcttctctaagctcggtccatactagtaattcagaccacaggccgctgttccttcagtcgggtggagtccaacctaagatcaagagatgctttaagtttgaggaggggtggactcgtgatgagagaagcagattggtggtagctagcgcctggaagtcggttaatcactcttgggcgcctgcgcgagtgtttaaaaaagttggcgccacgagagttgctctcctgcactggaaccgcactcaatttggcaagctcgatttggagatcaaacacctaaaaaatcaactcaattctgtgcagagccttcccgctgggtcc

SEQ ID NO: 265411 - DNA, 530 bp, Cannabis indica
tccaggagctactccatgagttcgaggattataacgtggaaagaatccccagagaaaagaatacccacgcagactgtttggctaagttagcatcagacagcgaggttgagaaaactgggggtggtacccgttgaatgcctcgcggaaccgagcatcaaagttaaagatgttgtggctacagttgaaccagagacaaactagatgaactccatcatcacatacataaccaaaggcgagttgcctcaaggaagggcactgtctagaaagatacagtaccaagcacaccgatatgtgatgatggacaatattctctaccaaagaggactcagcatgcaatacttaagatgtgtatcggaccctgaagctaagcaagttatgctagaggtccatgaggggttctacgaagatcatactggaggttcgagtctctcaaagaaaatattgagacaaggatacttctagccaacaatgaaaaaagattatatagactatgtcctgaaatgtgattcgtgccaaagattcgcgaacat

SEQ ID NO: 265412 - DNA, 609 bp, Cannabis indica
ttaaatctatatgtaaagtttaaaaatgttacgagttcaaaactcttcaccttccctttacattttgtataattattgggatttgaacctagcaataaatttaaaatattattacactaaaatttattttaacataatcttttattattttatattttattatagtcaattctatatttttttattaaatgttgaaatcatatatagaattagaataaacattgttattaagtaccatgagttttagtaccatcatgagtagcgccttataaataattatttattttctataattattatcaaaagtaaaataagtgagattttatattaaatttaacacttatggcaccataaaatgtcctaattggcatttcactataaaaatacataatcagcacacttaaattttttttctaacttaatcgcctatgtatatatgtatatattaatattatataattgaaataattcactactacaaaattagctttttccaacggtttataactgtcttttatactatttcccaacggttttttaaaaccgttggctatgtgagtgtcataaaaatgcggaactttaaaagacggtttataactgttagaaaaa

SEQ ID NO: 265413 - DNA, 598 bp, Cannabis indica
ttattattatattatattattaatattattattattaatatataattattataatattattttatatatataaaaagttatcgttttaagtatatatatattaagttacagtaaacttaaaacgaaaagaacgaatgaaccatcgttcttcctccttcgtcaaaaccttctcttcctatattcattttcttcgattttcaatccgaaacttagtgatctaagctccagtagcagcaggatagcaaatctttaaatagggaaagcttaaggtatagtttaatttcgttttaagtttaaaaacaataagtttcgtataagggttttgtgaattacaatagttatgaaggttctaaccttataggattattctcgggtagtcatgggactagttctgatgtttacttattgaatttgaggtgattttgagttagaaatcgagtttggaactttttaaagcttagtctgaacgttaatggcgtttttcatttaagggctcgattttaatttctgttatgtaaggatggtaatatttatagcacatatgcaccctgtgaagtttggagtgatttggattaagtttggtagtgttcggtgagtg

SEQ ID NO: 265414 - DNA, 625 bp, Cannabis indica
aatattttattattaaattttagctaccatactcatttccattaaatgacttgtattattattattattttattaaattttacatttaattttataacattattattttatattttttaataaattattaattgattaaatagcatattaaattttacgttaagatttacaattatgtattagagcacaataataaaaattaatattgatgtaaaatattacaaaagtacttttttttttaaaaacatagctcaacttttacatcttttattggagatagtcttattaattaggcgttgtttttattgtggtcataaacataatttaatagttgtatattttttttcataaaaagaaagtactaagttggaatcgcccactccaaatatataataataaaaaaatacaattcctattattattttagtgtggtgtgtacatttttatttaaaaaggatcattttattaaaaataatcaatatgtataatacatcaagagaagaataaaaaaattatctatccaaactatagctcattatatattcatattaattgtatgcattgttaaactagtattatactctaataaacacccgaattccatacaaataaatgatcttaagat

SEQ ID NO: 265415 - DNA, 936 bp, Cannabis indica
caaatatatctctttttatgagtcttgcatctaaattattctctcacactcacgtaattaagacataatttcaaacataataaatttgtgttctttataaataaatgtataagtttgtgaaaaagttgggataaaattttaattaaagaaaaatataaactatcctaaagtgatagaggagaatgattaaaaaaaaaagtaattataataaattttgaaatagaaaagaaaaattaaagaaatcaaattaaaagaattatatagtgtaatttcttctatgcaatttaaaattggtttacgttgttggtgaacaaaaaagtttaaatatgaatatattatgaaatattagtattatgtaatattataatttagagaaagaaaatagagaagagatgagaattttctgagtgttttattccaataggtgatctcctatttatacacatacaagagtcaaatattaagaaactaagagaaagggaaactaagaaaaagggaatgttgattacattaatggtaataaataaaagatttggacatccacataattaatactatttataacactcccccttggatgtccataataactgcctcattaaaaacctcgccgagaaaacccagtgggacaaaactcggtcaaggaaaaaagagtgcagtatgaaattactccccctcattttggcattcgtggagatcctttaatcgacgcattccaatcttgtgaaccatcttctcaaaagttgatgttggtaatgacttcgtgaataagtctgcaagattatcgcttgatcgaatttgttgaacatcgatatcaccattttcttgaagattgtgtgtaaagaagaattttggtgaaatatgtttagttctgtctcctttaatgtaccctcctttaagttgagcgatgcaagcagcattatcttcatagagaag

SEQ ID NO: 265416 - DNA, 704 bp, Cannabis indica
gattgattaaacaaaagcatatctcaaaaatccattccaccatctgccttatgccatcacaacctagatcaagtaaaaggatatccacttagctcaaaatcaaacaaactacaatcatttaacatttctcggaaaccttccaacaccagttaggatacaccctccctcctctcttctcatcactatgatctctacattattttgatcgccaatattacaccacgaaagagaagaatgattcttcaaagtacgaaccaaagtcccaagtatctcgtctaaaccccattttcgactatccatataaaatgttaacctctaagtcgccaattattttcccccaaaaccgctagagctaagcggagccacctaactcctatcatatttgaagatttttgtgacgtagcacgaataaagttaccatatggctgaaccaacaaatggtctggggtaatatacatgactcgatgacacttcttctccgcatgactcatgcatgataccgcaaataaaacaaaaggtaaaaaaacttctcatatttgaagttctctcccaaaaagtttcaccatttcccttcttcaatctcatgtgcttcaaatgtcttttaattatatctctattaagttgtaataaatttttacttgttcctttacgtgagaatttatagaaaatatatcttatataattatatgttatttctttaattg

SEQ ID NO: 265417 - DNA, 1190 bp, Cannabis indica
ctttaattgcaatttcctaacaacttatatttatcagtaaggaaagagttacattgagactttgaaagtttgtcatacaaagaaaggcatatacacctttgtcaatgaggttgccaaaaatacatatgtaagactttataaattatttttcaaatatattcaaataattacaagtttggttagcttctaacgtattcttattatagaaagagatggtgacaaactgaaatagtgctcctgaatctacacaagtttctgagcttcagatacttcggtagactcttggagagaggtgtggccatcagcaaggagtgggtcaaaaattgaaagggcaattatcaagacgacagttacaaactacaactactggtcaacctgacttacaaaacggttattgagatgtagagacaaatacaaatattaactcaataattgtcacgtgaaggttgatcaaaatggatgttgagatgaatgatgcagctctaacttaaccaatgtgtcaacaaccgtctcactctcacatgcatggagatgaatctggtccatctttttagccaatgggttttcagcattagcagccgtaatagactcctatttcgttttagcaatacatcagcctcctgttccttcgtctgcaccattaacccctgaacagtttcacagtcagatgtacgagtcattcttgtagtttttggcacaatcgctaaacaattcgtaagtaatgatgaatatgatgacacagtcgtcttagacatctcaggtgtcacagtcacggatgccacaaatgatgccgacacaacaaatatcacagattccgtaaattttttagatgatgtcgacaccacaagggcagcaatatcagtagacattgcagatgatactaacacaacaagtgaagcagacatctcagatgatgctaacaccacatgggcagaaggcatctcaaatgatgacgagtttgcagatgccgccatactacccacaaatgtcgaatgttcctagagatgcttgtgatgatgacgacgctactacaaatttcttttagaatctatatttaagtttaatgaactatcaattttatgtttattgtatattttatgaacacccactttatgcttttagtaagcagtatttaatgataatgtaatgtttgtaactctaaatattaactacaaaaaatattacttttt

SEQ ID NO: 265418 - DNA, 1361 bp, Cannabis indica
ggagaaagaaccaacttgttaaggcaaaagagtactgaagaaaatgtaatgaagaagctcaaagggcatgaaaacactactgattcccatgtaaaaatcaatccaactccttaggatttgctctcactttttatacatgttgaagctttggaaatttgaaagttaaagaaaagtatcaatatcttatacgtatttatttagtaggtatattaatttgaagcaattcaggtgtttgtgacatacattttttctgtaaatctctaaacagagttatgaattaaaactaaaatgagagttagagttatgaagctctttgcattgtctacgagaaagtaatgtccaaattattgtcttgttttctttaaattaaattttatctttacaaaatttgtgtatgataaaaatcaatttaacagggtccaaacctttttttttttttttctaattagaaattacaaatctgtgcttaggggttaggaactcaaatcaaaaacccttatttagctaggatgatgtctctagtaatttttctctttttatttaaagaaaacacttatattaattagaaatgtgaagtgggtgccctatattaattaatgatattggtagcttctattgaacttgttctaataatcaagtgggttaatagttgactaaatagaattaaacaagttaaacattaattaaaatataaaagagagttctaaagataccaaatgttacaaagaagtttccatctttaattaatatcaaatatactatttgttatatattggtcaacactttcatttcattaccaagtaaatggccttgctcatcaagcattttctccaaaagactaaaacaaaacctttatatataaaggcacaactcataacatcttcaaaatcatatattctctcaatcaaagctcacaaaacaatttggccaaacatgaagagagaaggtcgccaacatgggatggtcaggacttttcagattctgtcatcccctttgaatgcaagacccgaaaccaaatttgtgaaccggttcgatacaccaaccacagccgggttgttcacccgggtgtcatccaagcccaccaaccactccaaattcactggcaagtgcgggcaatctcggtgtaacgggtgccatttgcacccgacacacaaggccaaagacaaaactaaaggcactcagaagcttaaattaaagggtgttgtttctaatagtaaagactcattttctggattttctgccacaagtattttagatcacatttacaacatggatgataatgaagaagaaggtgttgatcatgcatgatagttcttaatacaattgcaattattgcctaaaagagttgagatggataaaaa

SEQ ID NO: 265419 - DNA, 606 bp, Cannabis indica
caaatctttgacaacatcaacatcccaagttttctcacccaccacaaacgactactaacctgttcattaggcaaaccaggatccaaactactttgactcgggattgacccatttggaagctacgaagcatcaaataaaagtgtctcctctcccttaccaattcccttccgcgctcccttacgaatcaaatcttttaccgcaacaagacttctccaaatataacttagattattaccgagttctgccaaaagaaagttctcatttttaaagtaccgagctttgtacactcgagaaaccaacgaatcagggttggtcaggaacttccaagcttgtttacccaacatagccaaattgaaatcatgaagagagcggaaacccaatcccccaacccaacctccttactacatgccatcctctcccaactcatccacgaaattccttgacgggaattcctagataacttccaccaaaaattagccattagttgttccaaattatgacacgttcccgtaggcaaaagaaaaacgctcataacaaaagttggaagactttgagccacattacgaaccaggacctccttactagcacgtgacaagagtttaccat

SEQ ID NO: 265420 - DNA, 3721 bp, Cannabis indica
aaaaaaattctaacatggatgaaaattcagggggcatgaattaatatatatcatagtttaaggggtatgatttggtagatatcaaagtttagggagcataattaagtacataaacaatcactgaaatagtaaaattgaataaaattagacaaaagtctttaaatttaagaatctcaatagttcgagagaaatttttaacagccaaaaaaaattcaaaggacacaatttagtacatatcaaaatttaaggaaaaaaattactaattaaactttttgaaattatcccataaataaatacaagaagttattggaacatatgtggtggcccaacgagtaggggcccatgggcctccaatggtccggaagggaagaatattgagtcagtaagaatgggcccaacccaagcacaatccgattggtgaatggagctatcgagaccgttgaacgtggaaacatcgaagcatcctctctcaccagacatcgaatccaagcataaagtttgaaacttggaaaaaccaatggaaaaacttccacaaccaaatggatcgacaccacgacatcgccaatcccatggtgatattattgtaagaattagaccaaaatcgaatcttgacctgtatctctagttcttcttcgactctctcatatgggtcgtctccgttttctcctctacgcttctggcttctctttgggtctttgtgttttgttttccttacaagctttttgggttgtccatgctaaacccgatctcacccacatcaaccacgatctctaccattccaggtaaatcttttttatttatatatataatctaagctttgtttcaaaaaatcatttctttgtgatttgtgtggagatccataaaattcgagtgaaaggtttagattcggaagctgaatgtgttgttgatttcagttagctataattcgaatcaaatttactttgggtctagttctttgaggttctaatatgggatttttttttcctttttgcagtgagaatttgatgaaagagataaagggtttagtgcatcgtcatccaaacaaacttagtgtatgttgtataatctataaattgtatttgaattagtttttttacttatatgtttgaatcagactctaatagttcaaatgattggcctgagatttgagttcatactacacagcaattataattgttcttgtgttcaaaacagttggaaacggttacatctagaaacaaagggtaccaggctgaggttgcagttgtgacatacggcaggagaaggaaggagaatgatgatagatcaaagtaccgaatccttcttgtaagtactccaacagttcattgtgtgtgtagatatatgtatatttttaaccgactttagagaaattgattagaatttacatcagggactagttgtggatatactgtgtagataatctcagatttgtaatggctgttgtttttgacagatgattccttgtcttccagagttttgggcagcatggaagagagcttattacatctgaacttgcgttgaggatcctctcagtccttgagtgggaacactttctacctacatggattcagatttccttaaatagcactcttgataagctcatcattaaggtaacttctcttctacttctacgacttcgaaaagtgttttccatacttagaatctaggtagcagcaaattgtttgtttttgttctccttggcgatgtaaatgtttgccaagaagttggctgatatttgatgatccattctttacaatgataagaagaggtcattaaagcagtttttttttcgtaatgtaactattttattcttgtatttgtgactttgttactgtttgaactctgatatctaatgatatattaggtggtccccatggaaaatttgaatggtcgtgaacttgttgaatcgggagatctttgtgagagaagaaatggtgagctagtttgctgtaatcatcttgaaagaaatattaatttgtgaatgaatgtaatttttgaggatttctttgttgtggcaggaagaggtgttgatctcaaccgaaattggagcgtagattggggaaaaaaagaagaggtctgctaagcttgtcgtattactaaaacccttttgttttctagtttaaagacctaaaatatgcactagatcatgctcataaccgtttggattcatctttcatgttgtaccctcacaggattttgatccatatgaggaaaatcctggaattgcaccatttagtgagcctgaaactcaaataatgcggaaacttgccctgtcatttgatccacatatatgggttaatgtgcattccggaatggaggtaaatgattatgatgtatcatctctggtcaaccatctttcttttcatgtgttttgttttccattttggtaaatattgcatgatcacatcaccaattgtttttttttaaattctctttcttccaggcattgtttatgccttatgatcataaaaacagaacgcctgatggagtcatgtcagagagaatgaagtcgttgcttgagaacgtgaaccttcttcattgccaccaacgttgcatgattggatctggtgggggctctgttgggtaataatacttgccattattttactcaaaaagggtagctcaaataattagacatgtactttgctcccacatatagggttaggcgtggatcttagtttcattatttttatgcctttgttcattctttaagttagaacttaatggggttatcttatgtcccatattataggtacttggctcatggaacagcaactgattttatgtatgacattgtaaatgtgccaatggcttttacctttgaggtttgtcaagttttttgatcctttcaaatttattcaaagttggcacacttctcatttagctgatcatcttcattctttttgtctaacagatttacggtgatgaaacggcttcaacaaaagattgctttaaaatgtttaaccccactgatttcggtacattcaatgtatgctccacactaaaatctctagagttattgttctttattaggagttgaacagaggtttaacattggattgtttttttgagtttcagagagttctcaatgattggtctgcggcatttttaacagtctttaaattagcgccacaacagattggcgaagtcccgtacaaggcttctgtatccaaattggaaaagtgggtatctatagatgagtatcttgacggatatttaatggagaggagtagtagatatgggaagaagaaagaggtctttgagcttgggatgcaagagataagaacatattttaggctctttttgttatcctctgtgcttttgatgttcatgttctgttctagaatatctaaaggcaagagtagtagaccaattgtttctgctattcctctctgaaatcacatatatagtggtctaacacataatttttcaaagaatgtgattgattgtcatttgttttttgttgtaatattacacaccatcacaggaacaattattgggcccctagtgtaattatttattcttgggatatttacggaaaaaaaatagaaaagttttgatatatatatagcatgtaatcttatttttttttgctaaaatatggcatgcaaattaattgcatattatagataagaatttaaaaatatggaataaatcatcataagaagaaatactataaaatttaaaaattcgtatataaattttacttttatataatcaa

SEQ ID NO: 265421 - DNA, 412 bp, Cannabis indica
accttgcttcattcttgttaaacctcttgttggattctatcataaaagtacctaaaatatcttctaatgatttcttttcaggttgttattgtgcattaaatccaggaggtggttgcaagatatttttagtgttactataagaaagattctcatggtttctcaaccacgaatggtagtagttaagcattggatttccccggtagctgttattgtaaggtttattggccatatactgtgtttgttctatactcatctcaggcccttatggtgtagatgcagcagcaacatttttctatagttgatgtatacctctaattaactaaggctgccacttgattagataaagtagaaattttagctgccgtatttgtcgtaggatctacttcatgtaacccagccacctttcttggag

SEQ ID NO: 265422 - DNA, 3155 bp, Cannabis indica
tgggccggcccaacactgctcccatcttcgacaacaaccttgtcctcaaggttgacagctccatacatttgctcaaattcagcgagatcctcccaagtcgcatcttccatggcacttaatgaccattgcaccagcacttgttgctgccctttgtgcattcgtgaggaaagaatcgctaatggtagcatgactggtttgttgctgacacttagttctggaagagagtagcaaatcggtgggtttggcccataaaatggtttcagcaccgatacatgaaatgtggggtgtattctactgccttccggtaatgcgagtgtatatgccacaggtccaacttgagcaacaatggaaaatgggccaaagtacctcttagagagtttgggatgtaaccgttgagccactgtagcttgcctgtatggctgaagcttcacgagaaccagatccccaattttaaactgaatgtcacggcgtttcttgtttgcttgttgtgtcattctatttctggcttgctgcagattggtagttaactgacgtagtattgcatctcgagtaagtaagtcctcctctactgcctggattcttgtgatgcctctggtgtaagctgggatagtagggggagtgcgaccataaacagcttggaatggagtcataccaattgctgaatgttgactagtattatagtggtattccgcccatgagagatatttactccacatcttcgggttgtcagctgtaaatgccctcaaatattgttccaagtaacggttggtaacttctgtttgcccatctgtttgtggatgataggaggaactcatcttcaaccttgttcccatcaactcaaacaattttttccaaaaggcactcgtaaaaattggatcacgatctgagacaatcgatctcggcataccgtgtaacttaatgaccatgttagcaaataactccgccacttttgttgctgtgtagttacttggaagagcgccaaagtgggcatatttagtaaaacggtccactaccaccaagatgttcgaaactcccgctgatttcggtaacccgactatgaaatccatggataaatcttcccaaactctttcgggcagctctaaaggttgcagtaaaccatatggtgttgtgggcgaatacttgatcatttgacatataacacatcgttggacaaacttttgcacttccgttcgcattccaggccaaaaaaaatttgcactcaaacgaatgaaggttcgattaggtcctgcatgaccccccatcggtgtttcatgaaactcacgcatgagttcttgtttgagatgagagttggagctaatcctgatgcgatgtttgtaataaagtaactcgtccctgactgtgaatggtgtatcgcgaagctgacccttctcccactgttcatgtaattttcggagctctggacaggtagtattttcttgccttattgtttctaaaagttcaaaagaagctgcggattgagctgctgccaagatagaaactggaccctcaaattggcgagataaaccatctgctgctgaattcgttctaccggtcttatactctattgtaaaatggaatcccagtaatttccgaagaaattgttgttgctcaggtgtttggatcacttgggtgagtaactccttcaaactcttatggtctgttcttatgacaaactggcgtcccaacagatattgtctccacttagtgaccgcttctaccactgctctgagctctcgtaagtaagccgatgtgcccagaaattttggccccagttttttgctaaaaaatgctatcggatgaccctcttgcatcaacactgcgcctaagcccacattcgatgcatcagcttcaatgataaattgtttggtgaagtccggcagtgccaaaaccggcgtttctgtcatggctgttttcagttgtataaatgccttcaaagcctctgctgtccaagaaaaattgtccttctttaaaagctctgtcaaaggtgcggcaatggaagcgtaatgtgcaacaaatcggcggtaataacccgtcaatccgagaaacccacgtagctgcttgagtgttttcggttgaggccattgaaccatggcttcaatcttggatgagtcggcttgcacaccgttggctgaaactaaatgcccaagatattcaatctgtggttgaaagaaagtgcacttgctagccttggcaaaaaaacaatgagttcgtaatagctgaaacaccatcctcaaatgtgaaacgtgctcgtccattgacttactgtacaccaaaatatcatcaaagaaaacaataacacagtgacggaggagaggctgaaataaccggttcatagtggcttggaatgtagatggcgcattcgtgaggccgaaaggcatgacgagaaattcataatgtccctcatgagtgcggaacgctgttttgtgaatatctttcgggtccatacggatttgatgataccctgcacgcagatccaatttcgaaaaagtggtagcacctcccaactcatctaataattcgtctattgtcggaatagggaagcgatctttgatagtaatattgttgagggctcggtaatcaacacagaaacgccaggatccgtctttcttttttacaagtagcactggggaagaataagggctgttactcggtctaataaacctccactcctccatttcccgaaccaattgttcaataatgtccttctgaaagtatgggtagcggtatggtctgacatttacaggttgtgattgtggctgtagaaaaattcgatggtccgaactgcggtgcggtggtagtgtttttggctctgaaaaaatgtcttcaaattcagtaagtaaggctcgaccttgttcgggcagtgtagaatctatcttcattatcggttcttctgttttgtgatcctccggagagacagctgccagcaaaaacacatctcgcacgtctccatcccgaattagtgtgtgtaattttgaaatggacagctgctgagttgttggagcagacgatcccgctaatttcaccaccttccctttccattcaaattccattgtcaatgccttgtggtcatgaagacaagggcccaatgtttgtaaccattgcatactgattagtggttaaaaatacacttttatttattttaaatgataaaataa

SEQ ID NO: 265423 - DNA, 5783 bp, Cannabis indica
ttttttaatcaaaaaataaaagtaaaatttttgtttttaaaaatttcgtttttaaaaaataaaaatacattctgtaactatttttatttttcaattttaaaaacagagaataaaaatgtgttctgtaaagtttatttttatttttatttaagtcgggtctaggttcggagtcggattcacatttaggttagagtctgggttcagcaccagggtcgtggggatgtgagtacgggtctggtcggaatctaaaatattaattgaaaaaaactgtttaaaaaaaatattaaaagtaacttttatttgtttttaaaattttgattattaattaaaaattttgattattataaataaaattagattagttaccaattttttttttattgttaggaaaataaccctaacttggctacggtgctccgacgagtacgaacgacggcacctccatcttcggtcccttctcctactccactggtatcaatccccaactttttcacaacaattatactcaatttatttggttaaccattacatatgttgtactcaatatttgctctgatttttgagaaattcatgttgttaaacttacgaaatgctcaaacaatcatagttgttgtcttttatttgatactttgttgtgaagatctgatctgatttttgaaaaaatgatgttttaatacttaggaattgatctaaaaatcatggttctgtatatgtatcattgacttttcatttcgttgtaacactcaaaaaacgatttttttttttgagggtttcggtgtgacagtgataatggaggttgagtctccgcctggttttagtatggaccaaagtgatgacgaaagagctgaactgagcatttctgagctcatttgtaatctcagatcggcattcaggatctctgattttgaccgggttgaggagattctgatcaataaagagaacaagatgaagaaacaaatcactgagttggagtctgagattatccaatttgatcttgaggtcaagaggctgaggatagtgagtagtgagaatagaatttcgagagagaatgacgagatcatggaggagagagtgaaggtggctgaagagggaatgaaattggctgagatgaaagcaagagaagctggtgacaaagttagagagacagaggaaaaggttgtaaaagctgaagagggaaagaaattggctgaagaaggaatgaaattggctgaggagaaagcaagaaagcttggtgaaaaagtaagagagaaagaggaaaaggttataaaagccgaagagggaacaaaacaggagaaagcaagagaagctgttgacagagttagagaggctgaggatagagttatgaaagctcaggagggaatgaaattggctgaggagaaagtaagagagacacgggaaaaagttataaaagctgaagagggaatgaaattggctgaggagaaagcgagagcagctggtgaaacagtgagagaggctgaggaaagagttatgaaagctgaggtggaaacgaagttggctagggagaattctaagaaaacagaagaaattttagaacgattgcggatagatttgaagatggctgatgagaaagcaaaagaagctggtgaaaagtaagagagacagaggaaaaggttataaaagctgaagagggaatgaaattagctgaggagaaaactaaaataactgaagaaatgtggatggatttaaagaagattgagagagaaaaagtggttgagattgctcagctcaaggagaagatcaaggttttagagtctgggaaaaatagagctgaggatgataatgaagttcgggagaaactttttgaggaatttgagaaaagggcaatcttgttagaagctgaaacagaaactgctttaaaaatggaatctctggtttcaaaggtaacggccataggttccactgagtctaataaagcaaacggggagaaggatacatgcaaaaatgatggatttgctgttgtttcgggatctgatcattttccttcatctccaacttgtctaataaaccaagattttccaagtaaggtctttgtttgcattgcttcttgcgatttacttatcatgcatgtgtttatgtgagttactttgtgtgccttgattaggtgatagtcattgggtatttgtattactttattatgttcaagaagcatagcagactgattctttttgcctggattagtctgtaatattgcgatatgtgtctttcaaatgacttttgcaggcatggtaaagctttaatgttgtcaaacttttcaaaggacgtcacactattttcttaatatttcttcgtttttgaagttttcattactctttctctatgatacgagcttatgttttcctttaggaggtagaattagggagagtataacaatattcagaaaaacaacttttagtgagaggatccatgatatgtgcttcaggtttcaatgctgccatttatcattctataacataaaatattgttctttcattatatttggttatatacgttgtgtatcaaaaattgagttattattgttagatgaagtaagcactgcctaagttgggattgacattaagtcaaagaaaatgttttgttaggcattccatagaatataactgaacaagaatatatgtagatatttataatatatgaagacagatgtagtgcacaagtaagattcctaactccatgttcaatgcaggtgacaagaaatctgattttgatgaaggttatggaatgggatatagaaatttgcatgatataggccttatagatttggcggattgggatattaagcccatactgtctaaacgaaaaagatcttgttcccctaatgtaagtgagagcaagctgaagcttgatggtacatgtacaaatgatgatgatgttgagaacatatctctatcaagatatgttcaacttgaatgtgaatacaagacaagagaagacataagctctcaaactactcttaacaagctaacagttggtaataagactgatgctttcaattttgaggttagttcctcatctgaaagttatgattacattgatttgttcgacggtttgatgacagactttaactaagatatgtgagtgtagaagtccaacaggtttgaacaccattttgatctacttgttcatcgggacagtcacgaggattcttgtactctgcatttctgatcttttgttgctcgttgttcttgcttgcttgtaattatcggtatagttagatgccattaaactaacacaacatgcttgcctagaatatttgtgtatatatatgtgattagtccattaccttaccttaggaagagtcagaaaaaccatattcttgccttttgttcctcttagtcaaggtagaaatgtttctttttctcttgcccttttgtacaaaactagctaattgactggtatagtcaaagctgaacagatagtagtaacaatctgttagtatgtatatatttatatttctttttgcttcaggaaaactatatctcaatacaagaggtgttttatcaactttgtggattttttttttaatttttttccatttatataaatagggtactcttctttatgtaagaacaaaagtagtgttctcacaaatgaaagcatatatatatatatatatatatatatatatatttattgagtaaccaagcacttcattagataatatcacccaaaattaaggatgaaacatagaaaggaagattgtctttaccataaatatgattagacttataatgagaagattgcgcaaatatatgtgtcactttattagcagatcgtttgacaaaatacaaagaaattattaataatagccttacaatttgaaattgcacagccataccatgattttattattaatcaaatcttcaaccacaataagactatttgattcgagtatcacattgaccatccaagagccttgatccaacttaatatgtttctttgatgcccaatgcttcaactacatgaggttccagattgccatctttgcttcctcacttagtttccagaaccactccagctgaatttcgagccacacacctatagccaaatcacctatgattttagaaaaatttggtgtcatccaatgctcaactgcaaccctacgagattcaaggttggtaaccatatacatcttttgagcattacttcattcttcaaagtttagtttagctaataaagcaacatcttcaatcctccacagtttattattctaaactagctaattttagatctagtggttaatatttatttagttataatatgattggtttcattatttttttttctttttaatttaggtgacttttttaaatgaaaaatacttttattatgcataaacttctgctaccaaacacggtaacaattcagttggaacaaactccaaactgaaactacaattaggatataacatacaagttataacaaatttttgaactaccatattcaacgatcgtttaacaaatagaacaaaaatatttctcaaataaaaaagtaataacttacaatctgtaataacatgactaaacaaagaaatcataaacaaattacttatcaaagcttgaataacacctaaacaatcagtctccaaaatgatattgtgttaatgtcgtcgcttgatccaactgagagcttcccttacactcatggcttcagcgaatagaaccaaaccatgataaaaaaaatagtgcacccttcaatgggaaaatcatgtaaatttctaatattgcatctacattccatgaaacccaatgaaaaaattgtcgtctgaagaaaaaattgtaaaacgtttccaatataagttttatgtagttgattgttgatatcataattataatcatgaatatatatgtatatagaaaaataactcttatctctcttaatcgataaatagagtcatatattagatgagagagaggagaatagagataaaattcttgacaaaactaaaagaaatggtagtaatcaaatcaagagttctaagtttatgtttttaaatatttttctaatattttgaaatagtgatgtttggtgtaatgtaattataatggtaaaataagtaaaataagtaaaatgagaattctattccattatatatatgtttatataatgtaacgagtacattgtaatcctattacattacctttaacaacaaccaaatatcgtaatgaataatttaatttcattatgttatccgtatttttggataactaatgagtaagctacaatgaattctcaatacagaaacaaggcaaattcactaggcccaaatgaatcatttggacaactcgtttacttggatggtcgaaaccggagacttgaagccggatccatcagaactatctttcaacgacagacctggagacctaaagccggatcaacctaagatcccttaaacagtgaacaagtatagatcgaagaaggatgcccataagaagcttctgagaacgaaatatgaaaaggcatctgataacaactagaattgcgaaaattgacccacatgatagaattctgacaagatcccaagaaagtagggggcatgtcctgtgtcaagtatttagaatgatattaagtaaaaaatatcaagtaaaaacttgaaaagtttataacaatatctaaaaaaaaataccaagattttacgttatagttattggtaacaataatatttaaccaattattagaggagtattaccatcaatctcttattataacatcttagtcaatttttgggcctaaaaacatatatcgaaatattttttttttaattt

SEQ ID NO: 265424 - DNA, 716 bp, Cannabis indica
tgaaaagtattattattaagttagaagagattttacaattctgagagagagaatatatcattaaatataggatgaaagttaactattcagttaaccttagttaacgttataatttttcattaaattatttaataaatgaaaaaaacaggtggcttaaacttgttggtgagacagggtggagacatgctttttgggacagaagattttttttcacttgagctagtctcaagtggtcatttatcattaatgatagactttaatatttcacttttttatttataatattgctattatttttgggagtttacccttaaagtggacatgagttggtacttcaaaaagctttataatttgaggtgtatcatgaataaaaatggtttgttcgcatgtcataaaggaaaattcaaggtaactaaattttacaactccttgctaaatacaagaagattggatataaccgagctctttggaactgtttgattgctcctatgtaatatctcagaaaataaaatgatatttaaataaatatattttattaaatatgtaattatgttggtaatgaagattatgatcttacttagggtaattaatgaggatttattaaataattatattcagcgtaattgattaattacggaggttatattaggatatgtgggtatcgaggataccacttttgaaataaaaatataatttgggcccgatgactgtgaaaa

SEQ ID NO: 265425 - DNA, 3163 bp, Cannabis indica
atgatgtgagagtttgtgtaagtctttttttgactactttgacaagtgacttaatgaaaatttttcattactaaaaaactaaaaaaaaaaaaaaaacaaaaaaacaaacatgtgaaagcacttcttaactgtaatcttattttctaattttaatctgatggattaataatatgaaaattttctaactaattaaagaatgttggtaaggttgagtacttaggtgcctgccaaattgttattcaatctataataattaaagaatgttgataattttaaaacccaaaattaatttctcaaatttactataaataaaaattattatttattttgaaataattaataattgattaattcttattaatctcttatttcactaggattataataaataatattttatactgatttaattttctttctctaatattgtttaagaataatatatattatatttaactaattaatatagttttattaaataaaactaaatagttaaatttaattattcaattcataattgatataactatttaaaataatggtgtacacaaaattattattttacccaaaaagaattatttctcatagaaattaattctttctccatttattttttaaattaaacattctcctatacagtgttgtatagagttgatttagggaccataacctatattttgaacctctaataaacacttgattattattagactctttaatagaattatccaatttattgattctatattactccactataaatatataattgcactctttgataatagaattatatttacagaattcttacttgtagtccattgatataattaatatacgtagttcgccctccaattagtagttcataacaaaagttggtcaaaattactgttttaaccttctaattatcttttgatttcttaagtactattgattcattgtgaacaacaaatctataatctagttatagatttcgattcaactgttagcactcccaaaactaacactataaggaaattaatatttgatcctttcagaaagcttggattctaatattgtataatatgttcttattcactcatgttattaagctcccaaaataaaagttttaagaatcatcttttctgagaaactttaacgagtgaatcaaagaactcaatgaacacaaaccaaagcaatccattgccagaaactgaaaattctatagctctatagggtcaaacttcttcccgagatttcactaactcgggatctttcaattgtgcatttctaataaccatttctaataggttagactggagtgttaagttattaagatttttaaccacaaactctataccatacttagtcatctctgttgctaattacgaaggagagatcaacttggtactgaatacatgcttgggaccttttctactgaaggcatttgctactacattagcttttccgagatgatacaaaatctcacaatcataatctttcactagtcccaaccaccgtctttatctcatatttaaatcttttttagtaaaaaaatatttgagactcttgtgatcagtgtagatttcacatttttatccatagagataatgcttacatatcttcaatgaaaacaccaatgtggctagttctaaatcatgagttgggtaacattgctaattgacgaaaagcataagcaatcatcctatcagcctgcattaaaacacaccccaaatcctatctggaggcatcacaataaataacaaatattttcttatctgatggcaaagctaacactagagttgtaattaattgttgcttcaatttttaaaaattggcttcacacttatctattcatacaaagttctgattctttcgagtcaattctattaagggtgtggaaatcttaaaaaatcattctacaaaacaacggtaatacctagccaaatcaaggaaacttttaacctttgtagcgattttaggtcttggtcagtctctagctgactcaattttcacgagatccaccttaatgttattcttactcacaatgtagcccaaaaaggccatttatgataacctgaattcacatatcttaaacttggcatataacttacgttctcttaatcgatgtataaccattcgtaaatgttgctcatgctctacttctgactgagagtatactaggatatcatcgataaacactacaacacttgtactaataaaattcttaaatactcagttcatgagatccatgaatgatgcaagagcattggttagcccaaatgacataactagaaattcatagtggccatacccggtatgaaatgtagcctttagaatatcttcctcttggcttctcaattgatgataacttgatcgaagatctattttaaagaatattattttcaagttgttcaaacaaatcatcaattctagtcagaaggtattttttcttgattgtaagtttgttcaattcccaataatcaataaacatgcgtaacgatctattatcccaaatgttggctacctaaggtggcacctcaacatggcaaaaagaaaaaaatacgttgaagacaggtcagcactaacctgccaggattagtgtcgtgcagtctcccagcctttgagatggctggacggtacacacaagcaaagagagatgtgcaaccctgccagtaagctctttgatggacctatagttggtcggtcaggagtgatagcttccaagcatcgggcagccttcaacaagcactacaataaatgtcacttttgccagcacatttttgtgctggcaaaagttggtattgcgttggtaaaatagaatttacttgtgatgtgttggcaaaaaggggttggcaaatcaatgttggtattagaacttttaccagcataaaatgaaaagcgcttgcaataatgactttgtaacgtccccgcttcaagcctccattgggcccttacacccacggactaatggctcttatacacgagttcgtcactctggctgcttcatggactgatgactgaccctacagaccaacacgagtgttttcagcatgctttgtcctcactcgcacgcttcctgggaaaacttcccaggaggtcacccatcctgaaattgctcccaagccaagcacgcttaactatggagttctttcgtgatgggctaccgaaaaacaagatgcac

SEQ ID NO: 265426 - DNA, 504 bp, Cannabis indica
ggaaaataataaataaaaagaagggaatgggtcaaaaattaaaatgaaaaatttgtgagagaaaacttataattttatataagtaaatagaagatcttccatcttctcttatctcataaaacatgagattagaatgtagattaaataattagagaaatttatcagtgatgagagttatggggctatatctcaaaattaattggtaatgagtgaagtaatgttcttatatatgactcaatatttttacgtttgattcatgtggaataatgttatcaattatcccccataaagatggtggttattttttggtacaaatcttgaattaccttatcacaagctgtgcaatttgctcacttatttcttttttgtttctcaagctagcgtatttgcactattctggatcttgtgcagctggctttactatctgaataggtgtggatcgaaagctcgctagtgatatgactctaataccataacaagaatcatggggttccatttcaaaac

SEQ ID NO: 265427 - DNA, 777 bp, Cannabis indica
agatcctggtaaaataaattccaacagcactaccggagaccgcctcccctgtacaaagacagctcccggagggatcctaataagagatgcgagtaccacaatgacattgggcacagcaccaatgaatgcaaaaatctcaaggacgagattgaaaacttgatccaattaggaaacctctatgagtggatcaagaactggttgccccatctcaacctgggtcaggcggatggagctttgccacaaggagcaccagggggtgcagcaggagtattggctacagttgttccccccggagatgcccagcatattcccagcctgccacctagacccaacgggagagtggctatgatatcgggaggacccaacatcggaggaactacccgcaaggaactgaaacgatacgcaggggccgtgaaacacgatgaggtttgggaagttactcaactcccagctcaaaggccccggctaatggatcagcccattacattcacggaagaagacgctaaaacagtgcgttttcctcaccatgacccgttggtcatagagacccccattgccaataagatcgtggctagagtcctgatcgacaatgggagttccgtgaatctactattcaaagaggccttcactgcaataggcctaacggaccgagacttttcaccaagtggttcccaactcacagggttcaatggaacaacacttatccctatgggaaaagtgaggctccaagtcaccttgtgtaacaccctaactagaataggcgtattacgtgatttt

SEQ ID NO: 265428 - DNA, 884 bp, Cannabis indica
cataacatgtatactaatcatcaaatcattatattagattgtctctaaaaaataatgtaatacacacatatattacatatatttgttcttatatgaaaaaaagaataaaaatcatattaaaaaaattggtaattttgttatatatagtgtggtgcggtttgaactgcaattattaaattcaaaaccgtaaactgcactgcactgcttgacaaaaatacaaaccacaactgcaccgcaaaagatttcaaagcgtatattttatccggtgtggtgcggtgcgaacggtttgtgcagtgtgaatagtttgataaatacccctactcccaaagttgagcaaaagtaataattctctttttattttattttttttttaaaaaatgtaatatatgtactattttaaacaaataatacatgaatgaataaaattatatataataatagtacttatacaagattttgtaaaaaataatactcataatcatacacacaaaaaaaaattataatatattattaatattttaatgtatttaattaaaaacgttattaataattttgcaaataaatcattattaattattaattgataaattgaaaatatggtaatacaatataaaactaaataaagaatatgtacactatagtattgatacaatatgctcatacaatatatatatagaatattatatatacattattttaaattaaaataaaataagtagaagatacagactttatgtaaagaccgcatatgattaataccttgaattattaaataattaaggtttatgtatgagattttattattattaataataacacaattatgagaatttatttgagttcgtatatatttattatgctatctatgtgaatttctcaatttc

SEQ ID NO: 265429 - DNA, 964 bp, Cannabis indica
atatatttttatctcacataagaatgttcagtcagcagagttgtaaacatactctgttaattatgcttttaacgagttattccatttcaagtgtaattatgattacctgtctgagttcttattttacctagcttgacatgtgtcatcctctgatatgctagccaaatttcaggtataacaatacatataaattaatagctagtagatacaagtatgtactgttattactgtttggttttgtaaatacaagtcggactttttgacacgatatgaaattggtacgagcttaaaagatacgaatacgactaggcacaaaaaaatatgagcctagacacaatacgacacgatagtataaattgacacgacacaacacaaaaaatatattcttaagcatgatacgatatgagaagtacgaaatgcacgatacgtaagcatgaatagactaacctaaaaaatacgacacacgacaagcctataaagcacaacacgccatattaaaaatcttataatatattaaataaaaataataagatatgagtttattaattataaataaattaaaataataatacattaaatataatactgaatattataattctataattaaaactattaaaatataaaaaattaagattatatattaattaatttataatgtgttataaaaatttgagtatttataagtaagtattcaaattcatgttaaattttttttaagattttttcatttatacttttataattgattttttattcatttataaaaatagatctaacataaccttgaaatggaacagcataacctcaaaatagatttttttttataaaattgacatagtataacctcaaaatagacagcataacctcaaaatagacagcataacctcaaaatacaaatagtttttaataaaaataaaaaaaaatagtaaaagtagaagaaaaaactaaaaaaatagcaagt

SEQ ID NO: 265430 - DNA, 761 bp, Cannabis indica
aatagtcacctatgatgttttagcaaaccttcaccaatccaagcatcaaacttttcctcaatttcaggaaagacgggatcaacaaatgtatcgttaagagcgtaaaggcccttcacataagtaaccatcttaaaatccatctcatctcctcctgattgagaacctgatgacattagctccattggagtgctcctcacatcaatcgacccaaaatcaacaaaagacaatttcaatgccggtgcacgctttctcttatccaaaagaggagtatcaaaaacagtgtcattaactcttcatcaaaaggaatgacaactgtcttttcaatagcaacacttggattggattctgggacctgaaaaataaaaatggaaaatcagaaaaagaaaaagttgcaaaacaaacataaaattgtcaagcaactaaaataaaacatattttactaacaaagaatttaaactacacttacattgattttaccaacagcctctaaaccagccaacataacttgctcatcatcaattttaaattggcttaaaccattaaaaaatcaccccctttaaactagattctttggccttaacattctcaacatccttagccctctcttcattgcgtgcaacaccctcagattgattcacatcagcagcaagaacatcactaacaaccttatcaactttagcagcatcactaccatctttacccaactcatcaccatcatcggagtcggaatcaatattctctggatcaggtaatcccttgtc

SEQ ID NO: 265431 - DNA, 2308 bp, Cannabis indica
tcaaactcccactttgggttcaagttcataacactcccttcctcaaaatatctcaacaacttgctgaacttgtttcaacaagccttgggcatctcctggaaatctaccgaccctctcaaagaaacctgggggccctacttttgcattagggtcatgatggatgttgctcttcctctgcctaggggaattcctatcaattttgttggcattaacaaaattgtttggctcgagctaaagtatgagaatgttcatgacataaatttcttctgtggatgtatgggacatagctacaataacgactgcatggactacatgaaggcatgtgatgaagcaccactaccactgtacctcaggtatgatagcaaaaccatcactggtaaagttaaagtttcaactaatcctctactgtcttgtccagaacagataaactttgccaaccctctgttgcaaccttcatgacatcaaacctaaccagcaatgtttgtgtctcgctccccaaaaccataccttcaattccaccacaacttccaactgaaccaccagtagcttcggagcaatcccaacttgttggcctccacaggtcagaacactcaggccaactatcaaaaaataccctttggaccaacaaaatatcccaaggccaagaaactaccaacccaacaccattgaaccccccacgaactttcaccgctctactcaatgccatcatgagcaacatcagtgagcaacaaaccgtgaaaacaataaccctaaccctgtcaaacacctcccaaagttccagcagttccaaatccactagctcaaagtactgccaccttcccttaccaaccaacatacccctcctcgacacaagcacaaacccgaagctctcaccccttaccttccaacctgggctaaccactcccacaggccccgaaatctccaaaagaaaacaatcctctaaaggcaaataaagtttcaaaaggcaggcagaagtgatcaatggtgaaactcgacaactgatcaaacatacctgattggagaaccctgctgaaatagaaatcattttcttagaggcaggtcctgcagatgtgcaagccagcctacagccatgaagatccttagctggaaattacgtgtcattgggagtgatcgtgcattccgtaacctctcccgtcttatatataattgtaatcctaatattttatttcttatggaaactagacttgctaggggtgctttggactttaataaacttaattttcattttgcttatggtttggaagtccttagattaggtacaggaggagggctcctcttattttggaacaatgatgttgttttaactttattatctcaatctatgaatcattttgactattatgtctcgtcctcaatagatagtttttctccttttcacctcacctgtttcaatggttcccccattgaggcccataaaatccacacttggaaaaaaatttataggattggtgacaataaccctatcgatctttggattatcatgggggattttaatgccatacttaccttggatgacaaaattggaggtaaccccgaaaagggaccatcaaacagctttaaacagtttcttgaccaatttaatttgtcccccgttgatctgattggccctactcttacttggtataaccacagttccaataggaaaaacatccaggagcgtttagattggtgtattgttaatgcacccttggcgaataattttcctaaggcttgccttcatcaccaagattttttggttcagatcatcgtgcccttctatttgactctcatggaatgtctttccaaccctctcaccataacaccaaatgttttctctttgaaaatgtttggctcactgatcctaattggaccaagaccgtgaattccttttgggcaagtcaaggtgttaattcttgttccatctccaatcttgtggccatccaatctgcatgtggcaacgcctcaatgattgtaaccacaagtcaggtttctaattcaagcagcgaataagtactcttgaaaaaagaacttgacaacattaggagcagctataattgggatgacaacactgtctaaagaataaaaactctccagtcccatcttgatagacttctttttaacgaagagacctattggaagcaaagggcgagaacccaatgtctttcccaaggagataaaaataccaagtttttccatcgtcatgcctcgtctagaaagaaatcaaacaacatttataaacttgaaaaggacaatggaaccactgttacttccttggaagacatcactaaggaaattgagcgctattttt

SEQ ID NO: 265432 - DNA, 509 bp, Cannabis indica
attttattttagattatattttcataaaaatagaatataccatatgtatttagatttttaaattattattttgtacattaaaatattaattgtatatattatcttttttggaatattatataaatatgtgtgaattagatttgatcggttagtacatatcaatcaacatctaattttccagtctaattaaatctataaagtgtagatttctacactttacaaattagatattttatgaacacccttaaatatattcaagaatttcacatttcatttccttttttatagtatctaaaaaatctaattaaaagctaataataaaaaagataaggggaattttaaaaaatatccttcttttatgttttatttacaattttaccacctaaaatttttaattacaaaattctcttataaagttttaaaattataaaaatacactttgtttaagaaaaaagtaaaaaaaaaaaaaaaaaaaaaaacaaacgtaaaatcaatctcacgataactat

SEQ ID NO: 265433 - DNA, 1203 bp, Cannabis indica
  modified_base (1127)..(1127): a, c, t, g, unknown or other
aaatatatatttaaattaaatatgcgatactatatatatcaattaacaaataatgtataataattataaaactcgacatgtacgaacacgataaacagacaaacaaggctagtctaattagtgttaaaattaattgacacaaaatataaacaacttcagctaaaattaaccaataataggcacgccaacctaaataatacaaaaacacataatgacacaaattacaactcctaccacaatatttctttagacaatatattcttagtgtgagatgactttataatccaattattattttatattcattaatattggatgcttgatagtacttatatatatatgcaatggtttggtatgagcaccattatatcacaatatggatatttgtgatatttttattttgtaagatgagatatttgataaaagtatattttgtttttgtttttgtaaaaagaatgatattttatttttgagtgcaacatacaaaagcattattttcattatagaagaagtaaagaaggggccgtatactttagacaacacaaattgaaaagtaaaaggaacaaagagaaaagaaatgtagcaaaatccatcttaaatataaattattattattattaataaatatagaaagatagatttgaaatatgtatggcataaacaaagtatcccatgaaattaatatattttataagaaaaagaaaaaagaagtcaaaaaagagaaaacgaactgactaggaggccatgcgtgtggatcaaatgtgttttagaaattgaaaacaaaactaaaatatatattataattatagaatatatagatatagtcttcttcttcatttgtttcattactaagttacatatccatgtcggtatccattacaaagaagaaaaaatatctcggtactatgctttttctatacgttgtcgtttttcttaaatgtttatcatattttgtaatactgccgttttcaaaataaactgtcgtttgaaaatattattgaaaaaaacaggacaacaaatttttttattccctgaaataacactagtagattcttgcctcctgaattattttacttggcaaacttgtaaatttctgtctctcttgttcaaaaaactaactgtttgcntgacgtggttagttaaaaaaatattttataatatttttatgagttaatacaattttagacattgtgttttgaaaaa

SEQ ID NO: 265434 - DNA, 730 bp, Cannabis indica
tatttgctttctcttcctgtaaacttttattaagcatttaatattaatttttttttctttttcttaaatcgttttctctcttctgtgaacattcaatatcatttcattggctatttcattccactaaaagagtaacttccacatttatatatacactacattaatttatatagtatattcataattttcttacactatattcataattttttaaatattaaaaaataattctttctctttttcattttttaagaaaagtttaaaaaaattttttggttacatcgataattatttgagctcaaattttatatcaccacatctactttttaagaggattattttaacatatgagaagcatatatttcattaccgttgtccgaaaaaataattaaaatcagatgtaacattttagttcctttactagaaaattgaatttttaaatatcaactaatttctaaaataacttataagaaaccaaatatttaaacatgacttcttctctgctgtataaaatgtgttggtgttacttatttatagtaaatttatttagatactagaaattttttttaatatgaaatatatatatatatatcactacaaaaaaattgttactttagtgacaattttttagtcacaacataattttttgtgactaaatgtgattttagtcacaacaaaatcttacttatgactaaaacatagtatttagttacaagttgtcactaattag

SEQ ID NO: 265435 - DNA, 1252 bp, Cannabis indica
ggaacgacctctcgtatgaaccatggttagggttagggtttgaaaaagattctagaatgagagagagaacagggtttcatctgataccatattaggatattaaggaaaaatatatttctgattacccaataaaataagaaaaagtggtatttatacaaagtaggtaaaaacctaaacaaagacccaaaataaaaatcaacccaatataagcccaatcctaatagattggaatgcttagtgagaagtcttagttatttttaggatgtttacatatttgtgtttttatatgtaaaaagtatttattcatataatataaacgtaatattagtaaattaatagttatagtagaaattacaaatttgatgagtttttatacattttgtgtaataatataacttcttttttttttttttttactaaaaatgttattttatgaaaaagttgaagaaaaggtataaaatatgagaaaatcaggtaaaagtaatcaggtatcttatactatttttttccatatttttttttttaaatttttctctaaaattattcatgtaacataattttttttttaggggtgttcataaaaaccgaaaaaccaaaaccgaccagactgtaaccgaattttcggttccacgtcatcaccgaatttagcggtcggtttcagtttcggttttttttgacgtggcggttggtttcaatttttgaaataaaaaaatagtttaaccaaaaaaccgtcgaaatcgcccaaaaccgtctaaaactgcctaaaactgccaaaccgaaaaccgccaaaaaccgtacggtcagttttatacggttataatttataaacggtcagttacggttttcgtaaaataaaaatcgtaaccgatcggtcggttataaaattgtaaaaaccgaccataaccgaccgattttcacccctaatttttttaaggaaattcatacttttacaaacttatatttcaaaaactataaaaatgagaattccccaacttatatcataatttaaaaatagggaaatttgcggcaaaagtccccaaatagttcacgttgatgcagattaatctccaagctccaaaaatagcggcaatagtcctcaaggtcacactttttatttgtccgttcgtcctaattttaactgagccgttttctttttttaaattgccacgtgtcaaaatattattggtccaaattattattttaattttaaaaaataaaaataaaaataaataaataatttctttttcttttt

SEQ ID NO: 265436 - DNA, 995 bp, Cannabis indica
tcaagtctgtgtgtattgacagaaagatactgatatcacaaaggtgaggcactttcacgcacaaagcatgggggtacaagtcctttcatcagacctagtttctctagtctcaaaaacagtcattatattcaactaggagtgctactgggtccctactaacatgtatatggtggtcccccacatcagtccctatctcgtggaaatggcgcctctgctcctaccagaggtggtcctgctggtcgaggaagtggtccccctggctttggccgtggttcaaacaccaattatggacagaaagttcagtgccaactctgtcacaagctttgtcacactatcaaacagtgtttctatcgatttgacaaaactttcacatgccctgaatccttcaacaatttccctactactacaaatgttgctgaaatgcaagccttgtatgccacatctgaatttgtctgtgatgaaaactggtatcctgatactggtgctattttaattaacttaattaagctcaagctcattaatctttaatggacaaatcgaactgaaactttagctaatcttattatgtgatataaaaagcaatatgttcaatgatgagattatacaaaactaaacaacaattaaatagaagtggaataataaaagtaggtcatggattatgttggggaggaggtcacggattttacaaactggtttggagatttattgacaaaaaaccagatagaagtggtggaagaagcagcaatggttgcttggcgtatatggatggcccgtaatgatatcctttggaataataaaagtattaaagcttttgatgtggttaaattggctaggactaatcttgttagttggagaaatgctcaaaatcaaagatcagatctattacttaatgtcaattatagtaatgatacagagcattggagaaagccagttgttcataaatacaagatcaatgttgatggcgctatttttgaagctgaaaatcgttttggtgt

SEQ ID NO: 265437 - DNA, 606 bp, Cannabis indica
agatgaatgaggttccatcccaaaaccaattggcaatgggaggagtatcccattcatcttatatatcacaatttatttccacacattagcaacgtgggactaactcttaacacaccctcctcacgtttgggcctggaaagcgtggatataacgaacgacctttaagagaccacaggaccgaacgtgacatttgaaagaatcccacaaggccaaatatcgggaaatttgtgggtgtacacgtcgagaaatttgtggattttgaaacaggtcaaagacccaacattgaaaattggcacacattggccgaaaggtcccaaatggaggttaaaggggagacagcagaagtatctgtttggaccggcgacacaacggatcacaagtggctttgataccatgttagaatttgaggaataagattaatgaggttccatcacacaaccaattggctatgagtggagtagcccatgttcttatatatggctcaatacttttacatttaatccatgtaggacaatgttctccaatatcccccctcaagatggtggctatttttgttgactaatcttgaatcaccttatcacaggccctgccatttgctcgcttatt

SEQ ID NO: 265438 - DNA, 529 bp, Cannabis indica
caataaagcgtagaaactttcccaatctaactccaaagaagcactttaagggatttagtttcatgttgtacttcctggggactttcatgcattcgtccagatcatctatgtgccccccagccttcctggatttgacgagcatgtcatccacatatacttccatgtttcgtccgatctggtctttaaacatcttgtttaccaatcttttgtatgtggctccagcatttttgagaccaaatggcatgactttgtagcaatatagacccatatctattcgaaaacttgtatgttcttggtgcggtggatgcattttgatttgattgtaccccgaataagcgtccatgaagcttaatattttatgcccagctgttgcgtccacaagctgatcgattcttggaagtggaaaacagttcttggggcattccttattgaggtctgtgtaatcaatacaaactcgtcattttttgttcggcttgggtaccagtacgggattagcaacccaagccaggtagaaagcttcaattatgaa

SEQ ID NO: 265439 - DNA, 853 bp, Cannabis indica
aaatgtaaaagatatacccattatttgcattccattaccttttttttgttttcttttttcttttttaatgaaaaaggtaaattatgcatgtaagctctttagataagtcctgttgtcttatctgggtcagttcttggtttgctaattcttattacctcaactccagccatgtactctgcataaaattctacaccctcttcagatatgtagcactcaattccacagatgcttctggtcgatagtggttacgcacataacttttaagtacgtaccttcatatttctttcaaatggatacatccatctcgcccaaaccagcctacacaaccttgcttcttgttagaatattagctgtatattagttgtaaaaattagggtaacttgtatttagtaatttcctattttgtaattagtagtttgccatttagtctcctagctttgtatataaatatatattattctatgaaatacacacacaattcgattcactattttatacatggtattagaactttgtgattcgaaattcgaaatttaaaattagggttcataaaaaaaagaagagattagggttctttttcaaaaatcttatttggagtgcgaatttattctcaccgcccactcaggagtgttgccttgccgccgatctaccaaaccccgaagttcagtcgccggattcctcgcgcgtggggctcacgcgccgcctgaagtttttgcgtgttttcccacacgtcggggcgtggaggggcgtgtgatggtgttcttttgccagttctttactctgttcctctaagcccactcgcatctgtttaaggttgtaatttagtatttttttctgccttcttcgtgtttgg

SEQ ID NO: 265440 - DNA, 776 bp, Cannabis indica
ggttcccaaaatttccccaaccggcaaaccgattcccaaccggaattccagttctacaaggtttcctgggagtcaaccggaattccggttcctacaggccgttctgaaccggaattccagttcagtgcaggaaagaccaaaatttccacaactccaccaaattaactccaatccacatgaaaccttccagacctgttctatacaacctagagaacattttccaagcaacaaaacacagttacaagcactagagcaaaacttgacattaatgagccaagcttgagttctaaaactcaaagcttgctcaaacattaaaccagccaacacaacaagcctaaaacaacatatccaagcataattcatccattgaaaacaacaacaaacactagcagcaactacagtaactaaaatcccaaaacatccataattcatttcttcaaaaacaagaaatcaaagagggagctacaagagactttaccttggcttggatacacttgaaactagctagagatcacttagaattgctgaagaaaaactcaaaccatagcagccctaggaatttcgagaaagagagagaaagagaaagagagagaaaatggcttccttttcttaagagttttctatttttccttcttttagtaaatgagatacaatttgattattaaatattacagcctacaaagtttaaagaaacttaatatatcacttaataaacttcacaaaaggacaaaatacaccatgggcgaaaagaccaaaatgcccttgtcctcacaaaa

SEQ ID NO: 265441 - DNA, 599 bp, Cannabis indica
gctggtgtgctagaggttgatgccattacaaagctgacagctcaggttgaggccttaacaaagttaatcgcagggaaagctaaacaagcccaagttgtttgtgagatatgtggaggtccccatcacttttctgagtgtcaggcagatgtggatgatttgccaatggatgaagcaaaagccattggaaattattcgcagaacaacaacaacaattatgggttcaaccaaggtggtaaccgaaggaacagtgggttctatcagcaaagaaatcacagaaccaacagtatactcagcaacaaagctctagtggaaattctagtttgcagaccgatttattgttacaattcatgactgaaactagatcttccattaaagatttgaagactcaaatggggaagctagcaacccaggaagcaacccgtcctcaaggaaatttgcctagtacaactgaagttaatcctaaggaaaactacaaggcaattactgttgggttttatgccctaaataaaactccatttcaatgtagtctattttattcaacgtcaataaagaaacaaaagtatttttcattcatttgtgtatgttttggttcactttat

SEQ ID NO: 265442 - DNA, 714 bp, Cannabis indica
atgactagcccctggcccttcgcggtgtgggggatagatctcatcaggtctttaccaacaggaaagggaggggtagtatgctatcgtggccgtggactatttcacaaattggacagagggcgagcctatgaagaccatgactgctaaaaaagcattagactttgttatcaaaaacatagtgtgtcgatacggcttgcctcataaaatcgtctcagacaatggaaagcagtttgactgcgaagaattcaccaacttctgcaaccaacactgagtcattaaaagcttttatacggtagcaaggccacaaacaaatggacaagcagaagctatcaataaaatcctaaaggtcaccctaaagaagtagttgctggtctccaagaataactggcctgaagaatttcctaaagtattatgggcctaccggaccacaccaagaaccacaaccaggcactcgccattctcaatggcatacgattgtgaagctgttgtgccggtggaaaccttgttcccatcccacaggagaacgacatatgatccggtaacaaaaaaagttttattggaagaagcacttgatcaaattgacgaactccgggatgagtctcaagtgtggatggtagcttatcaaagaaaggtggctaaacacttcaacgacaaagtcaaagatagaaaatttactattggtgatctagtcttaagaagagtcttcccagccac

SEQ ID NO: 265443 - DNA, 6268 bp, Cannabis indica
tttggaaattaaagtttatgttgtaaaataattcaaaacgagtttgtaaatattttgaaaacaggaggaccccgtagtctatatcacttatcttttgttaaaaagttttaaaagttgaattttaattatcaaaatttgattacccacacttttcagtataattacatattatataaatcagagaattttattaaattgcacacacgtagcgtctctgttgaacagggcgttacaacacatatatgggtagtgagagaattattcaaattctcatcttgatatataacgtgtggtaattctttaggagataaatggagttaaaaattaaaagacataagcctagtctaagcctagcctacacgtcgggaggagagatcattttttctcttaacaaaacttaaacaaagttatatacataaacaatagaaagggcattacgtgagatcaggtagcattttcagtgttaagaagcttactccaaagaccaagttagtgagttatacatacataacactttttcctcagcctcttaacttcaatttgatcaattgttacttgctattatataatttggctgaattatttattacttccataggttacaaataagaagtaccactcatcattttttatactcgctcaacgaagccaagactcttacatccttatttctacttgttaagctccaaagtggtagccatcttccattattattctatttgttctgacttgtttcctcacacaaagccaaaatagctctccactttcacgctctctctatctctctcgtccttattgtctatcatagccaaagtcaccatctccatcatccttttatatcttccatagttttgatatccatataatcaaatacactataatcattctctctctctctctcatatataaatatatatatatatatctttcattatattaccacactatcatttcacgttcaaattttaatactcaattggatttcattagaaactaaggtatatcattttataattttgaatttataaattaacgattaacatatcatgtatatatatttatatgtaatatacatacacacaccactacattatattctaaaaaaattaggaatttcataagacaataattggctcaagagtcactcccgcaatcaagttaaattcttcacattcgagatattaaaattaagtaaaagcttttaagtttttagtatgaaataatgttcaaaaaagaagtgggacgaggtataagacttcagctatatttttgtttgttcattattatgttatgttgtttgaataatggtcggtactaagaattcacattatctaaacaatagatatgtatatgtggtttgaataatggtcggtgtaatggatgcacgttatttaaactagttttattgtttgaatagtggacaacacgtaggatacacattatttaaataaagttatgattataatatgctatgctatttaaataatgtatagtggttagacattatttaaattagatagattataacttatgtgtcatggtttgaccagaaagataatgactgaatacttgaatgttgggtctaaatggtagatagggagccatttagtagtgggtacgattatactgaacccatccctctgccatgtagttcaatagttcaagtttatttgccaaagtcgaactcggacggaacccttttatgtggtttagtgtagatactagttactagtgataagattaagtttatatatttttaatagtctgcaaatgtgcatgtacattctcgttgtgtttatttttatttatgtgactacgtgagacacatttccttactgagtttagtaactcactcttatcaaacttatcatgcgcaaaccaaggtaacttaagtctagttgcccggtggcgagtagaactttagatgcttgtgtgtgtgaactcgctgaaagccttaaaactacaggtggtctaggacgctctgttttatttatttacgttattaaattagtgtcacaattattttattaattatttattttatcttttgtacgaaaaactagccatttacgaatattttcaagtacaaaaataaaaaggtcacattatgattttccacgtttaacacttgtaaataaagatagtatttttataaaaaaaaaatgtatggccatcatagctccacctagagttatagtcctggatggaccccagggatcaaagcgtatgtagtccaaagtgcctttggcgttgtgaattctagtactaaatttcacccttgttgcaatcccaagggcacgctactcacaaaagtttagatcatgcactgtgttcttcccaagcagaccttgtttgtctaagatttccaagcctttcatacttacatgcccaagtctcatgtgccacaattcatgatagccttagatgctacaactacttgctctttcagtgttccctgcagtacataaacttcattgatcattgcactttttatttcaaccattgacccttttagaatcttcatgacactattttctacctttgccaaatagagactcaattactgaggtagaagatggggaaagttcaagtgatgagatcactaaagaattagggggtaatagatgacactgaagatcttcgaaataatcaacttgttgacttggtacattatgcactaaacatcacaaatttcaactatgatgaaccaaggacatatgttgaagctatgaagagtgatgacaagcaagaatgggataatgccatgatgaatgaagaggttgtgtcactgaaaaaaaaaaaatgagacctagattttggtgagaaaagaattatagggtgcaagtgggtcttcaagcacaaggaaaacataccaggggtagaaagatcaaggtttaacgctacatgtgtggtaaaggaatacacacaaagggaaggaattgatattacatcgatatcctctcttgtagtgaagcataccaccattcgagtgttgttagcaataaatacaatgaaatacctaaacttggagcagttagatgtcaagactttctttctacatggtgacttgaataaggaaattctaatgaagaaatcagagggttttaaggagaaagggaagtaagactatgtttctctactcaagaaggctttatatggcctaaagtaatcaccaaggcaatgatacaagaggtttgatgactttgtcatcaaatctgaattcaaaaggagtgcctataattgttttttctttgtcaaggttgcagatgtaaagtctattgtctacttcctattttatgttgatgacgtattagttgcaagcaagaaaaggtaagaggtggacaaagtaaagtcaatgttgaacaaggaatttaaaatgaagaatcttggtccagctaagaaaattcttgaaatttagatagttagtgatagaaaacataagatgttactggttacacagagtggttacatcactgaggtgctaaagatgtttgtttttgacaatcccaaatacgtatcaactccaatatttgcccaacatttcaaactctcgatcactcaaagcgtaaagattgcaaaggatatgaaatacatgaaaaatatcccatatagcagtgtggtggatagaatcatgaacattatgattcgcactacactagatttatgtcatggaatgagtgtgatcaacaggtatgtgagataaccaggaagactgggaggctatcaaataatgatgaggtacctaaaggaaacttcaaatcttggattagtttattgctctaatactaagaaatttgaagtgttagggtatgtagactcaagttatgcatgtgatttagatacaagaatgtctcaaactagttttgcattcaaaatgagtgattccacaataagttggaacgcgaagcttcagccaacaatggccttggccaccacgaatgccaaatacatggcttgtatagaagccatcaaggaagcactttggctaaaaggattaactagagaacttggtgtaaactagagctctattatagtgtttagtgatagccaaagtgcattgcacttaagtaaaaactaggtgttccatgagagaactaaacatactgatatcagactacactttataagagatgtcatagcaaatggtaaggtgaaactagagaaagtcttaacagcggagaatccatctaacatgctacaaaatcccagccataagtcaaattcaatcactgcctcaagcttctttaagtggacactcaggactacactttaactactcatggctcatgaagatcatatgtgcaaggattataattcaaagtagagaatttttaatgttatgacccctaatccaagctggcattctgttatgtgaatttgtaaagtaacactttttttttcttctcttttatttgttcattcaaataagatttgtgaatttggatcaagttcaagcaattctccaaaaaggtgtaaagcactataattattgtagtgtatagttatcaatacattttaatatcaagtctcatataattttttttgaatcaagtctcatataatttaatttaataaataatataaaaaattattaattaattataatacgacatatgtactataattattaattataatttaatttttaattattaattaattatgctccttaaaatacctaaacctaataacaatactataagttgtaaacttgattatatattcgattgaatattgctatctctaacattatgagatgctcaagaccacttgatattatattggtcttgaaatgttttcttattataaagtaaaatatctataatgtatatcatattagacaccatatgatggatatttatttatattttttttttaaagtctttatatttaataaaagataggggtggtgctttctgagaggtgccaactagaaacagggtaaccgtttgacattattgaatgtctcacaatattatggctttaaaatttagttaggcaaatgacaatggcgtatgaaggtgcaacgaaagccatgtggacatcttcaaatcaaactctcatattcatttttgcctagtcttcgcccctaattccgaatccattttatacttttcaagctatttaacttaggaaaccagttatattatactaattatacatatagtcaacagtcaataccgatcttttatattgtatttagactttaatcaaaaggaatctctcattttgaaactttcaagagttacaatataaaatagatagtcacatgctttttattttttattttttttattggtaccatgcattttatatgtacccttctctttttgattatatatgtgccaccgttttattagtgatttgacaagtttggttaatggttggttatggagataaaccatttcaatcttaatcttatttgatttataattttgatataaattaaatacattttatttctcaatatatctctatcaacgtgatttatcaacctataacatgtttctcaaattgtaacttgtttatccacaaacgtgatttgtcacttatcaacataactatatgatattttaagaaataatgaagaagaaaagaaaatataattttacactattaaaatcctaaaaaaggcctgtttcaaataaaaaaaaatatcctaaaaagggtgatttcctttgataaatttatcaatgttgtatattgtttgcggtcattttatcaaggtaattgaatataggaatgatttcttgtttaagactgaactaaacttcttttcaaattttgggattggcaattaaggaaaagcctaaactgtggtgcaatctaacgaaattatattcttaaggactttttttttgagaaaattattgttaaggcctgttgcttcaataacattcaacatatttattaattgaaaatttctaggtttatattattattatttttttttattaaggttatacgtatggtacattcttaatgtgtattatgaataggtaaactttagtttttaagcttaattttttttatctaattagtttaacctctcatttttatattatatgggttagggttattctatcggctaaaaaaaaaacttataaaaaaaattaatagaaaaaaaattagagtttacttaaatatgttgtatgtaaatatttttttattgtaagtatattttttttaagttaagtagctaaactattagcataaatattaaaaattttagttctgttattctttatattggatgaaaatctaataa

SEQ ID NO: 265444 - DNA, 607 bp, Cannabis indica
gtgaaagctatgatgggctaacgtcatcgaaaggaaaactaattattttaaaaagggtatgataaaacggcataattttgatttatattagacccaccatatttttagaattaaattgtaatttacgtacttgggtgtaaattaccctacttttctataggtggtggaacctctctcctattcctctctctctatatatattttggtctatgctggtgagtggtgactgagagtacgcccacactagtgtaatatgtaaataccaaaatacaaaataccaaattactttattatactgcacaaaaaagggtacattccacatatccaatctaattgagagccaaattgtcatacttactaccttcacatgatttcatataattaatacactcaaacccaatctaagcattatcatcaaagtaataagtcttctctcatcaaaacaacaaaaaaaaaaatcttttaaagcataaaaacacttcgcccctctcgatcactaaactctctacccacttgcttcattacatagttgatttttttaaattaaggtgtgctttgctaacatttttttaatcagttttgtctttttgaaattgaaaaagtaaaa

SEQ ID NO: 265445 - DNA, 1401 bp, Cannabis indica
attttagactatttaaagttttttttaaaaaaaataagacggagagtaaagagcaaaacagaatagcaattttagagagttttttacctaaaaatatttaattttgtagaggttaataggtaataaaaatgtataagtttaagtaaggttttgctgtttaatagtttttttttaaaaattaagtcaactagtagcttaaatttttgtaaatttcttttcatttatttattttatttatatatttattttgaaagacatgaaaataagacattcaattaaacaagatattatgttgtatttgaaagatggaagatctattaatatgctcacaatagtagggtagttgccagatagacatattatccatatcgaatagacaataaattttgttttgtaatttttttaaacaaatcaattaataaaaatagtaaaacttataatctcaaattatcacacatgttattgttcaaaaataaaaaaaaaaatatatcactcatgttacacagttacaatccaccatttttataacatttgaagctgtaaacactccatggtatgggagagattatattattcaatacaaataaatgccactaacttgtccaattcatcatctaagaacatttattgtaccattaaattccaatacagccgactaataactaatatttcggttgaagatatttcttcttttcttttccctattattggttctctccttacatataaatttatgcgtgcacattttagtcaattcaatacaccaagcactaacggtgtctaccattaaaatgtggtctatacaaatgtttttattaaattatataaaattaaatatgtactaataataatatgacatgtcaaaaaatattattagtgttttttaacatttctcatattttatatttataataaaaatagaaattgaaataataaagaagatattaccttaataaaagcattttacatgtttgactaatatttttggaggatatcaaatataatacagttaactaagatgatgtagagatcaatatcataatcaaaataagagatttaaagttataataactaagcttaagagggatattagaaagaaaaagaggaaaaaaaatagtataaagagcaagagaaaaatatgataatcatgagaatgaagatggcatatactatatatatacatacatgggaaaaatgtaactgcaaaaaattaaagtaaaaacatttattgtaattaatattaatattcatatataagttttattattaatagctttggcttttcaacttatatacattttcattataattatgagaaacagagaaaaacagggaagaagcaagaagaagatgattcttgtattatgcttatctgtagaaaaatgtttacagtaccatgac

SEQ ID NO: 265446 - DNA, 495 bp, Cannabis indica
ttcttccctataaatttctcaagatcgaactttgtgcttcccatttcttctcctccaattcactaggttcttgatgatcaatccaagatccaacttcgaactcccaagctctgattccaaatgttgcacaaattcacaatcggttcagcatcatcaaaacacccaagaatgaatgaatctaagatgttacacttcaaccataacacttatacacacacacacagtagaaagaatgagcaatgctttgttattcgattatacaaattaaatggtgtccggccaattacagtcatgcctaaggtgctaagtcacaagttattttatagtacgagaacaaggacattacaagtaaatggctaatactaacaataacggtcagtgatgaactgaccatgactaaccaatggacaaaggacacctaaattaattaactaacaactaaccacctcttctaactatcaggacattagataggcaaaaccagttatttaacac

SEQ ID NO: 265447 - DNA, 1265 bp, Cannabis indica
acaccagagtaagacacatgacaactgcaatgaaagtggcaactatcacatttcccagccactcaggagtgctaccaggattcctgcaaacacagagatgtacaacaaagtttcgctatcaaaaaattgattttgagtgtttattgtttattgtgtttcaacaaaagtacagctataattacctatcaaatcgaacccaagttgcaatcaatgtgtcgaccaaccgaataaaattaccagcagataataatattggtacaaccaagcccatcacgagagtagccagtttgagtggcctaggtaatcgagctgggcttagagtggcttcaagcagcccatctgaagattacagtagagcaaattgattaagatgtgtttagatcaaaacatagagtttgatgtactatattttcttataacaaaacaaatgttattgatcaaaaccaaagtaagatacttgtaaatctaaacatacatgcaaatgcgggtggaaccagccaaacaagagccagataagtggaaccaattttatagtagtttcccagaatgagaagaacaagccactgaacggatccagctttgtagagccacctttcagcatcaaacttgactacatcagcttgaattattggagagagctgccttctcttggaatatacttttgacaaatatttttggagaataagataaccaatatattgaccaatcaatgctccaacaagagctggtgctgcaaatagcccaaacaccaaccatgggctcgcaatatagggtgttggggatgaggataaaaagggtagagtgaaagcaacaagaacagctaaaccaactgcaaaaatccacgtaaggatgatactcaaacttgacaaggcaagtgaaattgcagccggaaaaccaccaacaatcaaagatgtaacccaaatcagaagtgattgcattatcactgaattattaagtaaatttgagaagtgttgtctgaatacgatcatatatgtcccctgagaaagaaacaagtattagaactacactgacttttgaaaaaggtgttagaaacacgttgtaaaatttctgaaggtatagcagtttgtgtattgtaagtttgtaactataccaaaatgtcaaaatatatggctctgttttgcccagcattttcctcagcttccactgcactggattttgaaaggtcagaagatctagcaatctgaagcagaaaagcaagcatattttctccaagatgttgaagagatcctggtttcaggagttca

SEQ ID NO: 265448 - DNA, 1505 bp, Cannabis indica
ctcagaaactcatatcatattagtcttgtgttatgacatagtcttgttatatttttttatttattatttaaataatagggttattatttcttaatttttattggaagattattgactgatattcattggtaggtggattctgtcaaatgttcatttcattagtaggtggactctatcagatattcatttggtttgaaaacttagcatataccacacttctttgatgtttaatcactggcggtgtattggacctttaattgatgctattgttagagttgtcttcatctttattataaatggcatgcaatgcttatttttattgattttgctctatgagctatatttttatgtaatagatttgattcgatttgccttttcatagatatttttgttttctctctcataaaagaaaaccctcatatgatgaaggttgttgctttgttaatcttgtgtgattttgatcactgcgtcaaaacaaaatattactattaattgatagaatatttttaattaatttttaaattaataaacaatgttacaaaaaacaacatctcaacaatttagtatttgcggtaattttttttagttaataacacatatgattactattaaaaagaaaaagaattacttcatatactattttttaacattttatttttcaaatttacagtttagattgctaaacatacatattttatttataaaattgtatattaaattttaataaacacattatatcaataatattgtcataaacattttcaaaataaatatgttagaataatatttaataaacactatcaataataatataaacatagtgttacacttaattacagtttcgtttattttttaaaatacatttttgaataactaataagcataaatatttattaaaaattaaataaacataaatattttatttttaaaattttttatgaacttttaataaatacattatattaattctattgaaatattattataataaacatacactaataatagtattataatttataaatattaataatactaataaaatatttattaaacatatatacactatttataaaacataaaaaaaaaattataaatatgtttgtatatatatatatttttgaaattcgtattaaagtttagtaaacatattattttaataatatattaaaatataaatattgatttatgtatttatatatttaactttacgtgtttatttttgttagaaaattaattaaaaataattaacataataaaatcgtaaatatataaatttatttgtaaatattataaaattgtatagaattatataattatactttttgtaatataataaatttacttgtatataagtaaaaaattgccaaatttataattatcatgaatttagaacataaccttttttttatactattatcacattttatttgattaattagattaagaataataagtaaacaaaccaataaataatagagtaatttgtagcataaatacttaag

SEQ ID NO: 265449 - DNA, 816 bp, Cannabis indica
agagagaacatctgtatagccaaacttggaaaacacttgagagatattattagtagaaaacaatcaaacatgtatctgtattatatttcttgctcagattaataatatcagttgcctcccatgaagtaggcgaattatcgaaccacgtaatttcgtgtattatattgtttactactttgatatatatttatcgttatctttaattatttattgcttccgcgcacaacaaattagtattaaaaccaaatataacaatattatatatcaaatcgaagctctcgacgagacaaatccaacgctgcaagaatcgcctcaatcgaaggcccgacacactgacaatagagatcttgaaaaagatgcacaattgacgtaaaaagttttggcgagtcaagaggttctatgaggagaaccatgttatcaaatgtaaagtttgaggtgaagaaattttatggtaccaataactttggcatgcggcaatgtgaagtattagatctattgtttcgaaaaggatttaatattgccttgaagtctaggccagaagattattccgatgaagattggaatttggtcaatcgtcaaacttgtggcacaattcgactgtgtttgggaaaagattagaagtactttgtcatgaaagaaagtgtggctacagttctttagaaaaagctagaggataagtacatgacaaaaagtgtagggaatcgactctacctgaagaagaaacttttccgtttccagttcaagaaaggtacccctatgattgaacatttagataattttaacaaaattttggcagatttgcaaaatttagatgtt

SEQ ID NO: 265450 - DNA, 766 bp, Cannabis indica
aattaggcatagggaagtttttaaaaggtggataccttgattctaccccagtaaccttttactaacatagtaagttgttggtgctttccatcttctcgcactattgctgcactaattgcattttctgagacagccaagtagaggagtaaagtttctccaatcattggttttgccaaaacaggaggtgttgacaagttcctcttaatgcttttaaaggcctgtttgcactcatcggtccactcaaacttcatgttgccttgcaatacattgaagaatggtaggcacttatcagttgatttcgagatgaatctgttaagtgttgccatccttcctattaaggtctgaacttcctttggcttaaatggtgatggcatctatatcaaaaccttaattttcttaggatttacttcaatgcccctcgcgttgaatatgaatcccagaaattttcctgaggaaactccaaaggaacattttttgggttaagtttcatattgtactttctcagtatttcaaagcacttcgcgaggtcttttgtgtgatctccactttttattgactttaccaacatatcatcgacgtagacctcaatgtttgttcctatctgtctcgcaaacattttattcactagtcactgatatgttgccccaacatttttcaaaccaaattgcatgactttataacaataaagtcccatgttggtgacaaagcttgtatgctcttgatcagggacatgcattttaatttggttatatccagaatatgcatc

SEQ ID NO: 265451 - DNA, 1347 bp, Cannabis indica
tttaataataaatttaatttttataaattataaatatattaaaaatgattctctagaatattaaggtgcatggccaccccatacaataacatagttccaagaggaataataatatgtcacctgtgttctcatattactgtatatatacagcatcatgtatttttttggcgcgatgaatattttaaaggatttcataaactaattaataagccaaccataatttatcggtgtgaatgcaagtaaaaatcactttcacaatatgtttaaagcctttttattataataataaccaaggtacacgtactaatttactatatatcatgcacgtgcaaataattaaacaaagagaaattatgacatcattttttataatatattgagattaattttggtggagatataaccatttgttaaatgataaagtatactttgtattaatttttttaaatagtacaaatataaatagatttatgagtttaatttttgataattttttttaatacaaccaacttgaagataattttttatataaataaatataaaaaatgtaattaattttatcataacacctttatattaagttattactaatttttatttgacaaaaaaattaatagagactaaagagtactattttgaaaaataaaaagtctaatttaccatttattaacaaaacaaatgttcctaattttgacaaaacataaaatctgaactgatatttacttattcctcacgtggagaattgttggcggcccccaccccaggattggctgaagctaaattagtgatgtaagagtggggttgaatagcatgtgtgcagctgtagtcgcaagggatcatgatggcaaggtgatctaggttactatctcaaaactggagttctctgatgctctttgcggggaaggcgacggcttgttgcttagctctgaagtcgaaaaaagatcgtggtttaaagtttattattattgagagtgattcgagtgcagtgatcaatgctcttaatgggaaggattcccgttgggagattgagaactatgtctcattttgtactagatcatctcttttgtttgtttggttgtattttcgaacatattagtagacattgtaatttttgcagcccataatgtggctaattggggtaatgaccgtgaggtctaattaatgttttatatatgcacacttttctttaaaaaaataaaaagaactgatatttacctatatatgtaaatatataaatttgaaagacaagggtagactacagtctacaacctcccatgtatgatagctacactatatattgacttaatgaaagacaaaattaactatcacaacttcaaaaaaaaaaaa

SEQ ID NO: 265452 - DNA, 900 bp, Cannabis indica
atactaattttttttaaaaaaatattatattttgggttgctctggtaatttttacgtgggttgtataagttgctcgttagtaattgctataagaatttctgtgtggaatttcataaaaataaaataaaatatatatatatatatatattgaagtataaaaataataaaaaaaaaattctaaaaatttgtttcttgatatgcatgaattatcccttttaaattgttaatttcgattgaaactaaacatgaattaaccatatatatactttctctaacaacatatctaatctcaatgaggagttctagttattcaatcaatctgtaatttagggcatgcatgcttgcttaattaacgaaaggagagtaaaatcatgatagcttacatattcgtcgtaacgtcgcacatcatcatatggctctaataacgttggatatattgtatataatatatatatgggtctattaaacttgcacacacacatatatatatagctcttggtttcttctgattatttattagcatatatttataaatattcatacataaatatattcattaataatgacgatcacataacgtataaatttcacagaattgttcattgtttgacatcatagcatgaatattaattatattacaccgttaaaacaaggaaggcgcataagttaaaataaaagaaaaggaaatacaaggcaaacacatacacgttcattcatcatatagagcaaaattccaagaattttggcgaattccctttgaaataggtaatctaagattaaaccaacacctcatacaatattaataaacagggggccagatccctgatttgatatagcaaacaaaaaaaaataaaattcaaattcgtatatcatgatcatcatgtatatatatatatatat

SEQ ID NO: 265453 - DNA, 697 bp, Cannabis indica
gcagagacgaaaaaccctcgccgaccaccgcctccaccacccatttctcccccatttctcaaccatttgagcccatttttgttacaaaatcttctatttgtgttacttaatctcatacacctaaaaagttttgatttttttttccctatttaagtgtcatccgaacccatacaaaaatagtggctagaactctggccaccattatttgttgagaaaacattgaatctcaacctcctttaaaatataaatatagtttctattcatttttataatgtacattgttttatttttagtttttgtaaattattttttgggttttttcatcttagtaatattgttgttgttgtgattggccactaatagaggaatagaaaacatccgaacccatgttccatgagagatcaaaacacatagatattaagctatatttcatcagagatatcattgttgaaaaggaggttagtgtgaagaaaattggaacaaaagagaaccctgcagacatgatgacaaagtacgtaagttaagccaagtttaggctttgcctagactggctaaacatcctcatttgctaaaagaggattcaagaccagttcaacccttatcatcattcatttcctctattaatgatcaaggtggataattgttgtgattggccactaatagaggaatagacaacattggctaatacattccaact

SEQ ID NO: 265454 - DNA, 791 bp, Cannabis indica
atgtatgcacataattaatattgattcaatacaatctatttattgtttactactcataagtcctaaccaaagaaatgaagagttgggtatgtagcatttataattaatcttgtagataatttgaaagattttaataatcatttccattaacacaggtgcgcatagtatttattattattgttttcgcttggtccctaaatatattagtcttggaattgaaataaatctcagaagttgcacgcatgcaagaacctcgttaattaatcctataaatgaggggtaatttcataaatataaatataaaaaaaaataaaactaatttaaacaaatatgataagaaaatttaataagaaaaaataaagtatttaatataaacacttaatatatatgggattgaaataccctaaaaaaaatatatagtataacactaaaaaaggtacagatgaggagtcaatgagaaaagtaaatacacattaactatataattaaattaggcttctgcatgcgactattaaactctccttgaataataaggactatatatatacaaatggtcagtgaatattatacataatggaaaatcaatcttacgaatatcgtaatggggtgagttaataggagatgcacttgtactaatcattaccaagttaacattacgtgacaaacttcgattcgattccaattgtatgcaagccatggtacaagttattacctcatcacctgattgctggcttgacatgaaactttgatgagtgtttgatgatgttcatttttcaactacatccaagtga

SEQ ID NO: 265455 - DNA, 1202 bp, Cannabis indica
ctttgtattactggtgtcgtccttatgatcgtatctttatatacgaaatgatttctcgtcaatatgtgaatcaatagtttgtgcattcgtgtctcacttaagactttacagtcaacgagttacatatactctatcagctctgcatttaatgagttattccatttcaatatcctttaatataatttccattatattcactgattcgtattttctccggttgacacgtgtcctcctctgaaatgccagcctaatttcggatataacaatttccccttaaaaagttctttttgatgaaaagtgatttttaaatgattatagagggtatttttgtcataattccttttgaaaaaatgcatgtcctctgattttggcagttttgtagtttcgaggttcatcagcatttaatgacaatcttttccacttcttttccaaattctacttgttggatcaattgtctccctaatatgacggagattaatccaagagtataaaacgaaaaaaagaaccacctttgcaatacctttgccataacatttttcctgcgagtttcatccgatttagttttcgacttcaagcattcagagggatcttcacaccgtttgttgtttcgtcgattttagaaccactcatcgttccaaaaaccaactccaaacagtaagtgactttttctctttttttttcttacattcttttaattttgtatttttggatttgattactaatttcctagttagcacctctattacctcatttggttttagcaattttagggttgaattgtatttgggtaaatgttaggggtttaggcagaacgtgttttcgagattctccaatttaccaacttctggtttgataaatttcctccaagaattgggattgctttctccttgcagcaatgtcccaatctagttttgaagtttatcgtccagaatatttagaaatagagtgtcctactgaacttgccatcccatacaaacccagaatttcagaatccaaatccaaactggagataaatgatgcaaaaattagggagcacttagtgaaaacccaccaagaagatattgctagtcgccacagacacttattgcaagaaattatagaaggcagacgccatttcttgcgagacgctgcttggcctgaacctcccagtttgtcttctattcctttggctaagccttatttttacccaaggtcacgattgc

SEQ ID NO: 265456 - DNA, 612 bp, Cannabis indica
taaatataaatttataatgctcggtagtactcatcctttcattttgttgtattacttatgacttgctttatagcaatactacgcactcacattcgatagataaattaggttatagtacgcaatatgatgttaataataagttgaatataagtttgcttggtaacatagacatatatgaaataatagtgaaaaaagttgcaaaataactataaggttatgtttggcaggaataagagtagaatggatgaagatgtttagaaaggatggaaatgatagttactctcctttgttattagaagttaagttggaagaatgaatataaaattgattagtaaagctacatattgtttttaaacataaatatttattagcttttagagggataattattgtatttaactaattttattttatacttaaaaaaaaaaactaattttattttatttatttatttatttttgtaaatctttctaaaattgaagggattaaaactagagaaatgttagtaaataaccctatttttaactttagtgatagttaatgtttttttttaaaaataattaaacaaatgtcaattttttactttttaatacctaaaatatcattcattat

SEQ ID NO: 265457 - DNA, 1725 bp, Cannabis indica
gtactcatatatttattatctgtgttgaatactcgtacaaattcaatgttgtcttaataaaaaaaattaaatatatttttagctttgctgaaattcaaaaagaaaatgagtttagctcaccgtaataattttttttttgggacaaattcgctctaacaccttttatactaaagaaaagcacaaccaataataatgtcccacgtcacccagctacacaaataagtaaaacctcaccattgatcttcacatccaacggctgtaacgaatctattagcaatcgaacgtttctgattttcgatttgcagcgatataaaccttctctctccttcgctttcataaacccttaccataccctaacctgaaatttttagggttttagtcagtccccgagttgagagaaggatcgagctataccaaaggtacggctccgacggaaccatctcatctatcaattttattttcttcatgtattctggaagatttgatatgtttaccttggattatctgtagttttcaacgtttcggtttgggtatatggattatgatagccgatttaaattatttattaacttatataattcgagggaggtgttctcgtgttggggtttttttttctttctgttttcaatcaataactatgtgcgactctatttccctgtaagttagttgatatagtgaaggaaatgaaagatgaatgtttcgttttctggatttacagagctgtttaattcgagaaaaagggttctcatctgtgtttttttaatcgtttcttgggtttagttaatcttgtcacatagattgtaatagatgtacatgattgatttgttaatggtcctctgtggacatacttgtagtagcgacttttgttaatctggtcgtgttttgagtcggtcagtgttttttttggctgttagcatagtatgaaaacacttgcttattgtatttgagtgctgatatagtttataaaggaatcccaagtttctgtttgatttgaataagtattagtttggttgttgcttcaacttgtattgaagatccatttattttttcaatttgttgcaggttattgcaatggctttctttagtaaacttgggaatatactcaggcaatctgcaactaagcagattagttctgaagtgtctccctttaagctctccatgtcccaagcggtaagatgcatgtgttcaatggcaagttcaaagctttttattggaggtaaatttgcgtttttttcctcccggtgatatcaatctactctttgtatccatttttttttttcatttttggatttctcactatttttagtgtaggtatatcatatcagacagatgaacaaagtttaagggaagcttttgcaaagtatggtgagattgttgatggtaagttcttaactatttttgctagagataatggatgggaagttatagtttcagtttgcacatgcttcttccgttggctggcatggctttattaatttggagtatttctaggttcaagttggagaattgggatggtcttgtcccatttgggcactttcattttttattttctttttgcatgatgttattttatttgtcgtgaaaagctggaagtgatatttggtttctgcttactgtgtttgcaaaatacttatctactgaagttcttgcagcaagaattattgttgatcgtgacactggtagatccagaggatttggatttgtcactttcacttctagtgaaga

SEQ ID NO: 265458 - DNA, 839 bp, Cannabis indica
ctgtttaaactaaattcaataacattccttcttctacaatcctgaatccattgcaaaaacctattattgcttctttttctctcgaaatcacaccataaattcttcttccactgcttcaaatgttgatcagaaaaacattcccaataactactttccatggctacatcaagctcttctcatctcttccttctttggaattggatacccatttacgttccctttgtgaaatccccaattctcaaattcccgaagcattttcactctttaatcgagctgtggagtctcataacacactcccttctccttcaacatgcaattttcttgttcacgcattttcaaggtcagggaattctgatttagcttattatgtttataagaaaatgacccaattttgtatttttccaaattttgtatctttgagttgtttagttggttgttttgttaatgcccaaaaacctaatcttggacttggtgttgttgggttgataattaagcgtggttttagtgttaatactattgttatgagtcttttattaaaggggtttaatagaaatggtgaatttggtaaagctattgaggtttatagaaaaatggttagttatggtttatcaccagatattgtaagttataatattcttataaattccctatgcaaggaagggaagcttaaagaatctatggagttgttagttgagatggagaatttgggttgtgaaccaaattttgttacttactcaattttgatggatggtttttgtaagaatggtcaagtgaatgaggcatttgggttgttgaaagagatggaaaatcttggtttagaagctgatgttgttgtgtat

SEQ ID NO: 265459 - DNA, 902 bp, Cannabis indica
ttgtcttatgcaacaaaagaaggtttccaatagaacaggtatgacttattggaagtacaagctagggagtctgtagattttctgacttaaaaacatgctgtgactaatttaacagaagtttaaaaatattatgtttgttttctttgaaagcttagttttttttttcttattattattgttctctatagaagaaaatgtaaatatgttggtccccaataattaattgatgttaatgggatattataacgataaacccctgtttctctttctaatcaattgatcatgatgaaagcctcatatctgctttggtctgtacaactgttacaggctcaagaacttttaaccaccattgcagcattagaggtcacagtctcaaaacttgaacaagacacggtgtctttgcattttcaacttagtcaagaaagaaatgaacgaaggctagcagaatatcgtctcaagcatccatctcttcagttgacatctcctcgctgcactgatgtaatgaatttgtctatatcactaattacagtagctatttacttgttatctacagttttctgtgtccacattgataaatagatttgaccagctaatgattttaatgcctcaaaatggacagtttgcagtgataacacaggatttaaaatgcatgagtacttattagctaaaaattagatgtcatcttatacatcaaataattgaattatttgtaaatttttattgcatcattcagattttaccttctttgaggtgttcaaagcattcaaatcctgaacagagtcttgaagataactcatcccaagaattaggagatcaagaatcagaatatagtgctgaatcaacttctatgcagtcaggagtggaggtatctttctggtttttcttgtgtatgcactgtcttt

SEQ ID NO: 265460 - DNA, 586 bp, Cannabis indica
tgatctcctgctgacaagtggggattgggattgccacaagctaaacagtcttttcgatcgggagactgtttctgcaatcataaaaggtggtaagccctcggggcagggtaaagataagtggatttggaccttggaaagtaatgggcagttctcgtgtaaatcggcttacctgacccaggccttggaaagggctcctcattgtactgttgctccagcgctttgaaataaactttggaatagaaaaatcttagagtgtcacaaagttctatggtggtgtatcgtttctaatgcgctccctgtgagatcaataattggaagaagattttagattgagaacccaaattgccctttgtgtggcttaggggaggaatccattgagcatttatttctttcatgcgaggtggcgcaacacttatggtgagcttcaccttggggtatctaccctgtgtgcaaaactggaattcgtgtttgggactgggtgaaatttatatgggatcttaggcatagggggatttgtgctgaggatgtatttctctttgcttcgattgttgttgacactatctggaggatgcgcaatgaaatggta

SEQ ID NO: 265461 - DNA, 1818 bp, Cannabis indica
tcaggtaggttagtctcaatattttctcctatttccgacattttgaattcatacctgcgtttagttcttctctaatttcgattcccaatcttttcaccggagctttaccattctgtctagctcctcgacgaccaccactcggaagttccccccctttttgcgattgtaactccttctctttgacgtctcctctcgactgctactaccagggacaaaggtattgatatccaactggggcagcatggtgattggtgttgatggagttttctctcccaaagcttcgacttcctctccatttgtgatcacaggaacgatccgtcactgtagccttcctcttcttacgcaccagagaaagaaacacccgatgtagaaaagttggtagttttcatgggagactactatatgattaggcccaagttctttactctgggctgggtccagaacttgatgaataacctcctctaaattactattagtgggccaagtgacataagtgggttcagggtgttgatgtggcactctagacttgcaaattttttcatgtggtaattccaccatttgatcacgtgtaggcccaatatcagccaccagactggctattatccctgcatctctccttctgttgtcaatattagtcataggatgagtcctagacctttgtgaaagcctttgtccttgtctcagttgactctcattacccaaactagcttccttccatagtttctcaatgcacgccttctttgccccctgcgaaatcaccctatttggtgagggtgtccttccaacggctccctgttgtcttgtactctgcattagggaccttgtgcagtcactttcatccccagttattaccgatttacccttgttcctagttcccaccggctctccgatctcagaccgtcgaaccacatcaatcaccttcattctggggatggccgggtcgaaacagctacgtatcggcactcccacttttatccaggccccgtataatggcaccgccttgcccacaggggggtacgcatactccatagggcgatcacatttgccataggagtgagccaaatgcccacaagtgaaacacactgctgggagtttgtggtatttaaattgcacccattctttcctatccctggaaatattcagataaaacccagctacaagcctttgattgagcagaatatccacttggaatttcagaaatcctcttcttgcaattgtcgtccgggtagctctatcgaaatctatatattccccaactttccttgctattacgtcggtattctcccatgtaagatatggtgtaggcaaaccatgtgcttctacccaatatcgagctttgttcatgtccaccttttcccaacatccatcttctggccattcccttatattaagtagagcaccattgactaaccatggtctcttcttaaggacttcttttttatccgcttcattctcaaaaaatatgccccatattccctgtttcattgtcttcatacgccaagatccttccagcttccatattttggacagatttccttaacccgtcctctggccatctcccttcttccaaagacagatgctaaaatccctttttcgttacttcctcactcagttccacatcaggttctagttcaagggacatggagtcaagaaaacgttgtctcatttcgtccatctcgcctgtgctattctcaggaatttcagcctccgtatcttcttgtgccattgtcccgtttgtttcctgctctttatcttctaacgtcgtttgatattctggtggttgagactccttacttgaacttggattcatgataataa

SEQ ID NO: 265462 - DNA, 1648 bp, Cannabis indica
caaattttatgggtttttatacaatctttgtaataatatgctttttttttaaaaaaaaaaaaataaataattttaggaaaagttcaataaaaagtagaaaaaaaaatatggaaaaaaacatgtaagggttacccttaagtaattagagaagtaaccagttaccttatattatattttgtacattttttaaactatttttcaaattttatacaaaaaaaaatcacattttaaaaaacttgtatcttaaaaaccataaaaattacatattgcaaattttacaagttcttatacaatttgtgcaaaatatggttctttaaaaaaaacaaagaattattttatgggaaaaatttgaatttttttttaaactatgataaaaatatgtaagggtaatcttacctttagggtacccagagaagtaaattgtcacccaggtaccttatactattttctttattttttgtttaattttttccataaaatattttttttttaaaaaaaaaaacaaataatttttgtcgtacttgtactttaaaactcattgaaataaaaattagaatatttacacaaaatactattttttgtaaaatttttacattttttacgtttaaagaatttttttacttttatatttttactagtgtttataaaataacatgaatataataagaaaattacataaaagtaacaaaaaaataacatccaaacaacaacaaaataacaacaaaaataacatgcaaataacaaaaaaaaaaccaacaataaattaacaagagtataatataagaaaacatcaaaaagactatattttctgtaataaaaatcgtaaaaatatttaaaatttcgtacaacattatttttgtaatttttatatatttgtgagataatctactaaaaaaatttcctatttcatgtaactttccctcaatttgtattcgcccattttcaacaattcatttcgccgaaaagcctgcgtgggtgtgcgtatgatttggtaaccaaaaccagccacacgatggcccaagaaagcaaaaactgggccaaatatcataagcgtccgggcttgaattgaaacaatgttaaaattaaaaagtgaaagattatttataaatgaatatgtacatcattacaaaaagaatatatatacattgctatgcatataaatgttatttattaaggcagtcatagctactactactactactattattattattattattattattacaattttaacagcttggatattatagaaattttttacaatgcatcttataaaaggggtttatcgatgcaccctattgatctcagatttagctaaccgacatcgaaatcgaattcaatgctcatgattgccacgtgttatacaattagaacaataatgtaaataggcacaaaattttatagaggtttggccctcttagtttgtgggtaatgacctactctccttttagttgtattgataccgagagataatactacttagatcactatagtaatggatctgaagtagctctcttaaggttacaatgtaagaattagagttggcaaatctcaagtaagagaagagtagtgggcgtgtgtgtgagaaagagataagttatcagacttggagcttagggtttagacttaatgacttagggtttta

SEQ ID NO: 265463 - DNA, 557 bp, Cannabis indica
gagaaagagagagagagagcggcagaagagaacatattaaatgaaaccctaaatctaaatgtgccttatatatgtgtagctataaaaaaaatagggtgggactttttatcccagtttttacataaaaatcgggataaaaagtcccacttaaaatgctaaggttgcgtttggcaaatgcataaaaatctcctttccaacaccctttttgtctgattgccaaacaaggcccttgttcctaacatttatttaaagttccaaatgaaaaagtgggatcaaaagtttttatcccactttttattttatcggatgtaaaaagtgggataaaaagtcccttttgttgtagtgaaaaaatatcatcattacaataatatctcgataagcctaatggtaaataattaggatttatatttatattttgggttaatcagataataagtgagattctgatcctactaatctagttcaatgtaaatttaaaattttttataagtggataaataagcgtaatttataaattatggagatttatacggaacatgtgaatataatacgagtta

SEQ ID NO: 265464 - DNA, 548 bp, Cannabis indica
tagagtttaataaaatctccgaaattgagaaaactctaatgcccatgtctaacaatggggcccacagctaattaaatccataaataattataaaaatgtcaaaaattagtgctaattgcctttactaatccaaattactaaagcagtcattacaattatcccccgttaaaaggatttcatcctcgaaatctaacctgaatagctctggatgttgagtcctcatgtcagactccaactcccaggtggcttcctccaccttgctgtttctccagagcacttttaccaaggtaatggtcttgttccgaagaactttctcctttttatcaaggatctgaacaggctgctcttcataggataagtctgattgcagttcaagggcttcataacttaagatatgagtcgggtctgaaacatatttgctcaacattgaaatatggaatacatcatggacagccgacagtgctggtggtaaggttagctgatacactacttgcccgacgttctcaagtatctgaaatggcctaatgaacctagggcttaacttaccc

SEQ ID NO: 265465 - DNA, 584 bp, Cannabis indica
aagatggattatagatgtgatttgtatgcctaatacaaattttattatttattagtaatatccttatattgattatggtttgtaattattaacatataaatttggttattttgaaagcttactcattaatataatacaaattagccataaaaatagttataaaaaggataaaaatctaattatggtaatcattcacattaatacatccaatataattaaattaagaatttgtatgattttatgtaaaaatgtttttaaatgtgtacattgtaacaattaatttttttttgtacatttttttgtaattaattaagaaaatgtatacatttatgtaaaatgccctttttttttattattatttctctcttctgaaaccctagaaaaagaatgaaatccttcacctctctctctattttcgttcgttgaggaaaagaataaattattttgtttatttctcacttctaacaccctaaagaaattgaaggaaatgaaattgtaatcatataggtccattaaaaacaaccaatatatagaaagttaaaaatgtatataatgatagggaaatttacataatgtactaactt

SEQ ID NO: 265466 - DNA, 629 bp, Cannabis indica
ttatgttgtactcttgttaattagttgttgattttttgttatctgtatcttattttttgttgttattttaatgttatttagatgttattttcatgttacttttatgtagtttccttgttattttaatataaaactgtaaaaatatataaagaaaaatctttccacgtaaaaatgtatttttttagaaaaaatagtgtcttatgtaattatctctctactttattagttctttaaatattttagagattctttattttgaaacatctgatgtgatattttaaaaacatgtcttgccctactctcatgagctcccttctatttttcacaatagctcaacattttttttactttaaattttaatattacatcatacataagttttttttaaaaataaattactaaaattctatattttttttaaattttaatattttttttatttattttaaatatatattattaatatttacacatattttcatataaaaaatataaaacctcaaacaattaataaaagatgtttaaacaataaatagtattatatcaatgtagagtatgaatagtaaatttaaaatagaaatgaagtttagttcagttgatatatcttattttagtttagttctttaaat

SEQ ID NO: 265467 - DNA, 742 bp, Cannabis indica
cgctgtcgaaggccaccagccccgtcgcagtaaaatgatcgcatggcattgttgtgccccttgcagctccattgggcctccgcgcaagccatgcaacctataggattaatagagaccaagggagcggcagatgcagaatgcaaatagtaatacttcaaactaagtttaaatcaaattcggtttctgaaaaagaaaaaaaattgagatatttttaataaatgtgttaagaagtccctgatttcattttaatggcgatacaaaactccaaggaataccagtaaatcttttctcaggtttttgaccttagttgccattagataccaactccataatatatttcttgccattaaatcaaatctaatgttgaattgttttcacataaaactctttctttatttattttatttttcaattagagaaatcaaatcgtaaaacatgatgttgagtctcttccaactaatgagagagaggaaaagaaaaaaaaacaaaacctttttttatgctagtgaacaactacaaacctaaatccctaccatagatctacaaaactgttcattcagggattgtaattgcaattggtttgtcgatcgatctcttcaccgacgaatcacaaagaacaaagaagaattacaataaatgggaatcaagaatcgtagagaatggtctttgatttcatgccgggattgaaaatcacaatataggtttgagagagaagaaaaataaatcttgtccttttgggttt

SEQ ID NO: 265468 - DNA, 2004 bp, Cannabis indica
gtgagaaaaaaaataaaaaaaatgtaagaacaaatagaaaataaaaattaaaatattctcatatttggtatggaaagaaaaattgtatagaaaaaacttaattcaacaaaatttttcatatcaaacatgaaaaattaatttatttttttgttgtccacactttttttctctctacatttttcctacctttttttttttctcaccaacatctaacttccaaacataaccataataaaattatgaaaaatattaaaacttacacactaacactataatttataactattgtataagagcaagtatgagttatatatggtagtcgtttattgagttttttaaaaatcaataaatataataaagctaaagaaatatatcataaacaaagaaggagataagagtttttacgtggctcaaggataacgacctctagtccacgaggcaatattattatgataagactggaaaagccataggatcaacaacctgaccgaccacctcctccatgggctggcttgccatatcctcatcaaagtgacgagacgatgttccctcagtctcgccgacagtttggcctgccccctggccagcccaaaactattagacgatgaactagataggtcaaagggctctccattctcagcatacattaataccttgcccttatctaagtttaaatgcatgtatggaagatttataccggaagagaagatcctctcgcacacatcaagtactttaagatgcagatagatctctagaaagttactggtgatgtgcgctctatcagaaatagtccaataatggtacttcaagctggctccaggaagattaaattcttggaatgaattttaataagaaatctgcacacaattctcatcctcaaaatggatgccatctcagctagaagaccttgtcaaagtcaaacagtgacaagacaaacctttgaaggattatatcaaaaagtttatggccgaggccactaaggtcatatacctaacaaaagaaggtcgttatacaaccatactggggggcatccttccattgagtaacttcttgaaaggtattcgaaagatctcaaccaacaatatgaaggagttcctcaaacgagcagacgacttcataaaactagaggaagtcatcaaacaagctcagaccggagggtaagtcagcaatatgcaatctcagggtgttatatagccccaagacctgccaaatatgcaggtcaacactagtagtgctggccagccctccagttgcaagaatattagaggcaagcgcaacaataacaattctagctggaacagtggaaaaaaaagggaagtacaatacctcccttatgccacgaaaccaaaaggagaaggaggagaagtacacatgcttcaccctcctaactgagaaacctgagaccatttacatgtcaactcaggctactgtcccatacaagaagcctcctcctatcaaaaagaagatgaacaagagggacatgtcaaaattctgctatttcacaatgatttcaaccatgacacaaccgagtttcaaaacttgaagagggagattgactttcttataaggaaaaaaaatccccacttgtgttgttatgtacagaaagaccaagttcaggcataaactacccagaatggagaccctatgcaacctctagtggcgggtcacttgggagtcataattggcgaaccccatattacaggtgagacaagcaaggctagggagcgctatgcttgtactcttcgtcacgagcctaaaagatacatcccagccgttgaagaaagagactttaagcaactcaagttgggagagcctgccatctcctttacaaagggagatgttgcccaggtcagcttcccacataatgatcccttggttattactgcacagattgggaacatgacggtcaccaagtgcatggttgatagtagagcctccaccaatattattttcaagtcagcctatgaaaagatgggcccctaactaacagacctagcaccttgc

SEQ ID NO: 265469 - DNA, 1640 bp, Cannabis indica
acttaaattcgataatctcaatacttcaagaaatttttaacgattaaaaaaattcatgaaacatgatttattacatgttaaaatttagaaaacaaaatttttaattagacattaaaatataaagaaaattttgccgctagttcaattattatagccataaagatatacaataaatacatgtcaaattcaaataattaaatcaataatattaacgtgtatttcccgattatttatttaattacaatattttcattctttaaaatccaaacccaaaacaaaaaccctacaaaaatgtattctctcaattcaatacccatttcttcttcttcgttctttttcaaaatcacaacaaaaaactcaccaataatccaatcaatttcccccaatccaaaaccaatcatgtccaattcccaatccaacgatcaccatctctccaacaacctcactctcgaccgtcgaaatctcctaatcggcgccggaacactcttcgctacctcattatcatcatcaccgtcccctgctgcggcggctgattatccgatcaagctagacggagctgtcaagcgagtggtggtcaggccacgaaaatcgagaaccaaggcggagaaagaagacgaagaagaggttctggtgatcgaagggatcgagttcgatcgaagtcttccagtgaagtttgacgtgtacgtgaacgacgtggatgacgtcatgggaggacctgatacggcggagttcgccgggagctttgctaatgttccgcatgggcagaggagaggaagtagtaagacgatgaagactggtctgaatttggggatttccgatctgttggaggaagtgggagctgatgatgatgatagtgtggttgtcactttggtacctaagtttgggaaaggtcaaattactgttcagggcattgggattaagcttcaaggataaacgagatgagggtgtttttgtaatttcagctcttttacaaagatttttatacttgcttttgtgttttttgtactgttattatatacactctataagtatactgctaagtttttattttatatatttgttgatatttgtcgtattaaacataatttaagcccctcatcaatatgtcgattggttaacatatactttgaataaatatatattttaaataataaattttataatactataatattagcaacatcaaaaagaaaaaaatatgatcagcatataatcaagaaaaaataaatgacaacttttaaatttctaagaacttgtactacaattaaattcgataatactctaatcaaaactactactacaaattttccaatctaccatctttaaaaactaattctttctctaaatcactttattattcttgtcccttacccttgctttatcaataaattaaattatcctcaaatttccattaatacacaaattatcttcaaatctcctccattaaacatatttatatattataggaaaaattcatagaacacccctaaattaatatttcagtatctctcatctatatttatagcacgtgtgacaattttctttatagtaatatttgaaattccgtattttaatattcccagtttgattatttaattaaatgattaattaaatgcggaataataaaactggtactgaaa

SEQ ID NO: 265470 - DNA, 668 bp, Cannabis indica
tgctcttaacatgttgaagtaaccatctctcttataccttacttaaaaggaaggctgggagatgcaccataacacacatttcttcacgaagatgtttaaaaaagatattattcgaatgatgtgaataattgagtacagtcagcataaccgtttatagataaagacaaagagtggttaggcggttatttaaattatctcatgtgcacaaaaataaacaatggtgaatgttcacgtttcatgagcagttacgaatgaccatatcccaaaggaataactgtcatcttagacttctataaatagtgacagaatccaaggaatagaggagggccaacctttggaaaaataaataatcttgtgattgattatcattcgtttctggataacagttttattgtattctagatagaatttataaattctgaataagatagactcgtagactatgaagatgtaacttcaaaaccacgttaaaaaattctcttgttatttattgctattcattcatttgagtagtctagtctaaattaggaggagttatttgatctgagcgttgaggttgatttaagggtaattagtgttaaaaaatggtaaagtactctgaggcccatctaatgtaccccgagacttatctaatgtaccgcgaaatacattccgtgaaaatacatcac

SEQ ID NO: 265471 - DNA, 585 bp, Cannabis indica
tctcgtctattggtgtcttttggagcggttttacgcttgattttcattgtttcaggtttccggggtgtcaaagttcaaattcagtcaaatggtgaaaaaacgggacaaactggcgaaaaattggaaaaatctgctcgagaggcatcagtagtcgcgaccaccaatgagccaggtcgcgacccttttttgtggtcgcgactctggtcgcgacttcgagattttggcagaacctctgattttcgaggtttgcctgtagtcgcgaccagcttaaaggctagtcgcgactaggtacggacgtcgtggttttgacctaattttgatttttctctcaattggaggcacacctctcatccctatataaggaatacgactcagaaggtcaccctaagcagaaaaagacctaaaaagtggatgaaggtggagaggaagctatcttgaagacccggagcgatatcaccttctagtttctttcttttacccttatttctttcttttatgtttagttttgtttcagatttaatcatggatgtttttattgtttttatgagctaaatttcccattaagggaggatgatgaatgttgtt

SEQ ID NO: 265472 - DNA, 1240 bp, Cannabis indica
gatcttcttaacatatggatacggaggcaagatcgtgacttgttcggcattgggacccagaccaagcacaaagcccttctccagagttagtagcaagctgccctgtggtaggcaagaaagcctcaaccccaccgaggaaacccttatcatagagattcttcaatctcttgtactcgagtgtggacagaggagaaacccatcgagaacccttattcggtctagtaaggacgggcttcctcatactcttactcaatgtagacttggcctggaacgaagacatctcccagcatcattgtatccaccaaagggaagagcctggatctcttcctcttcttctttttctccttaagcattaggagaaccagtagggtagacctcatcctgctcgtcaatttcctagacttcaacgtccccgacggtaacttaggtatcctccctaggaggtctagcttagtctgccctggccatcacaaatagctgagcaaaatgaggattagcctctgaagctttcctcaatgtctttttggcttttcccagcactctatgcttaggcggtagtttggattcataggtattcctcgcgacagtaacaacaatctcctctaatgtggtatgttttattgaaggttctggtcgacctttagcagtatgttgataacaccagtttagactttatacatccaagaggcaggtagatagcgcctccaacctctactcaattcccagataaattggtcgtatccctctccgtttatccggttagttcagtgatgatgttggaccacgagcttcggagattccaaggaataactgttgatttcccaatcgtcaaaactcgaggtggatgagcctccaccagatgaagatgagtggacggagtttaggatggatctcgtaaacaatatggagaagatcactatcaatttagtggttactgtttggttttgtgcctaaataaaactctatttcaatgtaatcttttctattcaattatcaataaagaaataattattttcattacttatttagtatgtcatttggttcatgtgatcatttatatgtttatttgatttataaattcatcccaatccttatcatattgatattcttgtttattgtgtcgtcatcacaatggaaagtattcaagattatatgattacatgtattcctagatttatcagtacacaggtttaactgatatgataatctagaacatagtttacttgtaccttggataagt

SEQ ID NO: 265473 - DNA, 736 bp, Cannabis indica
attatatgtacaaaataaataaaaaacaaggcaaacccctcttggactaaattttcctgagaaaatgaggatggggtagaaaattttctgtttattcaatagcaagatttaaattttaagttaccgttttctttattatcagtttcttggagaccctttatattaaatgcccatctaccattttttcacaggtaaggcatgagatgataactttcattttaaagaccatataacgacttattcttcgaccattggagcttaattcaggttatacaaacatcaccagatcgttttgcaccaaattcactgccaccattggatcaagttctctactttctgatgtcaaattccaaagtctcatcatcttcatcatccttatgttcaatatcagcccctgatattgatcctttgctcaaggatttgaatgagagaaagcagagttttcggcgaaacgtggtgtctttggcagctgaactaaaggaagttcggagccgcttggcatctcaagagcaaatttttgctaaagaaacaacaacaagacaggcatgtcttttgtgggttttggttctttttgtattttgtgtagttttttttggttggactatcatttatattttttttttttctattttgggttttggtttaagggttcatgtggagttttttgtttgggacttagtttttggaatctttttcaatttttttttttctaataggtaggctagagtacaaaggc

SEQ ID NO: 265474 - DNA, 3459 bp, Cannabis indica
gttgtcccatttttacttttttcggcttcctacaaattttcaaaacaaacaattaattagtgatgagaaagaaagaacttgatattaacacagatttaaatcaaggattaccttttttataactgtgtatataggggtaactacattgttaaggaaagactctggtcctccaccatatgctggcatgactttctcccatgttgtgggattaatagctccagttaacataccatgcaattcagaagccatcttaaacaaaacaagtaaaaaaataaaaattattcaataaagtttgttgcaaaagaaaaatcaattcaaggtatggatattgataggttaaagttgcacatgaaactagtttgagtaaagaacttccagcttacatggtgaaatatataacataaacactctggcatgaaccgcaagtttgcagcctctccccaaataagaaggtaaagcccaatgtacaaaagtttatactgctgagcctcttgtttcacataaggcagcctgcacatagcaaaaaccaacaattaaattaagggtaaacttctcttctatcttcttcttattattcttctctttcttatgtagcaaatgataaatggaaatgtattttaccggatgttgctttttcttggaaggaatttgcaccaatttgtataatttttgaagaacttcctcatcaactcatccacaacaacttcttctaactgtaatagaaaaaatgtcataaagtcagattttagagactaattaaagcaaattaaagttttacatccttaacaatgaatataccttcaagacagactgcttactagctttccgaatgtgaatatttgcgaggagaagaatcagatgttccctttggttggcaacattgccttcctggttggaaaacacaattaaaaaaatcagagagacatcataagatgaataatgaagaagaaagttaacatggcttatcagctttatcatcacatatttctgatcggaagtacctgaaatccaaagcagtactgaagaaaatcaaacaagtcaatgaattcaccatgcctctgaaaatcttgggctgaaggtaagccacgaacattgcgaacagcagcgattgcagcctttatctgtaccatttgggaaactttattatcatgcttaaatactctctaacttgagtccttattacagtagaaaaaaattaataaagaaagagaaaattagttcatccaaacagaaactaacctcgttgagttgcattattgcttgttgaatgcctccatgatcaagtggtaaaatattataaggcacaaagaagtctgcttttttgttggctctttctctatttgcaagagcctaataaggtaaaagagttgaagtgtttggttcaacaacacagaaaatacatggcaaaaaagacattgaagatgatagaatatcagaaaagaaaggcaatatatatacctgaggattggctgcacttgttattctcgtgagaacttcaagcaacacagaggcaattgtgtacgcatttatcaacatttctctgtgactgatttagttcattacacatcaacatgaattagcatataaaccaaaataaattgaaagaaaaaaaaggaagaattaattacctatgttctaatgcagaatttctaacattttgataaatatattccttgtattcacggtaaacacgtctgagttcgcgtacatcgctagtttccttcctcttcataagtgtagttatctcatcctattaattaataccaataatgacattaacattatgagtcataattcagaaattgtgatagaactgataacaattgttctgatattctgagatcaatgagtaaatttccattactatatgtactagaactttgcacatgtgtaaaaatacaggggaaaaacagagtattttaccgactcaaggcgcttgagaagagaagttttgaattgtcgaacacctcttccacttgaatttttgtccatgttatgtgctatctcaaaggcatgtacacggcctattcaaaaaaattgaagaacatgaatactccaccatggattttgtcttgtactttaagtacatcaaggatacgaatgcagacacagtaatatcccttgaacataatatacattgcttggtccccaagaaaatttaagctaatgatacatattataataagcttataaattcttactctctgaaacagaaagacagaggaaagcccatgttgaaaattgaaattcttactaatttgttcgtttattatctttttctaatataaattattatattgctctaaaaataataaggaaaaacacaaatcacagttagaatatcatgcatactcatgggttaacaattaaagcttgtaactaatcaaaagtaacaacaagcaagcaagctaaacctcacaacttttaaacaattaaataaaacaaacccagtacttcactaaatcccacaaacttacataaaaaagcaatacgtggctcctcaatttcaaccaagttggccacacgaaggaatctctggatttcagtagccaaagtaggaggcaacctctcactctcaaatggctcaggaacactgttttggtcatcaatgggagaactaatagtaatggaactggagctgggtccggcttcatcttgttcgcagtcatagaaaatggggtcagcaacaacaatctcatggtgagccatttgtgaagtgagctcgaaagggttgttagtggaaatgagagagggtacttataaggaaacataattgatatagatgggattccagagtatatagagtggatcttctcttggtaagtatagctttgttgtttgcttaacgtggtcagctttcgagttacgtggaatgcttttctttatttctttttgggtttttggagcctttttggtcgattataaagaaggtcttcctcatttttttttaattttttatttttctctttcttttttgcttttgcttttttaattggagctctgttttgggttctgcttttctatctttctttccctatgaactgttaatgaaggtgaagaagaagaagaaatcaatgtgtactggagaagaattttctttgagatcgcgtacgtgaagaagaatgagtttatttttagagtaaataatattgaaaaaatagggtggtttttgctcccaacgaagccatgcaaatgcaactctccccaacgtgtgagaaaacaattattatatgttttttttttctttcttttattccttattattacttatctgaagttgtcacttgtatcgatcccacactgttcttttcttctttttctttttgtttatattataatatatttatgtttctgtgtaaaaatatatctattaataataataaaccaattacctaattaccttattaattattaaaaaaagaaaagttttttttttttttttttgtaaaaattattaaa

SEQ ID NO: 265475 - DNA, 598 bp, Cannabis indica
caggataaaattaatcaacctagtgcatacacaaaaaaacgatacatatatgcgcgtgtgtgtaatatagtgacttttaaaaaaaacttaggtggtagtggtatcattatgtgagtaacaaagttaataatagtaattgattctcacattaggtttgttggtaaaagtagtagagtaactataaactacatgttagtgatgtggttaattcatgttctaaggttatcacaatataatttatttacgtatgaaaacgtaaaatatatatatttgtgaatgtaaaatatattttatgtatgaaaattgtctcaaatttggaacatcttttaagaatgggttggtttgggttatataaagttaaatttgttcaactcataattatatggtttatcactaaatgagttgtgttggccgagttgaatgatttgacccatattttatgcacccctaatatgtattggttattataagttagtgggtcgcttggatctatcagtggatcttaactttggttagctttaagtttttgtcacggttaggggtgttgatggtacgggtagtgcagttttgactattttttcaaatcaatccgcacatg

SEQ ID NO: 265476 - DNA, 615 bp, Cannabis indica
acacatgtcccatactatatgttagacagagaattagacacattctctagacagaggatccgcttaccgtaaaaggaggatgtataagggaaccacgtttatttgatcttggttccccattggtgaggttctttataatttcttctcatccattctccattgtattcaatacactcttgtactgatttcaacatcaataaaaggtctacgtttatctactcttggtgttatttttctctttgttttgttcattaagttgctggttttatcatcacagtttgtgatcaaactgtgtttgtgatgttggttcttttatattgttgtattgtgttcttgagagttattcattcactacaagtggtatcagagctgagggagatcaaagacatcaagaacctatttttgaagatcaagaactgcagccatgtgatcatttgcaagattcgagtcggacaagttcaatagtaaaaatgattttagtttgtggagaatcaaaatgaaggcacgatcttgctcatccatggatctctaaagctttgaatgcagatgacttgaacaacatcaaagatgagaaaatcaagaaggacacagtgagcaaagcacatagtgcaatca

SEQ ID NO: 265477 - DNA, 1234 bp, Cannabis indica
atcccaatgggaaaagtgaggttgccagttaccctgtgtccggacacaccccagagcacttttgaatactgcacattcgtggtggtaggctgtccaactgcttacaacgcaatcctcatccgaccgaccctagtagattttggcatagttacgtttatccagcacttgtgtctaaaattccctactcaggaggctaaagtagggaccgtgaggggtaatcaaggtgaggccaggcaatgttacaatgtcgcggcccacttaccagtattgatggtccgtgaaggtatcgagctagaagtggcagaagaagatgagttggatccccatgtgggatccgaaaaaattgtagaacctatggaaaacgtcgaggaagtgccaatgtgcgacctcgatcccaccaagatcctccgactgggaaaaagcctagaaccagaggaaaaagaaaaaataattaaagcattaagagcagccacagatgtttttgcgtggtgacaaggagacatgaccggcataagtccccatgtcataacccatgtcctcaatgttaacccggatatgccaccagttcagcagaagcgacgtcccctcgatctagtaaaggcggaagctctggagagagaggtggacaagctactagctagtggcatgatccgggatgtgtattacccagaatggctggccaatccggtgctggtgcctaaaccaaatgggacatggcgggtgtttaccgatctaaataagtcctgcccaaaagactgcttccccctaccgcgaattgaccaaatggtggacgccacctccggattcaaactattgtccttcatggacgcctatgccggctacaaccagatcaagatgcacattgcgaatcaagaatgtactagctttaggaccgacaaaggggtatactgctacctggtcatgcctttcggactagaaaaatgttggtgcaacatatcaaagaatggctaaccggatggttaaaggccttctaggacgaaacatggaggtgtacgtggacgacatgttggtcaaatcaaaggcatgtgcaagccacgcagatgacctcgaggaatgctttgaagtgattaagagatatggaatgaaacttaacctgaagaagtgcactttcggggttaaatcaggaaagtttctgggatttattgtcagccagcaggggatagaggcaaatccagaaaaaattcaagccctcctgtgttggaaattattttac

SEQ ID NO: 265478 - DNA, 576 bp, Cannabis indica
tttagttgagtttatgctatacatagcctgaatttcgtcttaaactgaatgggagtttttcttttgaagagcagagcaacaatactgagacaatgaagggtggacccaagaacttggaccatgaattcagttgtatacttcatgataaatatccttgtattttcaagtcttgcattgcagtttgctggccgatgcggtttccgcctctaccttgatttctgatatgtgaaattagttgttataacatcaaataattgtacttgaaacattgtttgccttttagaggatactttgattgttttttttctttttcttttgggtctgtacattcacagaaggtatttgacccttaatcaaacaactaatgagcaaatagaaactgaccctttggagtattttttaaaatttttgaaatcttgcgccggttaattagccgtaatgacccctgagttttgcaaagattctcagtttagtccctgagttatttttctcagcaattagattcatatttcaatttttgtttcaatctccgttaaatttttaacagatggcaattttttttttttttgagatatt

SEQ ID NO: 265479 - DNA, 1264 bp, Cannabis indica
caggtctgaatttgggataggggtcgtgatctgagttcgagactcgagctggggctggagtttgggtcctaaggtccagattggggtcggagtctaaaatattaattaaaaaaaatctgtttaaagaaattgtgaaagtaattttttaaaattttaattcttaattaaacaattgaaaagtgaaaacaatattattgaacatgtttctggaaaatattttcaaattttttaatcacaaaggttttttagttcaatactattgactcgtggactagagttcagtaacactcgaacacgtaaaaatcttgatttcttcttctctaatttacttctttcttaagcttatttattttagataaattacccattatacgacctatttacaattatttttcgttttttcgttttttttttaaattttcaattctataaaattttatttacataaatattacttttttaacttttcaaattcattttgactttttgttgctaaatcaaaacactggttttactggatacaaccccaacaccagagaccttcaccccgacccacacaaagcctccaccagcaacctccaatagccacctgagcatcgtcaccaccttagacctgggaacaaagcccagtctgtaagatttttgaaccaagccaatgatcaaagccggtgcctgtggtgccagtggaggtcctttctggcgatctcgcgacggagtatggtggttagaccaattgggggagaggccggtgtagtggtcgaagctgggtcttgagtggaagccatcggcgactggggctgcgtctgaggccgagggaggcgtgattgtcgtgagaagggaaaagtagaagcccaacccaagtatttttgtaaaacaaaatataattttgcttagtttttaacagggaaatttacatggtatactgataactctagaaattagagttattttcacattttttttaactaaaaattggtttagttcttaagtttttaattaatttagtaagtttttaattatttttgaatttattagctttattgtaattttatatgtttttgtgtgtttttataattattttattataatatgttatgtggtatttatttttaattttattttaatttctaattaattttatgtatttttaggtgtgtttagaagaaaaagattgggattaaattgaagaaatattgaagaaatggagctaaaagtgcaatttttaaaaaagaaatctcatcagccttatgcaaggcccacttgc

SEQ ID NO: 265480 - DNA, 748 bp, Cannabis indica
actatagtaccaagacccgtgcaatttaggtccgaaaacaatggattttagggttttataaatcaaaacccacaaacaccttttccaattccattctcaacaattttagatcaaaactaaggatttcaaaataattttataatgttcttcctttttccttagaagctatccaaactagattaaacatgtgattctcaaccatttcctaaatataaagtggatttacactactatttcctataattttcaagtttcattcatagatttcaaatgttattagcaaatatccacaactataacataaatgaataaggtaaaaatagaattttcatggaaagagtttgaagaacactaaaaactcacaatttctatgaattaaaacatggaaaataagagtagaatcataaaaaggtgagaaaacttattcaaagtgtggtctccaagcttgaatcttttacaaatccttagttgtcactttgaagctttcctttgaaatgggtttttgaacctttcctttgaatcaagtttttcaaaagggtttttctttgactaactcttatttttaagtgaagagtatgaaatggcactttccaaagaaatttttattattcttataaggttttccaaatgcttggaaacttgtggtttacacatattttcctattgatactaatatttgtcagacatggagtttaaaaatgcaagaatatttttctatgagtccatcataatactataagattatgat

SEQ ID NO: 265481 - DNA, 753 bp, Cannabis indica
aatctgaaatttaattggtaatatttgggtgtgaaatggcatttatgcccttgaaaatgaatatgtatgttttaagccctaagggcaaaatggtcatttgaccataagtgatttacttgaaccaaattgatttttgagagaaaatgaattatttttctggtttcatctctctctcacccgaaccctctctttccctaaagcccatttgattttcaaagttgattgttgagaattgcttgaagttgggtgtgaattggagctttggattgtggtttcttgagcttgaagtttaggtaatttcttgctgagtttttattgaattttaattagtggaatcttgctggaattgttatggaaaaagcatgatttgagttgtatcttgccttgtgattgcatgttcttaagtgtggttataatcttgatgaattgagtgtgttaatctttggatttaagttcttgagcatggattttgattctagggtactttctaatattgaatcatgtgttattgtgatgttgtgtaactaggattaccggcacttgatcaggagcacccaggggtttggaatctctgctattgctggacaacaggtaagacagtagtttgcacgtagagtatgcgcagtggcgcttatgtgaatatgatatatgtgagttattgtaatcggaattagggtgattaccctaataggaatggtttgttagcctagggttattactctagtggaatatgtgtataaatgccatgccatg

SEQ ID NO: 265482 - DNA, 684 bp, Cannabis indica
atgactcaattcaattggattggatcagatggaaaaaatccaatatccaataaataattggattggatcggatggttccaaatccattggatgtgatccaatgaacacccctacttatcaggcccttaccctcaattttacttcttcttcctcagctgactctttctaaagcaccaagtttctgtcaatggaagtttgactgtaagacattatataaaatctgtttgaaaccaacttgctgagaagaccagccttaccacaaaggcggccttgccttaatacttttgataataaaaaactcacgtaatttattagtaaattaaattgataaacatttaaattactaattaattatttttaaactagttaatttttatataatataacaagtaattataaaataaaatagttttatttagtatactttatagtttagatattgcttaaatgttggtaaaccaaaaataaaagaaactttaaaaataaaacaaaaaaaaaaaaaaattaagaaagaaattaaaatagttacctttgctatgatttcgactagcaaaaaatatataattttcatatattaaaataattattttaaagactagatcatactagtacaatttgttagatcaaataattattagtctagcaaaaaaacatttttaaatataaaaaaaagaagaagaaaga

SEQ ID NO: 265483 - DNA, 661 bp, Cannabis indica
tgtatgtagaaaagtaacttcgtagttgcttctaagtttcattttaggtatcaccaaaaactaaatagttgatttagttgctttgtattatgatgacaaatgaaaaatatatgtatttcttacatgttaaaatgactacattcaaaagtagtttatttatttttttcatttagttagccaaaaagtaactaattttttaaattgaacaaaatttgatatataaaccaaattcaaaggttgctaaaaaatacttggttattcacgggtttacttttctatttaatttacattttacttttataattagtttttaaaataaacttgaaagttacaagtatgtaacttaacaaacaattcatatatgaagatgtttacgagtaatttttgaaagtaattaaaagtattctagataatatgataaaaataaagaaattggtttattttaaaataataataataaataaatggataacaaaatgtgtattttgataatatgtgttactacatagtaatttataaattaatatatttttatgcacataattatttaatataaagcatataatttataaatttttttatattaaatggaactatttgctaaatatggtttacaatttattagtttctaaattttttttttttttgaaacagagtttct

SEQ ID NO: 265484 - DNA, 598 bp, Cannabis indica
tcaaaatatatatattagtgagtccattccttgtatccttaatcaggagatgctaaaaaagagttgacgatgcaagggaagaaaaaacatggagaaacttaacctggaattgttggaacttctctccatcagctgtcaattgtaaacgcaagttcttttcagttgctagcagttgtgacacttgttcagcatatacctttatccgggactgttcctgcactaatttctcttcatgttgtttaatcttcaaatcagaaatctgaagttccaaacttttttgctttaactgtacattataaaccaaacaaacaacttggtcatccaagaacaacattaacagcatatcatgatataattacttcagcaagtgtaaaaaaattgtactttttgttcatgatgttgttctgaaagagtatactgatcagctagttgtttcagcttcgttcttaacctgaacatagagcaccatatatgtttaaattcttcttctcagtctctaatagttaattgttacaaaagaatataattttactggaaacctaggtcttagtggagattatattagctcgaaagacactaagccaaagacctgaaatac

SEQ ID NO: 265485 - DNA, 625 bp, Cannabis indica
catatccaaagacaatgcaagttcaaaaaattgttagctaaaaagttcgcagaactattacaaaaaagaaacttcgaaatattaatacggttacaaatagcaaaaatatctttaaaaattaggccaaaactcagccaagaataagtttctcttctgcaggatatgaataacacgttgacaatctgattcgacctccacattgttgaagccaagatgctaacatagaagtaatttatatgctaatttcactatttttagtatttgtcaacaaataatatcactatctttctatatatttttaaaatagcaaattacacgtttctaattttaatactattattttatttataatacgcatacataaaaatattatattttaaattatatataactcaataagtaaaaaaagaaaatataagaagattacaaaagttgaacaacaccgcgcgaagcgcggcttagttccctaattaaaaaaataaaataaaataacatgtgatcattattaattttgaacaacgcttcacataaaaattactcttaaaaattagaccatattacatatttggcaagattagtctaatggacaactctcactggaaatgctctaactaatcacaagaca

SEQ ID NO: 265486 - DNA, 858 bp, Cannabis indica
gtggtaattccaggatcagaggttgaagataacattgaagactgtcagttggcgattgataccatgttgaattgtaaaaacatgaacaagtctgctggtgcagagcaccagagagaaaaccagagaaagaatggaaaaccagagaaagaatgaagaatcaagagagtaacaatgcaactgactgcatcctctcataatagctcttatttatatactggaagtaatatacagggaaaaagaaaagtaacagaaaagtttaactaactttctaacaaaaataaccgaacaactaaacttaactgttacatctaacaaatggtagagatcttgcagatcagtttttctgtcgaaatctgggttttccagatgttatcgacagtttatcgatagaatatcgatgctatgtcgatatcctgctaagaaaggtcagggatgaccattatcgacatgttgtcgacagtttgtcgatatcatgtcgattaaaaagaaaattaacatacataagttatttgagaatttgtcgacacaaaattgttgacacactatcgacatgatgtcgacattcaatcgatatcacacttagcaatcacagaaagcaattacatcacattgtcgccaacatatcgacatactgtcgacatgctgtcgatattccaagtatgatcacgcctatttagcaaacaaaattgtcaacacaatgtcgacatcatgtcgacatgaggtcaatattatcacacaaaaagcaattaaatcacattgtcgacaaaatatcgacacaccgtcgacaaattatcgacatattaagtcaaaattttttgattctcattgtgtcgacatcctatcaatacacctacgaca

SEQ ID NO: 265487 - DNA, 544 bp, Cannabis indica
gtttttttttttttaagataaaggtaaaaaaattgtgtaaagtaatatcaagttttttttttttttttttgctattaaaaaattaagaaggagatatgttaacatagctaaactctactttcactttcatataccctattcttttatcacctttagattcttaatctaagtacaataaaaatgttctcacccttcccatagggacaaaataaggtccctattagaagtgaatgaattaatttattaagtgacccaaaacagagtatttacacatgatagtgttacatggatcaagaatggaataacagaacttaatagaatcctaacaaccttctaatacagttagcaacagattaactaacttaacggtaagctaactaagcttctaatagtccctactatagaagtgtgctaaatatatatttgtaacttctttaattgttttctgaaaagcttctagttcacagaaataaaaatgtgtttttaataacagaaaggctttttgaaaactcgatttcactaatcatgacttgactactaattt

SEQ ID NO: 265488 - DNA, 514 bp, Cannabis indica
ttatatatttttttaatttacggtttgagttgttttgctaattgttccggtggttgctacgagagtttctatgtgaaattttgtaaaaatgtaaaaaaaaaaatgttttgaagtgtaaaaatgaaaatgttctaattatttcttaaaaaaaaaataatatgaaaacatatttaaataataaaatattatattaattagtatataacaaaaaaaaaaacaaaaccaattaaattaaattaaaactaataaaataatctctttctcttcctcaacaacaacaacaatcaaattcccatgaacatgaacatcacatgaatgtattttgttatgagccaattattacagcctcaatagaagttaaaaagttactcaaatataatctgtaaaacatgccacttctccaaaaccttaaccaacttgaacccatcacataccataatacccaagtgttccccaaccccaactcattgacctctccaaactttgaataatgcaaataggtctaaatttaaat

SEQ ID NO: 265489 - DNA, 1097 bp, Cannabis indica
tcgatatccatacaattctaaattccaccaaaggtgcaataactcacacggacaacattctttttctaaaaaagaaagaaaaaaaaaacagacatgaaatatatattaaaattttttttttggcttttatatgcataaattgttacacaaccttattttacttgcggaactccgaattgtttaatatgtttttttttaattttatttattaatagttctctcgtaatacaataacaagaaattagttcaattttcagagactaaaaattatagcagaccactttttgaaaaaattggctttatattaaataagaaaccacacaaaagacttgtgtggtggcctgagtttcttaattgtatccgattgaatcgattctattttttttgtatgatattaatttttatggtatattttgtgttattattaatttattcatacattaaaaatactttgtaaaacattaaataaatcataggcccgtgtgataacattaacatctacattcattcatgataattaaacatatatatattagttttacaataaacctatataattgagtcaaaatttcaaatttttatagttgtgcaaccaaagttcaaataacgtgagcaaaattaaaagatgcaagtaataataataaataaataaataaataaaaatacaaagtgtttttagtccactttggaaaaaatacgacataatactttgtattaggtatatagctatgtttgtttgtaaattggaaaattatggtgttatattaattttttttttaataagcaatatatactaattataatttacttttgcacatgctgtgtagcctttttctcttgagcaataaaaagaaaaagtcaattactttatctactcttaacttgaaatttgctttatccattttgttcctttaaggggctttctaggcaaattcctcttcttatttttttattaattttaatttaccatccatatagtggatcaaaagatcattcattacattactagtcatgcttttttttttttttggtaaggaaaacaaaagcaagttgcatgctcgtctttgttgaattccattaccaaacttctccattat

SEQ ID NO: 265490 - DNA, 1172 bp, Cannabis indica
aatctaagtaactacttgagtaagtaacaaaggggcataattacagaatgtggcattatcattttctataacattgaagtgcaaaagtttaagatccacctaccgaaagaagatcaacaccagctgattcgagatttggaacaagactcgctatgtcctgttaagtgaatattaagccagttagagattttcagtaacaaatgtcaccaggatcttgtaaaggaagttgtagcgaacaaaacaaattacctttgagggccacttaggaaatgaagatttataatcaggtagagagcccactcccggccatgtatcctcggtcggagtacccaatattcttcataaacaaaatagcatatgagaatataatatataaatgatgcataactttggaattgtttgcagctactttcttttcccaaaaaaaaaaaaaagtacctctcctcgcgtaatcctaccacgaaactaaagacaattgacatgtaggtactaggatcgaaccttgaaccttatgggacgtgcccctccttgggtcgtttgtcagctactttcttttatgttatattcggaactagaagctgtagcctcatttccatcaatttctagccaactaacttttacaaactgattttacaactatttaaaaactatgacaaagtgagaatggaggttcaaaaactaagtttgaccacaataaggaaagtaaagtaattacagagtcatcagtgttaatgtaccctttttaagttttaaaatttcaataagtttagaggaatggggctattaatccagatgctggactcagatacactttcattcaataaaaggaagagaaaaataacaagatgggaatgcgaaaaagaaaggacaaaacgaataactttgttcagaaataagactcacctgaatatacttgaacaactcatcaatctcagagtccccagggaataatggtcgttgattcagcatctcagcaaatatacaccctactgaccaaatatcaacagggtggagtaatgacgggatccaagcaatatttctggtgctctgtaccagagggtcaccacctagacagagccaccacaaaattataaacccaagcttggcaataattggtagagtaatgatggattccaagacaatattttaggtgcttctgtaccagagggtca

SEQ ID NO: 265491 - DNA, 580 bp, Cannabis indica
ctaacatgtatgttgattataatactataatctaacaccctaaatatgaatttcctaatacgatgaaataaacacataaagtttagaaaaccttacattgatggcaatagaataatatgtctccttccgctcaaatctctaacccttattcctttttattgtagggtaataacaagatttgagtctggatctccttctcctttagtttgattaactaccgtcttccgcactatgattgagtacttgacttgctatgtgtgtgcatggtactctatcagtaaaggcttgaattgatgaagaacaacaagaaggatttgaaatcactatacaaagaaactctcatttgctagttgtctgaaagagttagaaaactaggtttagattggtcgaaggttggatgagaatgacaacatcatgttccctttatagtatttcaacaagggattatgatttaattatatggattaaaaatgataaaataatgggaaaaaatcaagctactggctgaccatacttagtgggcctcactagttaaaatttttccagtttatttcaaccatttatcttttctttaaataat

SEQ ID NO: 265492 - DNA, 3878 bp, Cannabis indica
tacatttaatcacataatcttgattatttttcattatgttgacatcacaataaacaagaatatcaatgtgataagaaattagatgaacttataaatcatacaagtggtcacatgaacaaaataacacattaaacaagtaatgaaataaatctgtttctttattgataaatgaatattcaaaattacattgaaatagggtttttttagtatacaaaactgaacaattttttcatacttacagaacctttgtcaaaattcctataaactttttttttctccaagagaaactaaaggaatacagagcagtattcatacagtaaacacttgtaatatttaaacacttgcctgcaaggctaatacaatggactcgtggactagggattattaattcccgaaccacgtataaattacttgtcgattatttatcgttttgcatttcccttaagctctaattaatcggtttttgaaaatttcggtaaatagttgggtttggcaaatccacctgcctgaaattattgttcaatggcaaaacaaagttatttcagttcttgctccacgagttgacgttgtcttgggtgtttttgcttattctaagacctagcctgtcaaaaataggccttaaagcgacgtgttcttgaatgttttggggtggagaatcactatgctggctggccgattggtgaatctcatgttctcgaaatgtttggtcgtcccccaacacctcctggtgccacggagtggctactcctgctgtacgatctgtttaacaagatttgactgtcttctggcaggggaaggcttgtcctcgtgctcgagggacctggttgatgagccttccttgcaaaggatctctaattagatcctgacctcttatggagttctctcattgaatagctttatcaggttactggcctccctgttgcggcggtcgagctgtgcctgatgggcccagggatggcctcttggtcgtccatccatctcaggaattcgcgtctctgttgggtgaaagcatcgcaaccaacagcgtgtggttcttctgtttgggtgacctggcccacgacttttctgagcctggccaactcgatgtcctctcttaggtccacatgaggctcaataatagctagtttgtcaattcctggccttgtttctccggcataatattggggaccagtccagtttcgctccgtagaggttgttttatgttggcaagaccttttctttgaggtgttgttggcggatctgttctgggcagcaaaggtgggtcactaggattcaccgtgtcggtaggaccaacaagattagtggtattggttggatttgcaggattcgtcggatcggcagtatgagttggattagtgatgccttccgtggtgggaggaactcgaacattgagatcagttgccataggatcttgaggaaaacctaaggaagtggaggtaatggttctccttgttacaaccatgatgagtagtcatgatgataaacaatgctctcaataaaaacaccaaaatgttgacctcagctttggtcaattgactgcggagccttatttatgactgacaatcaccacgtgtgaattgtaaaagcaaataaaaaaattgacacaaaaatttataaaggttcggtttccttgtttagcaggtaatgatttattccccttttagttgtattaattcgagagataacaccacgcagattataggtttttaccttgtaatttctagctatgactctatttgaatgttacaatagtgaagactgagatatgacagattttgaataagtgagatgagaaaacagattaagtgtctagtgaatggtaagtggcgtgtgagagaggagaagcaagagtgctctagggcttgagggacttagaattcaggtcccttttcacttagcctaatgctttttatatagtttagagcttacaaaatatctatattcaaataaactaatatccctcaaaaataagagatattactcttttatcatatatttaagttaacaaaaataactaactaatctccctaaaagattgatagatgttttggggttgaaaccctacttttgtgggttgttggagctgtctggtgggtgaaaccgagttgtgatcagtccaggagaatggctctagacccccactgtggccggccgaccttttgtctggggctggccggcacatactcatccttggccagccagggtatggttcggccagaccctctagctggccattttcttgtaacttgaccttgcccgagtgtttggatcttttgccaattgatgtgttgtgcatggtgattttgcgtacgtggatataccatctcatgtgggtgatatcaataagtggtggagtgatttgatgaatttgatcatgagatcatcgctattcgctattagactcttgattagcataatcttgatgaatttggagaaaagtatattacgtttctccaagttacttattcccaagccaccttgtagtctaggtttacagatcttttcctagtaccaagtgactgtaagctcttcattcatctcaaacaaaattttaactacgtgaataataagacttttatcatctaattgatagagtattaggcctttaattaggcaccgtactgagaggtacaaatctggtattaaataccatatattccagtgtaaacacaattctagggtacatcaattagcctaaagactaaatcattcaaatacaataactacacaatttacacagctattatccaacttatagagcttggtttccatattggattaataccgagtaaatgcctctatatacactattttctgcaacatatatttctgtatcttaataaaagacaaaattactcttggccatccgatatgaaatgacgattcaatattcaaatataaaatttatattacaatgcactgagtatctatttcttatgttctggaaggaccataaatgcctacccattatccttgttatacaacgaaaaacatgacaaacccatgtttggcaactctatttttatcaaaagaataaagaaaatgcttagcagacacatgaacctgtaatataggcagaaaagtaaatttattgtcaaattttctatgacattctttctagctaatggtgttttttttttaatattatgttatctagtgttgctttgttgctgttattatttcttctttggttgactttgtaaggcatattgtatttcagatagtgccaggttttagaattcgtatcatacctgtactagggaccatcccagcaatatttggacaagtgatggcctcctatgttgtcacacagttggcagggctgcaaattcatacagaacctgtggtaagtttggatttggatcattatcgaactcttcaccaacggcttattgagcatgaagagtcattatatggcacttccgagctagtccaggtatgaaagtccacgtaatgtatcttcagtttcatgttaacgtttcataagttttctgtttacattgcggaatattattctatcctcattttgttttctttattaataataagaattattattcgggaaattagagattttcaaaacataaaataaattaaatatgtcctttttcagacatactaaacttgaccattgcagttttcatctctgatggtacccgtgcatcaaacaaaatgttaggcacccaataaagggttcataggaataagtactggggagtgaagacatgggaataagggtacaaaagagtgtcataaaaaaaatggtacaaaagagtgtaagatggttttggggaagtgtacaagactttctagaatggggaatatatttagatagtgtaggagaaattgaaggggctagtgttatatttataaattat

SEQ ID NO: 265493 - DNA, 784 bp, Cannabis indica
ataaactaagaaacaatccacacttcgcgtgcagttgtattttgtttaataataattaaataaaaaattatataagactctaaattttatatttttatataacttttctactaatataattaacaattttattaaatttttattttttatcataataatacaaaaaaaaaatattgtacaaattattttaaacttaataaataatactttttaattaattatttattatagatatattagttataataagttttcaaaatatatatcatttaaataaattaaaaaaaatatcataaatttatagaaaactcatcacatgatatcaaaattgttgtcattactgaatcttacttgtagtcacaactataaattcaaagtcattgtcgtcaccatatttcacttgttattgtcactatcattctcaataatttttttctgcacataaaacaaatcaaatactgaggtaactattcaattttatacataattttaaattgcagtcatcatcgtatctcatttgtagatactacacaataaaaatagatattattaccaaataaaagaaatatatccaataattggcatcaaatttttaactaatataatagattttaaaatattgatagacttctttcaatcgtagtgtatataactcttcaaataaattatcagatataaatattggtgaattttttattatttgttttttaagttgtcatttttttttttatttattttagttaaaagtaaaaaaaaccgtaacgattatttttattaaagttga

SEQ ID NO: 265494 - DNA, 908 bp, Cannabis indica
atagcccaaagggcattaacctgaaagcaaaagtgccatatggacatgtaaatgtcatcttctcctgatcttcaggtgctatggctatttgatgatacccagaatagccatccaagaagcagtaatactcttgcctagccaaccaatctaacatctgatcaatgaagggcaaagaaaaatggtccttcctggttgccttgttgagcttcctgtagtcaatgcagattctccaaccagtaaccattcttgtggggattaattcgttcttctcattctttatcactgtcatcccccctttctttggtactacttgcaccgggctaacccatttgttatctaaaattgggtaaggcactccaacatctaaccacttgaccacctcctttctgacaacctctttcattggtggattaagtcttcgttgtgcatccatagttggtttagcatcttcttccatcaaaattcgatgcataactgttgagggactgattctcttaacgtcacccaatgtccatgcaatggccttattgtgtgcccggagtaccctaagcaacctgtcggtctccacatcagaaagtgaagctgacactatcactggaagcttcttgtcttctcccaagaattcacaccgtagatgattaggaagcacttttagctctaactctggtggcttcactgttgatggcacaagctcctttggcacaacccccagttcttcataatacttcctattcaatggtccataagaatcgagccattttgcatacttcattgcctccatcccttcttgctcagttaactcatcctcagttaagctcaactctgaaggattttctatcaactttttcttctcgacaatagtatcaatcatatcaacaaagaaacagttatcacttacccttggaaaa

SEQ ID NO: 265495 - DNA, 833 bp, Cannabis indica
atgcattgtattcttcctcaattgaagcttcatccacactcactatttgaaccgcatatttattttgcagaaataaccagatgtatataagtacatatattttatattttttttttctttgcaaaccagtgaatacataaccaggatcgttctcgcctctatttgccattgcgctctctgcgatccgacgggacaagcttctcgtcggccgtcagtgacccttccgctctgttcatcttcgtcaacgttcgttcgccgtcttcgatcaaggatccaatgacatccccgatcaaagatcctcctccgatcttttagaggcgcgcgcgtgaatcgattctgatggtgaaccaccattaacaccaaaaacaatctcttggagcaccattttacgatccacaaacacttcactagcatcaccttcttgtatgtacacgcaagatgatcggattgcccgatcaagtgttggtgagattctcatatccccaatcttcgttcgagcagagagcttttcctctacctccggggaactgtgattcaactttggttgtgctttgctgccatctcggatgagatccatatcgaccgcgatgtctaaagcttcctcaggatcatccaaatccatcttgcttctcactgattcaacaggggcatcaatgtggttatcgacctctggagaatcgggttgagatgaggaatgcagtagtccctctgtcgatgggcagtagcgttcaaacatggcatctaattcctttaattgagccttgaaacgttgctccatacgcagttccatagaactcatcatggatctaacgaattcaacaagctcttcatca

SEQ ID NO: 265496 - DNA, 1015 bp, Cannabis indica
aattttgtcctttaaaatatgtcttgcaaaataactaccatataatatagtttaactcaaaagggcaatttagtcaatttaagcattccgattacgtttcctaataaagtaaacaagataaatcacaactattccatttctaaaaaattttagtaaacaacatattacaaatattgattccgattatttttcatttattccgttacatttctccattaatttattccgattctgattactgtatagaaaacgtaccattagtgattcggcccaaaacaagcccaataagagaaagtcaaataagagtcaaatgagtctccttgtttgtactaatgagtcaattaatgactctcaattcttcaacctatctctccttcctcaaactcaccgctatggcttttttagggttcttactactgagacaaagcttgggaaattgtttctatgggttctctaacgtcttctcttctacccccacgaaatggttagggttataggtctaggttttctttcttttttgctgtctcaacccacaacaacaaatcactcttacccagaaaacaaccttgaaaatctcacgcctcaaacactaagaacagaacccagaaactttcttgccaaactagtagcaacaacacattacagagtagtatgggtaaaagacttttttattattattttttattttgtatgtatctataggaaactcatataaatttgatttgatgagtctgtttattagtatcatcaacagagtatatgtgtttattgactttgtttattggtatagatgatgcatcaatctccatttcaatcttgtttttaagaaaaaataaatagaaacaatatatctggtattattttttccattttctctgaatctctctgccattttctttctttttaaattcacaatatcttctgattcatgtttggaattacttatggagtttatggtctttctatgagggaaatacaacattttggattggttcattaaataatctactacatt

SEQ ID NO: 265497 - DNA, 1915 bp, Cannabis indica
gttagatgtccgttggggaattgaaaactactctaatttttatgttaaactctctcgactatttgatggattttttgttagtagatgttgtaactttatggctcataatgtggccaaatgggcgttacgaactaccggttcggtaggttgagtgaatcgtctatcccgaacaatattctgtgtaacgaccgtgaggtctaatttcctatttataaacgttttctttcaaataaaaaaaaaaggtcttgtgttagtcaattttcttataattctcgtgaggaataaaaattcgaaatagaagtaactccattactataaattacttgtatttctctatttattacttaaatttatttttcttcttatcaatctaacgaacgaatattagttaaacctttacatcaacaacaacaacaacaataataataaaaattagggtaaataccatttggaccctgtgttttgcaaaagttaccgattggaccctgtgttttgttaaatgacaaaatggactgtgtattttccaaaatagtaaaaataggaccctgaacttaatttttaacatttttttttaatataatcaacttgaaaataattcctaatacgaacagatacagaaaatgtaagcaattttatcataacacttttagataggattataattaaattttattttgacaaaaaatcaattcaggatcatatttataccattttagaaaatacaaagtccattttatcatttaataaaacagaaagtccaattaataacttttacaaaatacgggtccaaaatattatttaccttaaaaattattagattaaattataaagatacttaaacaaacaattaaacaaagaggttgctaggaacaattgttgttgcctataatcatttctttttcccaaaattatagtcaagagtgaatgtccacaattaacatcttaacagagtttttcaatatggaggagaccaataagaacacagtagaaaaccaagaagaggaagaagaaaatctcaaattccaggcatcagagatcgactacgtcagttatggaggagagcatcacttaccccttatcatgggactcgtcgattctgaactcagcgagccctactccattttcacctatcgatacttcgtctatctctggccccaactctctttcttggtaatcttttattcttggtaatcttcttctattgattgaatatgtgttaatgggttttctttatcttctttttcttaaaggcgtttcatagaggaaaatgtgttggaacagtggtttgcaagatgggggagcatcgaaatacgtttagaggatacattgctatgcttgttgtcatcaaaccctatagaggaagaggaataggtaaattaataacccaatttttaagttaatttgaacaaaccaagattggatttttatggttttgagctaattctaaaaaatggggtacttttttttgggggtggtttgtttttgtcatatgaagatttgttgcaatgctgattctaaccttcaagtatgattgtactatatgatgaacacatttagatgtttttgcctaagttgatatgtactgaatactgatgtgatcaaagttgttcttacaggttgggaaatttatgagttcttaatcttatattttgtatatcttttttttttttttatgaatgtcagctacagaacttgttaccagatccattcaagtgatgatggaatcaggttgtgaagaggtatgtcagccctgactttacatgacatggttgatgatctttacagttttacttcacttttgctcttaccatcttttttctgcctacattcttcttaaacaaaccgaaattgattcggtgctgttgtgattttctcaatttcatctctattgtgccctctctaaattaatcctcct

SEQ ID NO: 265498 - DNA, 716 bp, Cannabis indica
ttattaaataattagaatcggcatttaaatagttaaattggaaaattggcatttttgagaaaataaaatggcaaaatggcaaaattgcaaagtggggcccaatttcaatccatgggcggccactttgtatggattttaccactttatttttctattattttaatgttaattaaatctaacctaaccctaggtggtttcctataaataggtagtgatggcttaagggaaaagatgatgcatctcattccttcagataaaatttgagcctccttcctaaccctagctgaaaccacactctctctctcttcctctcttctaaaccgagcctatagtgaaagagtgagtgcccacacacatcaagtagtactcaatcatagtgtgtaaggctgtgaagaatccagtttcaagagaaggagattcagactcagatcttggtgatactctgctacagaaaggatacaagggttagagatctgagtggaaggagacattatattccgctgcaaccactgtaaggtttcttatactttatatgtgtttatttcatatcgtttcagaagttcatatttaggatgttaataacatacttgttagtaaatctaagatcctggtaaaataattccaacatgcacaacaataactcaatcaaataatgaggtaaatgggtagaacttcaccaaatatgtttgagattttcaaagtctatttgatatatt

SEQ ID NO: 265499 - DNA, 1379 bp, Cannabis indica
aaaaagatggtggcttgcaaatggttatataattcatatgcatgctatattaaatttggctacatacatataataaaatattgtttcttttaaatattataatttaatgattgtacatatttcttaaaaaaaatctttttattattattttgtttacaaaaaataaaaaagtatggtatttcaaaaacaatgaaaaataatataaaatgaaaagtattacgatatttaaactaataaaaataattaatgattcttttttaaatataattatgttttatttttatatataaataacacttaaattaatttatttttaataaaaaaaataattaaatatacgtaacaaacctgcttatattttacatacatgttttttttttctctaatttgaacaaaaattatctaagaatgttaattatatttataatatatatgcagctttataatatctttaattagttaattaataatttataactaggtagtccggactccctagtcttcctcattagttttttttcttggttataatttaaataatttatgtccgatgattaagaactacttacacaatcacttacgtcgtttgttatattaattttatctttgtcaatttaatgggggcaagtcatgcatgaaattttaaatattaattatgtaatttcgtacgtactacgtatggagtcaaaagatctacctaataattaataactatatatatatattagtgtgttgaactctcgattaattatcttataaattatatttatgtgctgatcgatcaagacaatagatctatatatatatatggcctacaacaaaagctctccactaatttctaaacatatgtgatttaatggtacgtattacgtaaatgaaatttcagaaacagagtagtctatgtatagctgtaattttaatatatattatagtaaaccctaatgtctattaaatatttgtcacaatatatataggttctggcagatataaataatatatattgtatggttatatgtgccacaattaattttatatgattattaattctgccattttttataaacatatattttttttttaaccataaacatatttattttgacacagtgtaaatttatttttaattaagtatatatagtaaaactaaacacataaatttttatggcgctttttaatttttacactttaaaaataataattttttttttgaatttttacggaattctacatagaaattcctattgcaagtgctgtaacttaaattgtattacaaaatcgtatagaaacccataataattacacaactagcgctgcagccactttagaaacttaaaccggaaatttgaaaaaacagttaaaaaaaataatatatgatgtaa

SEQ ID NO: 265500 - DNA, 841 bp, Cannabis indica
tttgaagtttaaaaaatatatcttactagctaatttgaaattagttagttttataataatatatattaaaaaaattagctaattaattacactaatacaggtttataaatattaatcgattcattaattagaaaaattatctatatacaattccaattctaaaaggtcttatctatgtacattttttatttagttattttttaattactttttttttaatatttagaatcaagtacgaatttagtgacttttggtttagatatttttcaattatcatttttttttttgaagatttaatttaatatatatataaatattaatttatttaaatttaggtttggtttagagacatataggaattagtgtggtatacaaattttttcatttagttataatatagatatttatgattttaaaaataattgagtgtgatttttataaatatataccaaccaaatatacggttcactttatattttttctaaatttagtattattttaacatatatgcattaaactattattattgatttcataatttagtatactacttcaacttcttaattttcatgtctctcttactctcttatttaatattttttttttgttgtatttaagtgcttttatacatttttaatgtgctcaataatttgtatattaaaattgatatgtctatacaataaataattttttttttcttaacagtgtatatgaagatgctttttcttcaaacacgtacaaagacgatttggcagttggcaggagcttctacaacttttaaagtggtgaaatattcttaaaacaatctcacatatatttattgttgcccttaattttgccc

SEQ ID NO: 265501 - DNA, 2119 bp, Cannabis indica
aaaaataccgtttggtagtatttttgtaaaaaatggcaaaagttatatatcatgtaaatttccctttagtttccatgattttctatatttccttcattaataccatttgttttgaaaaatacctattaattttaatttctttttgaaataaaagcataaatgtaattaaaagaaaaaagcccaattttgtagcccatgagaggcccactacaaaacaagttgttcttccttataagcccaacaacaaccgatcgaataggcccttaaaatagtgacaatgtttttttagaaaaatgacattatacaaagtgaataaaataataatattgctttgaaaatgaaagagtgcattaattataacttagtagaaaagcagtgcaatgcaatgttatttttctggggcagtaaaatctgacacactctacttcactttacattaaattttctagaaaatataaaaaaataaaaatataataaaaaatttaactacgtagctccaaatacaagcaaaagtctcataaataataaaacagaagtgtttgtcaaaattcactacatattattattctttttttctatgaagaaaactatggaattaagttgaaactagctgagttgagacatacccattttccacaaaggaaaggtaaactaaactaaactaaactcactaactttcttttcaatgtaaatttccaatcctttacttttggttctattcgagtgagtattattattagatagttgagagaataaggattacgtggtgcagattcttttatcgggttatcatcctatcctatcctctcagatgatcgataaagtagtaatgctataataatgattaaggtgattaaaaattgctactttattgtgtgtaaggaacttgttttagattccttgccataattaatactaataattttttgtttttctaatatattttctcaatgagaaaactaattattttgatgtaaaattataaaataaagagtattgctataaagtattagtgaggtataaggtattagtgaggtgatattttgcgattaattagtgatattatataaaaaatattactttaaattatatgtgacctgatacttgattgtattaataccgataaatattgaaggttgctagcttaacatttctcatagcctggaaataagggtcattgtctctaacctccattcttttatcttttatgggcaaacccccatactccatctccattgttctatatagataatataattattaaatcaaatttctttattatattattatttttaaaaaaatattttaaagcctcacattctattgcaggaaagcattaaattctgtcacaacaataaattttcacctctctcacaacaacaacaatatatatccataattattatctctcttttttcttctttcttcttctcttcattttctctaaatcaaaagagtgatttttttttttgccatattattacttttaacactttttcttttgttgggtgttttttgctttcaaaataggctcaaaaagaaattaaaatgaagaaatttttgataatcttctttgtgatttgggcaagtttgatcatgttcctccttggattctctaccactcatcaatatggtaatattcaaattttcttttcttcttctttgaacatatatatatttggctatgtataattgattctttttttgacatataaatttatgattaaatattttcagaaaagcataatggattaataataagtagaaagcaattgaaggaagagaagagtagttttatggatatggaagattatgggccaattgatccagttccaagctcaaaggcatctataaggccaggcccaatagagcatgggagtccaataatcccatatataccaaagccttctcctcctcctaatcctaatcctaattctgaccattcctaattcctattcttactagggatagtggtatccattgtttggaatgaagatagtctctctgttatccctgcacccaaacactacttttgtgtttgtttttcttgttctttaactttgctttgtaattggatgaatttgtgttgttcatgaccactacaccactttgtatatta

SEQ ID NO: 265502 - DNA, 1176 bp, Cannabis indica
ttggatgcgggaattaatgaggagcaacgatgtgtgggtactataaaaaatcttactttagtcacaataaaatttgtgactaaaagtaaaaaagttgtaactaattataaattatcattcttacattgtgactaaaaggtccgtgattaaaagtattagtcacaaaaattataatttgttgtgactaaatataatttcagttacaatacttgttgtgaataaaaattaaattagtgacaacttgtatctaaataatgtgttttagttataagaaaatcacatttaattacaaaaaatttatattataactaaaaaattatcactaaatatgacttttttttggtagtgggggcttggggtggtgctaattggttgggaagaggcgtttttgagcaacaacgttaattagcttctcccatcacacagggctccggctctaggtataagcgaactactcccgcacctagggcacactcattttagaagctcaaataaaacaatactttttaaaaaatatatattttaataattttaaaaatactattatttttacagtaagggctcaaaaaaaattttgtcaaataacttatgtcaactcaagaccggtcctgctatcacatagcttaaaaataatattaagaaaacaaaatagttgtttaatatatataaatatataaatataatctactaaaacagaacaaagatgaaaatcctcacaaacaaaatacacacaaaataatgccatagcttttcataatgatattattgatactattgaaaccaaatgaattagggttttattttgccaaaagagagaaaacacaaaattttataatttttcacttttttttttttcttttgttcatatatgtaaggatcaaactaattcaattgtaatttgtataaaccaccaaaccaaaagaatatggtcaaaataaagagtttttgcctatgtggtcatgattgagactcctcttcactttcattcatcattctagtaatctttttttttgttatcttgtctttttcttcttctcatgtctcttatgccacgtcatacccctaactgtctcactcttttttttttttttactttttacattcgtacttctctcttcttttcttatacactctaacttcacttcttattacaataacaaaaaaaacgtaacactt

SEQ ID NO: 265503 - DNA, 952 bp, Cannabis indica
ttaccaaaagctcccatggccatcaccttcttcttagctcaaccttgttcttcttcttcttcactctactccttctcccattcccatttcagtctcatccgaaaacccctttcactcaccattaatccaactcttgaacccattcaccttcccaaccacaaacctgaatttagaagccataggcctctgctgaatgatgcaaccaaaggagaaccatttagtccttattatctttctcccagtccaattcaagttctgcctgaaataaaaataaattgattattaatttaaagtatatatatataataaaaaatatattttactcaaaatctaaaaataacactgtacgtgtgtcttacctattatcgaattaaagatgtagaacagagaaaagtagagaagaaaacaaagagagaaaacaattgaaagagctcactttattatcatgaatgtaccagcatttatacagaatagaaaacagtaataacaaacattacaactgacaggaaacggcctaaacggatttaactaataactaaccatagtaacaataaactagctatgattagtgaactatgttaacatcccccctcaaatgaaaaggggtggaagccatttttagtttggatttgaggtaaataaaacaatccttagacaatggcttagtgagcatatcagccacttgatcatggctgggaacatatcgaactggaagttgtttgtctagaatttgatcacgaacaaaatgtaagtctatctcaatgtgcttttgagcgggcatgaaaaactggattggctgccaatgcaaaagcactttgattatccacccatattatgggacaagcatgcaatgaaacttgcagttcagtaagtaatgacacaatccacttcaattcggctgcagtgttagctaaggcacgaaactcactctcggtacttgatcgtgccacca

SEQ ID NO: 265504 - DNA, 1052 bp, Cannabis indica
ttttattttatttttttaaaacattttaaatatatatatttatttttaaatgatttttaaataagttttaataaattttaaaatgaaaaataaaaattaatgatgtggactaataaaaggatgacacgtggacacttacctagaaaaaaacggagaggtacttacggaagttccagaagtgtgacggaaggtatttttaccgccaaaaatatgacttaggtatttatcagctactcgggataaaacttaggtatttttgccgcaaattactctattttttatacctttctataaaagaaaatgttaattttacctctaatgatagtaaactattgtaaaatttaaaataaatatgacacttattttattgagataatctaatatctttgcgtaatttcaccagttacaaagtaatttctaatttatactttattttgtgtcacaaatttaaaattgataaactatagttgaggtcattactaatgatgagatgacaattcactaagttaaccttattcattttcatgtatgctctctttcatcgggttcctagtgcaacatcaacaaaataattggctttcttcacaaagcttgattgccatagtttatcaaatggatcatcaaaagaatatatattattaatattatagtgatatttctcttttgaagaaaaagaataggaattgttattaatactatttcttataataattacaaataagaacatgcacttttttttgacataacatcaactcttatattaagcagttgagatacaaatgaaaaaaataggtggttaataacatggttctataatagtttcagtgaagctccccaaaagctaatatatgaaaataacaaaaataaagaaaataattgtttgcaccgtggactaagtcaggtgaaacggtgtctttcttgaactctcatagagttgcatccctgcctaagccaacacctctacccctcaaggttggcggcatgcagtgctacagacttcggccactagaagcttaaagggcattttgttcaaaaattaagaaaaattaggt

SEQ ID NO: 265505 - DNA, 586 bp, Cannabis indica
ttggtagatatcaaagtctagggaacatggtttagtacataaacaatcactgaaacagtaaaattgaataaaattagataaaagtccctaaatttaacaatctcaatagttcagaggaaatttttaacaactaaaaaaatttagtgagcataatttagcatatgtcaaaatttagaagaaaaaaaaatagtaattagccaaagaaaaatggcataggttggttaggtaagcccaccccatagaatagaatcacatcattccaaactctagatttcgcatccgcaacacacacaccaactaccaaattaacctcgccaacttaattaataataaatatttatgctaactcagattcattagtatataaatactaaacatatatatattaatacatcccttcattaattaaaattaatttcccccttcatggcatatgaataaattaaataaataataatatgttcacttaggattctctatctcccaattgtggagagaggtatgtgagataatttaaaaagccaaaaaaacagatagcacaaatagaatgaatacaaagacatcttactatacgactcttatgttt

SEQ ID NO: 265506 - DNA, 2471 bp, Cannabis indica
ggtcttagatgattgatggtagtactaatagctagtagttaaaattatgttatatatagtattaaatatatatgtagaattattagttgtaatattgtatggagtatagtagtgatagtagattactaacccttcatttgttgtaattgctttagtcttataattttcagtttagttatgtatagtgtttaatggattgatatagtttttataagttttttttttttatttattatttttcttttggaaagggacttttgggaatgggaagtggtgtgctttaattcatgagcattgatgattttgggtgttcaagatgatgtttgttcatttattattttattctttttcatttggaataatttgaatgagaattgggaaatgtttgaatttaaaacatgaaggaaagaaaaagagagaaaagttgtaacactagttattaatttgattttaaataataatgaaaaaaaaacttttttatttatgaaagaaaaattattaaaaacataaaatgaattagaagttcaaaatatgaactccaatcaaacttaggaatcttatgttataacaaatcaaatttgtaatcatattgttcctcgtaattgttcaaatccactcatgtgaggtattgttgtagggacgacacatgtcacactcaaaataaataatttaagcttgagccgatcttgaaatttagtgcaccatagaaaaaaaatatttttaaattctagtttagaaaaaaaatataatactttttaaaaccagtaaaaaaaaatataattttaaaattaaatttctgtgttaggtggacttagcccgcctattcacaaaatcaggcctgactttaagactgtctaactttttaagtagacaacttatgttaattgtgactcactttaagtgaggccaaatagctattaagaaacaacttgcatatggagttcgtcaagaacaccaactactcaaattatggtaagagttcatggagaagtcacagtgggaaaattacaagcaaaaagaaaaattgaagacaaaatttgaacatgacaaagcacgctcacctcctactcacatcttattcgtgggtgtaggagaagaatggatctcgactctatacatttagcaatttgaaaatgtcatgagacagaatcacactcaagaagggaaggttgtgtttcctaatacctcgtgctaattcccaagattttattgtactatgcacaaacttagccctccgagcaaccccagttaaggctactcgagaacccaattgaccaatttacctttttaacattagaaaccattcattttttgtgcactcagtgtagttttcccaattttttctatgcatgttcttaccatatttattaggctataatgtaactcctattaaagagagctaaacattcataatggccaataaataaagtttggaaataattataaagatattattattaatacggtgatcttagattaggattcattaatatttaaaccacgcacaaattctcatttaaatagattctaactctttaattttacaaatattttgttgaagaaaaatatatattatacatcgaaaaacacgtttttgtgctcttcaattctaaatttcagaaaaataaaataaaattacaaattacaaataaatatttatataaataatttacacaaatatacaaaaacttcaaaaattatataaggctaagtgaaagtgttaagaattcaagaaaagatttttttttttattattttaaaaaaggttatttgcccttattttaattagtttttctgccttttggaaagttgtgttaattaaattttttcctttagaaaaagcatcattatttgtaaaagtgaaccacaattaagtaacacgacaatcacaatgaattatcataggatagtgtggtactaagttaaaagtttcgaaacactgctttatactgtggcaagcagtcaatgaacatttctttactcaagatcttcttgctagatttttttattgtagagtctctcttatattactaatagaaatgtcacttttgttagcacagttattttataaattgtactggcaaaaaagttaaagttttactagcgcacatttgtagtaattaaaatctaacttttaccagtgcatttacacgcggagaaaagtcatttttactagcacttttcattttgtgctgtcaaaagttctaataccaacgttaatttgccaatctcttttgccaacacatcaaaagtaaattttattttaccagagcaatactaaacttttgccaacacaaaaatatgttggcaaaagtaatattttttgtatatgtgtggtatgtggtttatatcctgaatctcacattcacctcttctttgcttgctcattttttaggagcaatttgattttttatgtttacatgtgcttaaaatttttctcctaaactcataataactaatatttgtaggat

SEQ ID NO: 265507 - DNA, 541 bp, Cannabis indica
tgataagtacttataacaatataagattttaatatttattatttgtctctagaaaaattcaaaggaacaatatatatattttgtacaatttaaaggaaacattatgtaccgaaaaataaggaaaaagtgtcatcttaaaatagaggagaaaaataatcaattaaagtcttaatatagaataccctatgaaaaattaaacaaattaagcatagtaaaactttatcctaatcttctatagactgagttgtttgaatggtgagttgattgtactttagactcattgttcgttttggatctgcatacaactggattttttattttttggctgataatttttcttaattttttggacaaacaacttatgtttttgcaagaataacttttaaaattactttcaagattattaagataagattcattatttttttatttgcgaaaaaatattatatatatacctcatttgtatacgattttaattgagctatagttcatgacaatatattgttgggttatatgctctaactaaaactttatttctaat

SEQ ID NO: 265508 - DNA, 3672 bp, Cannabis indica
cgtgacagagagttcgaccattgtctcaagaaacacatcatccactgttgttaacaggtcacatccaatggtagccaagtccaaaaatggcatagtcaaaccaaaaggttatttggctaccaagcaccctttaccagaattattattgctttctgagctaagatctcttcaagcacctctcaagcatccaaactggtttaactctatgcagactgaagttcatgctttaaaaaggttaggcacatggagactggttccttatgaagttggtatgcatatcattgacaacaagtggattcatcggatcaagctcaatgtcaatggttcattggacaagttcaaatcaagactggtagcaaaagactatctgcaggccccaggtattgactacgaggagattttttctcccgtagttaagccaattacatttaagaatgtactgtctctagctataactttgaattggatagtcactcaattggatgttaactgaaacaatgtttatgcatcaacctcctgggtttgtagatcaggccaaaccagatcatgtatgtcttctacacaaggctctttatggtcttaaacaagctccaagagcttggaatgacaaacttaaagctagtatacttcaatggggtttcaaagcatcccaatcagacacattcttgtttatttatggtactggagtcaatttaattatactcttagtctatgttgatgatattctaataacaagccccaacgagactcttatataaactagttacatatctcaacaatcaatttttcctcaaagatttaggtgatgttcactactttattagagtggaaatattcagagattctaatgggatgttattgtctcaaaccaagcacatcacaaatcttctagttaagcttcatatggaaggagctaggagttgctctaatcctatcagcagtacaacaaaactgtccttaaatgatggagaactatttggagaacctactctttatagaagcacaattgtgactctctaatatcttacttttaccagaccagatgttgccaatttctcaaagctccaacaatgttacattgggaagcatgcaagaggttgctaagatatcttaaaggcgctatctctgatggcttatttctcaagcccgtcgttgtcatgactttagaaagatactctgatgctgactaggctagctgtgttgatgatagaagagatcaaaaggaggatatgtggtgtttttaggtaataatctaatctcatggtctgcaaataagtaacaagttgttgctcgctcaagcactgaaagtgaattttgtgctttagcaagcacaacaactgaactaaaatggattgtctccttgcttactgaacaacaagttgtcttaccacactgccatgttatttgggttgacaaccagaatgctactgctctagcaggcaacccaattttccatgcttggtcaaaacacattaagatcgatttacattttgtcagggaccaaattctggaaaagaagttgttagtacattatgttcctagttttgatcaagtggttaatatgcttccaaaccactgtctaatgatcattttagctaccttaaatccaaagtgaaaatggctcaaactctattagtttgaggggagatgttaacactattaactaatgctagttagttttctcttagcttagtttttagttaattgtttaacaattagttaaggtaattaatgagttttttaagtaactaattatactctatttcattaactcatgtataaataaaaagtcttttaactgattagatcaacttttgctaagctgattctaccatttttttcttcttcttgctctgcttttagctttcttttttctacactgtagttctcattgacacaagaagagtaagaacaagtctaagtaagttgtcaacaagccttcactctagctagaatttggagaaaagaaaaagtctagaagagattatttgtttgggcaagtaaattggtgtaatagtggtaatgagatgaagagattaattgtttggacaagtgagttggtgtaatagtattagtgagatgagaattagaagactttgggcttagaagaaaagtgaataagttttggccaattttagtagacaaaatagcatatgctacataatgataaatcacttttttttttccccacatatctaatagattaagagtctttttattataactttgatttaatattttctttttaaaaaaattaataatgatttatttattttttatgaaatcataattaatatatgtttatacaaaatttgagaaaaaatgaggccatggtgacctcaggaccccatattttctattgctaacaatacatatttattttatataaaatatagttatctaatagaattattgattgaacaacattttttaattttttaatatattattacttaacttaatattctttattaagtttatagtattattatatatatttaaaaataaaattaagtagatattttatataaagaaatttaaatttaaatacttaagatattatagattatttttaatttagtttaattttaaataaaaataaaactatctagatattttaatataaaaaattatttattatatttaaaaataaaaaattatgtaaatattttatacaaaaaatttaattttaatttaaataattaaaataatgtaaatatttttaatcatatttttaattttattgatttaactttaaattaaaatgaaagaaaatactgcttaatcgggcacacaataaattacctccatataaaatacatatatatataatcagggcaaaataatatggtagctatagctaaaaaaaactatctcatccttgatcaagtatcaacagcttaccctatctttgcaaatataggaaaagttaactaaccgggtcatatgtatcctaaaatctaatcataaattctttatccaaccctgtcctcagaaaaattaatattaatattaatattaatgtactcagaaatatatcttaaattattgtgttatttttttcatttaagaacatatatgtgtaataaataaattaattacgaatattagaacaaaaaaaaaaaaaaaaaaaaaaataatggtgttggaatgtgatatatatttgctgaaacgaaattagtatatgacgtaccatttaatataagtttatttttaattttttgaaaatttaatatatgctagtaaaaaaaagataataattttatatatgactcatgggagattttttttttttgaactcgactcatgggagattaaaaaagatatattttgagttaaaaaaaaaagatagtgatgatatatatatttttttttaaatgctactttttttttctttctcagcaatactttaatatagccttgataattaccaacatgctaaaataaaattaatgtaacctccaactacacatgaaagcctccaacaatttcattttaaaaattaatctcaataacaaagttaacaacataccccttaaaaaaatctaacaacttaccaaaatttaaaattaattttaaaatacaggtttctttttttaaaaaaaacatatatttatatataatttaggtctatttcatatacccaaatagtaaaaaaggaaaaaatagatt

SEQ ID NO: 265509 - DNA, 1321 bp, Cannabis indica
tatgtatatatctacatataaaaaaatttgatgtatatatttgagtgagggctttagcctacatataggctaaagtccctccgtccctgcatgcactagcctaaaaatgacattttataattaattagtaatattttataaaaattattaatatattaatataaaatataatatttaattatattaataacgatattagacataagaccgattcgtttaatcgtgtgttatattgaattatattaaattgtgattgtaaaaaaatatattatataacttaatatataaaatatacgatataatatatggtgtactaaataacttaataaatcaaattgtttaaaatatatattgaacacctgatttatcatataacaaaaatttatttgtgactaaaatatggtattatgttacaagttgtcactaatttaattttagtcacaacaagtatagtgactaaaaacacatttaatcacaacaaattgtaatttttgtgactaatacctttagtcacgaaccttttagtcacaatataaaaataataatttataattagtcacaacttttttagttttaaccacaacttttgttgtgactaaaagtaaaactatttgtagtgtaataaagattaataaaaaaaattacttttctatatgctttctatatagtctaaaaattacacataaataaaatatatttgaaacatttagatattttaaatttatatttggagagtcttatggtaaagctaggtgttggttgacaattttaaaggcatatggatcgaccagtggcacagagccaggtggtaatttgagatgtgtatgtatatatatagtattgcactttcatgacatctctctttaatttattatattacaacataggaattaacatagtatttttttttcttaaagaaattatggattttttttaattaatagcaatctgctaaagtagcttgcaacttaaaatagatatcaatcaaaattagtattattaaatgagccatccaattcgaattgtttaacaaaaattaattagtgaaataaaatcagaaaaattgtatagtatattaataatatatatgtatataatgaacgtctccatatagtgggaactaagtattaatttctcaataagtagatctctataatgttttcagtcgatttaataattacagttttatcttataattaattataggtacaagaagtcaagaaggatatctagctaggacctaattaaagagagcaaagtacgtagcttcaatattatcatttttgtgatgattaatgttattatagttgattagaatttt

SEQ ID NO: 265510 - DNA, 942 bp, Cannabis indica
atgtcttattacaaataatagatttatatatagatttttgttgtgtgtagtatatttatttaaaataatatttagtttttattttattatatataaggattatatataaaaaaatttgtatgtatacctaatttaatttaatagtgaatatatataattttgttagtatgatatacatgttttttaaatattaattaatttaatattattataatttgtatgtggtatataattttaaataatatttggatggagtaaaaaaaacatccctatgtgcagataaaaatattgtccacgtgttgtttaataattttattaaatgctctccattcaagttttttttcttttttcttttaatttttaatcaaatactgaatttctctgcaccctcaaatacttcttaaatggaatttgacgtgtgatgtgcagaataaaatccaaaatcacatacatgtataaacattgatctatgaccattccatctatagtcttttccatggtctatgaccatttcagtacctctttatataagccaaaagaagtttctttcaatgatcttttgagaaattccatttcaagctgagaaaaaacatacacttcaaaaaaaaaaaaaaacacaataaattgtcctaacttacaatccatacacagtcaagaaaaaaaaacacaacaaattatatgttatcatctcagcacagtatacgtttagacttctccttaaaccccaaatttgggaaggggatcattcatcatgccatgccaccaactaagctatggtgaatggtgattgagaaataggaaaaagatattagagattaaataaatgcactttgggttgagggtagagaaagataagtgtctgattttaaaataaaataaaaatgtaataaatataatatatatatatataggtacacttttaatgggtattacccattcatg

SEQ ID NO: 265511 - DNA, 995 bp, Cannabis indica
aaaattatatatatatattaatataattattttttattaaagtattaaaattaataaataataaaattatttgaatttgatacaaaaaataaattaatgtacgtaaaataaataaaaatcaataacaaagttaatatctaagagtggggacttaatgttactaaaaaataaaagtttggggaccaatttattaaaaaaataaagtttgaagaccaacttaccaaaacttatatattttggagactaatttaccaaaaaataaaatttagaaaccaacttatgaaaacttatataatttaacgacctgtacaaataaacataagggtgactactcaatggttacgttaaatatgtaaccacgatggttatattaattttgaccattggatcattattgaattgatttgattaattaaagaattaataaaaaaaaattaatatattacctatgacatgaaactaccattcatttattatcatattttatttccttataaaatatcaattaagattaatttatttaaaaattaaatttaattataattactaattaatttttccaattaattattaaagaaggttcttttagcaattaactttttttttcattcaaattattaatatatttacaacaaagccccctaaaacatcaaaaaatttaaacatattatcttaattataaaatacaaattaaagataaaaaaaattaataatttttttgatgccttaaaaaaaaaaatctgctctttctccattatatcatcttcttctttttctcttaatataaagacgcaacttcactgaagagcttcttcttcctctcaaatacacaaatccaacccttaagatctttctcctcaattcctagacccaaccctcaaaatgactcccattgttcacgagcttggacaaactagtatatatttattgtttctatacactttagtgcgacaaacgaatgagcgaattgggttatatggttgacaggcgagtcg

SEQ ID NO: 265512 - DNA, 933 bp, Cannabis indica
atggaagctaattgtgtgctaatctaatcgtactgacaatgaatgagagaacgaggtaataggtgacgtcttaggtaaatgagttgtgacaggagatgattgattttgttgagataactgaatcaacaattcaggtttatatacaaaactaagcgattattaactactgtaattagttaattaactgaacacttaactaactaacagaaattaaacactaataatagctaatctaactaaactaattaagtatgattatcctcaacgaaaataaccctaatgttagagcactttctagctaattgagatgtaataaccgtaacatttcttttgcaagaaatatttatgcatatgtaaaatttagcgaatatagcaataggtagacaaaactagctagcccatatagacttattgcagaagcatttgttttattattcgagtagtttcgtcgaaaaatcttgacgtataatttagtttcaggaaaatatatatacggggcaccacagccttcttttaaatatataattttttatgaacttcttttaaatattatatgcagttaataattacttgtaaaagataaacaaatatatactctatatatgtacaaacagtagtagtagtaaggcaaatcatctggtacagctgtaagtacgcaacaaataaacaaacatgttgttcatgaatcatgatgatccgatcatgatgactcaccaatctctttcattcgtacggtcactactgtagtttatactattcactcattatcatgatgaacccataataatttttacacaacttgaccgcaagtggtgacaaactcattcttattttttacaacacgagatcatcataaaatgaattttaataatttattttatatataaattataattccatatatgggcattttaatttgccatccgttcattt

SEQ ID NO: 265513 - DNA, 865 bp, Cannabis indica
aagtaaaagtttaattttaacgtacttaactacactccctgtgggatcgacttcactcctagtgagtctactactttaaacgatacgtacacttgcgtgtgcaaaaatatcgcaacaaatagcttaattgttaaagtaattaagtcaagggatttatatataaataaaaaaaaatatttataaattttaattgctaaaaaaggtcttgttaaatatttatttaattacataaaaaatagttaattataattaattaattctaaaaataaaatttttacctattggtaacttgctattgctggtaaaaaaaaaatgtaaccatatggttacaataaaaatgtaactattgaatagtcacccatatatttatacatacatataaatacaaaatacaatagaaaaatgaagtttacatacaaaactaaaaaaaatatacatgaataaaaatagatgaaataaaaaaattacctgtaaaaaaatgaatgataaatgtttgtctcaaaggctcaattttgaagagaccatagaggagagaacaatgagaatttcttgcataataacttcaactttcaaaactatttatagaattcatatgtgtaggggagacaaatagaccagaataagaaaagctagaagggaagattgagagacgaaaaagagaaaaggaaaagtttattattaatgatttttttgtggcattttatttgtcattaataatttgatctctaactattgagttctactttttataggctaaataaagattagaaataaaagagagaaagaaaagttgataattaataatttgatcattgttataaaataatataaagtagatgagaagaaagaagaagaagatgaagag

SEQ ID NO: 265514 - DNA, 535 bp, Cannabis indica
gaatcttataaactccaccacttgataacgataaatatattgggttataaaaaaacaatatatatatatatacgtgtagcataacaatttatttgacttttgtgtttacatatatcgatcggataaacttagtctgtaggtcatctcaatatatgagatgtaaattatatataaattattatctattgattttatttatttaattattttttgaattgtaggtagtattttgtggtggataatactttttgccgacgaactattcctaacgacttttcaccaacgaaatgtcctcattgatagataatactgacaaaaaaggagctttttacccacgaaatttgtcctcattgatgcacatatttcttgtagtacttattatagctgatctctctagctaattgctaatgcggcgaagttgccactgaaattcactaattcaatattatctatatatataatggccacgtggatgttgatatttttaagttaatgatattaccgaatcgagacagccccgatcggaaacaaacat

SEQ ID NO: 265515 - DNA, 679 bp, Cannabis indica
tttcagtatgttcttgtcactgtatatttgtcattcttcgatctcaagcaccatgtaatctgtgatgatctccatttcttcatcccttctattttttgttgctttatttgatttctctattataaaatctgcaacttcttcagccattgcaaacatgtttggagagattgttatttgactattatcatgatttgaatcttgtccttcattatcaaattgctggttgaatggttcattgtgtatttgtagaaccaattcattcactatcttgctttgctcttgtattggttgttcaaaagattgatttttcactgtttgtatagctatctaatcagtagttgtgatgcatagtggagaatcaattactccagcctgtgtttttcttagctcaatgtagaacttgagggaattatcactcagtagtttcattggtgttgttcccggtgatatttggtacgatatgtctatgctgcttttgttgcaatttatttttatttttatcatctccatcaagttttctaatgaagaattggttggaattagaattccagtcattgtgtagtcatcataatttgtattttttttgtccatttaccccaatatttgatcacacacatgatttgttccatacctgcaattttaaaggaaaagtaatgttagaatcttattttaatttttt

SEQ ID NO: 265516 - DNA, 520 bp, Cannabis indica
aattagaaaacaaaattaattatcttttaattattgaattaaatatattattgaataatttatttaattaaaaagataataatacaataaaaaggatttaactaatttttgttaatcagttaaaaaaaatatttatatttaaatttaaattacgaatgtaaatcaaatttgatatatatttttttaaaagaattaactaaaagagtttatatataatattatatctatatatataaaagagtcaataacttttgggcttttacatattaaattacttttttaacatttattttatttttccattaaaatttttgtagttcaatataaatcacattatttgatcctattgccacgtcaatgtgtaaaaaactagaaaacaaaactaattaattatcttttaattattgaattaaatatattattggataatttatttaatttaaaagataataatacaataaaaaggatttaacttataattgttaatcagttaaaaaaaatatttatatttaaatttaaa

SEQ ID NO: 265517 - DNA, 1287 bp, Cannabis indica
tttaattaccaaatacactgacacggtttatttcttataaaataaatcgttcaaataatcataacgacttaaattaccaaaaatttaaaaaaaaaacattaaataaaactaacatttacgtggcttgccacgtaacatccacctagtaaagtttaaatacttgtttatcacttgtatgagaaaaaataattgtgtgtgtaataaaatatttaaacgccattgcatactaaccataattttttaaaaattttatatttgatcttaaataactacgatgtattaaaatttctctgcatgacaaaaaaaaaaaaaataatctaccaaaacgttcttttaaatgtgtgtcttttaggtttgtcctatttattattattttagaagaattatctcatctattactttttaattttttttaaaaaattacggtttgggttgctccagtagtttctccggtgatttttatgtgggttgttatacaaattttggttgcgatttaagttgctccattagttgctataagggtttctgtgtggaattccgtaaaaatataaaaaaaatattatgttaaagtataaaaataaaaaaaattatttattttatcattcgaccagaattgattaatgattattatattattttgcccacttacttttttgtctttttctcttttttttctttattttttttaaaaaatattttacactctttataggttaatttgttttattagtttatattatatagtttaataatattagtttagatcaaattttaaaaatattaatattttaattatttttaatgaaataaaaataatcactgagatttagtcaaatataatttatctgatatttaaaggaaaattttttgattttccatacatatttttaaagtaaaattggttaggaaaattaaaagtataagtaattattagaataggcacacttttcctaaaatccaaaactacccctctcgaaaacccactaactcgtctctctccctccctcaattctctctggctctcttcgcatgaaggaaaattcctacccaaaacttcggccacaacaaccatcccaacccaaaatcgcggtcagatcaccgtgattacacaaaccgcgatgaggaccaccgtgactacccaaaccctaaccacaaccacgtacagaaatgtttaaggtaagttttgaatccctcttttaaaaatttatgcatttgtttattttagcatttaattattcattaatttaggatatattttagtttggtgatgcctgatctgtgatatgt

SEQ ID NO: 265518 - DNA, 1302 bp, Cannabis indica
cataccaaacataagttagacttagtatttccattccagagtaagaaaaactgtgtaccaaacagccccttagggttttcttttttcaaaagttatttctttatattttctaaaaaatgtataatttttttattctttaaaatgatttattttaaattttaaattaatttataatattattatttaatttttaatttttttaaattatttttataatatttttaaattaatattacgtggaccactgaaaattcgccacgtgtacaagtgtgtacacgtagacagtccactgtggcacttaactgtgattttcggacggaggtgtacagagcaaaacggaatgggagtttagtaggttttgccgccaaaattttggtttttgtggttaagtgttacaaatcctaaaattaagtgatttagccgtcaatatcccattattgtgtcaaattaacacgtgtcaaattattgtcaatctttacttttcataatattttaataattagtgacaactatatttaaaattttaaaaattatattgtaaaataaatcataaattttattaaatgataattaactaataaattgtttcaaattttaatcttattaattataataatatgttagacttaactattattttgagagtgaattgttataagaatacataaatttaaagaaaacttatcatatgattttaaaaccgttttcatcattgtatcttacttctagtcaatatataacattcaagggtattattatatatcctcatatttaacttgtagttaactatccttcccaacatattttttatatatacaaacaaatataacaatgaattaattacttacaaaatctattaattaataatgaaaaaaaaaattgtaactaattaaattgaaattctaatagtatgttttagatattaagttatttgaggtagattggatagatggaagattgtttgaggaaggcaatgtggtcctttatttgagggacgaattattgggtgtgcaactatagtcccacattggctagaaatgtgatacgatcatggtatataagaatggacaatatctctatattattataatattttgggaaggtgcccaaaaacaaatttgtgagagcttaggcctgaaacgaacaatatcatatgtgggatatatggtgtaagtaggtgagccttagtaatctcacgatgggattcgtagatgtgttcagttagacagtgttgtgctctggatagaggagttggcatgagaaaagagcatgactctcataatagtctaaagaatattccaa

SEQ ID NO: 265519 - DNA, 780 bp, Cannabis indica
gttttcacataattgatagcattgtttacaagccgagattccataacaaacaaaatagaaggactactagtagatactaaacgggagaggttccggaatgcacgatcactcccaactcctcgtgcattccagctcacaatcttcatgggggcgggcaggcttgctcaggggcacagcctgccatactagtagagacttcgttggcttgtggagtgtcggaacgggagcgcttgatttgatgcctaagttccccattgatcatctcggtctgccttttgaacttgtctttggagtcaggcttgttccttttccttgaagctttcgagcccgagggggtggccgttcccggttggtaagtgagattcatggctttgagtttttttgctggtgtccaggagggggaggttgtcagggaaaggaacatgacagtatttggaactggtggagttggaactgctagagttttggggtgtgatagtgtggctcggattagagataggagaggctttttggacgctggagttactcattgtggcattgaggagagcggtgtatgaggggttgatgatctcggtttgggtgccgatggtttggataatagtatttgtgtttgcataagcatcgggttgggccatgggaggagggtcttgagtgtagggtgtggggccggatttgtatagacccacttgttgggattggccgtgggagggtccttgctcaagagagccataggtggggaatggaggggagttctccgggggggcaacacaaactgcacta

SEQ ID NO: 265520 - DNA, 561 bp, Cannabis indica
ttttcattttttttctctattttgaagaaaaaaacattataactcatctaatttgagtgcccttataccactatttatcctaataataataataataaaatgataccacagtcgacaaatgccatcgaataatcttgaagcaattaaaatataataaaaataatttgctcggggaataagaaatttgaccaggcaattaattatgattaagcaaagtaattatcaatctggttgaaagttaattaatttcaggaacccataatcaagcaggctatgtcgatgcatggaaaaaacaaaagagatgctcccataagttaatagaaaagtaattaatcgaatgcttgtagtctatatactaaatcacttcttcagccacagacaaaaacacaaaattcatatatacgtagtttcttattggtacctgtggccattgaagctgtagagtagttttccttgttctacatcccatagctttattgtagagtcaaatgaagcgctgctcaaaaaataacaattgaagatacatgattttatttaatttttttaagcaataataatatc

SEQ ID NO: 265521 - DNA, 1030 bp, Cannabis indica
atttaataccaataatttgtatacttaaatctgtcgagaatgatagtagtgatacagtgataacaataatttaaatatagtagtgactacaaatgggatacaataatgacaacaattttaaaatcttatggtgatagctattttaaatgtagtgtcaactacaaataagatacataatgtataataatatacacatttgtttgaaatagtataattaacaaaatatctataatagataaactaattaaaaataattgtttattaatttcctttatgaagccaaaaaaatatcaaaatatattaaaatttgaaatttaaataattttatgacttaattatcattaaataaaatataactgcactcgaagcgcgggttgtttcctaatatatcaataatgctattgttaggtttgatgaaatggcattctctatgaattttcttatatttttcttgctctctccttttttctaatttttaaattgttattaatatattttttattttatagtaattcttaattaatattaataccaaacaattaaaaaaaacaattaaaaaaagtaataacatgtcttttcattttaacacatgtgtcttttttcttattttttttccttttggttgtcacagcctcttgatatctttccctcccaactcagcttttcttcattttaataaaatttactttaattgatttagtggatagcaaccggtatcagttttaaaaataataatagtcaaaattaattacaataaagtttaatttctacagtttcaatcattgcaaaagttactatttaactcaataagaagctcattctcttttcactacaatatatcttatctcatatgagattcatacctctcatggcatttatattgcaaattgcaaagggaaatttgattttctatacttattaaatttaaaaatttattttttaaaccaatacattttacactataaaaatatgccaattttttgaaaaccccaaaaatacccccctcataactcaaaccctttctctctcc

SEQ ID NO: 265522 - DNA, 540 bp, Cannabis indica
taagttatgtatgtaagattttgggttcaacattttctttaaataataatttattgccttttattaattagtaagtgatttatttatattttacttttggtataaaacaaaaacagttgttggtggctttggtgagtggttatcgatacaatggggtagaggtgaatgcaaggttggcagattcagaagctgacatagttcacaaggcaatcaaagacaactgtttcaacaatgatgaactcattaggattcttaccacaaggagcaaaccccagctcaatgccaccttcaatcgttacagagaagaccacaaaacttctatttccaaggttttttttagtcatcacatcaaaattgtttgtgtttttatcataactttataatgagatttcaaaatgttaattggtatatatatttttttgcaggatttgttgggtgattctggtaacagttttcagaaggcacttcataccacagttcgttgcataactgacccccacaagtactatgctaaggtatattcatttcacacataattac

SEQ ID NO: 265523 - DNA, 508 bp, Cannabis indica
tatatatatatatataagctataatgatgatatgtgagaatgatcagacttattattactaatgcatggagaaaaaaaaaaataaaatgtcagaagaaaaaagaaaaaaggaaaaaaactagagaagtgtgtgcgtcagtgtcagtgtaagaaaaacaaacaattttttaacggtatgtgtgtaacggtatatatgccaattaattgaccaacaatattatgacaattaattttaaattttagtatgttgatgcaattaattctattattattgtgttgttcttattatacaaaaccaaatttactcaccattattaattattaaaaaaaattacatttcattataaacttttatttttgttttaattatgggtatatatatttctgtagcaataaaaagttttcatgttgggccagccaataattataataaaaaaaatacaacgttgttgcatgtaacgtaaaatacttgttcaaactcacgttctgtcctattacacaactgttt

SEQ ID NO: 265524 - DNA, 1317 bp, Cannabis indica
aaataaataaataaagcaaacagagagaaataaataaataaatcttactagttgtacctgatactgatacagaagagagcctctgaaggaggagaagaagaagttgtaggagtaactgtataagtagtttctctctcctattccatatgcccaccgaagaaaacaatcatcatgaaactccctctgcacccagcactcgggaaaagtattttgctccctcatcaaaaccttccttcccttaaatttacctctattaactcatcttctctctcagtagtactatcctttaccactgcaattccatagccatgaaactttctttaccttatttctttctcattaccttctcttacttcttttttctgcaaatatcaatagtgttttcttcatcacagtctcctaatgctacttctcatgatcatcatcagcttccattacaggtcattgccctcctttctctaaaatcatctcttaataaagaaactcaatcaaactctttccaagattgggacccttctccaatcctctccaagcagcctaatttagaagaccctctttggtgttcttggtcaggaatcaaatgccatgacaagacaccaaggattacaagtctcgacctctctcaccaaaatcttactggcacaataccttctgaaatccgttacttatcgagcttaacccacttgaacttgagtcgaaacagcttcagtggacctcttcaaacggccatttttgaattaactgagctcagagtccttgacatcagccacaacaactttaactcaactttcccacctgggatttccaagctcaacttcttgcgactctttgacgcttacagcaacagctttactggacccttacctcaagacattgtcaagcttaggtacctcgaacagctcaacttcagtggaagttacttcaatggcagcattccgaagtcttatgggagtttcccaagattaaagtatctgcttctagctgggaatttgttgacaggttccataccacctcaactgggcttcttatcgcagcttgagcacttggagataggctacaaccagttctcaaatgggcttccatcagaactcggattgttatcaaatctcaagtacattgatatttcaaataatacatacatttctgggccaatcgctcctcaactcggcaacttaacgaagctggaaacgatgttaatgttcgggaacaacctttcgggagaaatcccagcaagttttggtaacttaaaagccatgaagattctcgatttgtcgtttaataaactgtcagggagtataccagcagagttatctaagc

SEQ ID NO: 265525 - DNA, 582 bp, Cannabis indica
tacacgacatgtcaactgtcaagaatcctaaagcaatcaagcaaaactgtcaagcaagaataagcaaaaggagttaagcaggccatcaagaccttggtcgaccatgtttggctggccaagggaagctagtaggccagccaagggaagcttgtaggtcggccaggtcttgagaacaagttggtcgaccaagaacggttgtcagactaaagaggtctgttcaaccaaggaggccaagcctttgcaaggaaagttgaccggccaagctgaacaatgaagatgtgtggaaaaacgctggctggaccatacatggttgacccatggaaggacacatgccgaccaagccctaaaataaggctggctggccaacttgtgcaaacaactctgaacaggctgaatgaattgcgagacaggtccaacaacccacaaagatagggatattccctcaagatattagtcttatattctagggattgaactattattttttgtaatttaaataatagataaaaaatgttaatgtccctattttaaaggaatatctttacctattttaatgagaatctcttgtaagccctacactat

SEQ ID NO: 265526 - DNA, 869 bp, Cannabis indica
gaaacttaggatgaaaatagaaagaataattcccaaggttagtcaaagcagaaacaaaaagtagattgcaatgaaactttggtacataaagaacattagatagtgaaagactttgtgaaatgttgacagtaccaatactggcaaccttagcaaaatttctattagacaattttagaaggtatagattgatcatactgaatatctttgagtaatgaaatatcattgcacacatggtgagtagcacatgtgttaatgatccatttagaatgaggaacaagggaattcttaccaaaaaaatgagacaccacaggaggttcaataggtgcactacttgctggttcaagatttcattgagatagcaatgccatgagtctttgacactagacagtggtcaagctagcaaccaagtcctgatcccccatagcattctccccatgattccctttaatgccttctgtgttggtggtgaagttggcaacagaaggttttcccaagttactggtgtttcgattgtcattcctattaggaaatttttcgtgcaatttttgtctaggaggatatccatggatcctaaaacacttttccatagggtgacatgtgataccacagtaagtacagacccttttagggcgatgaagctcgatatttctagcaaactgacctgaattcgaacctattctagatccaaatcaagataaatttttgtcactttcagctaaaacaatcaacaaacacctttgactctcttcttgaataaccgatgcataggctttattgatgttaggcaaaggatattgcattaagatctgagatcgattactagtgtaacacactaactaacaaaggtgtattacgtgatttttaaacat

SEQ ID NO: 265527 - DNA, 1070 bp, Cannabis indica
tacctatagcactcacaacaaatcctaggaaaacaatcttatcagtgcaatgcatttactaaggttagcatatagtttatgttttcgaagcacatccaaaaatgattgcaaatgtgaagcatgatcatgcaaactcttaccataaattagaatatcatcaaaatacacaacaacatattttccaatgaaagcacgcaaactatgattcattaatcgcatgaaagtgctaggtgcattagttagtccaaaaggcatgactaaccattcatacaattcatgtatagttttaaatgcacttttccactcatctccttctttcatatgtatttgatgatgcctactcttaagatcaattttagaaaacacacaagaaccatgcaactcatctaacatatcatctaaactaggaatgggatgtcgatattttactgttatgttgttgatggctcgacagtcaacacacatcctccatgttccatccttcttaggaacgagaattactggaacagcacaagggctcatgctttctctcacatgccctttggtcatcaatccttcaacttgcctttgtatttctttggtttcatcaggattagttctatatgttgggcggtttgggattgaagcacctggaataaaatcaatttgatgttctattcctcgaataggtggcacaccatgtggtacctcctcgggaaacacatcctcaaattcctgcaaaatagaaacaacaacactaggcagcgaagaatcaagttggttagtgtttaaaagagcctccttgtaaacgaacaaaagcattggttgttttgtacgccaagctcgcgtaatctcacttttttttgcatacaaattattttgttttctctctatttttttctcattgatagaactcttctttcttttctctctcacttgcttcgattgttttctctttttggctctcttttttctcattcttttgctcactcaagttctttttatcactcaaattcttttgatcactcaaatttttaaatctcacttggtcatcatagacttgttttagtgtcaaaggagctagagtgact

SEQ ID NO: 265528 - DNA, 1617 bp, Cannabis indica
taatttacagtctataaaattaactataatttgtgaggactaaaaaatgtgagtgtgtatattgtatatatacatatatataagcttagtagtggtcgtttcatataaatacaattaattatatataaatgaaaaaggtaatggacaatgacacagatcttattaattagtgatatacagttaataagttagatcaaataaaacatatctagccgcaactaaatatatatatatatagccaatactacactatctatatatatagttgtatttatattttgataatatataatctacaatattattgggtagtttccttcgatcaatatcatcagtggatcatgtaatttgctttattacatttttataaatatctaaaatatcatttcttgattaatgctagctggaaccaacgtacatgcatgattaaatatttatatatgtcttatataagttaaaaccatgcaaatataatattgatttgagagagagaaagatcaggtaatggtgtttcatcacactagttgaaaaggtaagtacgtagtggaaagaaagaatgaaataaattgattttgagaggagagaagaaacgtacgtacgtggtcaattttggattgtagttcgatttcgatatatcacaaaattaaaagcaatgattaattaatatgtgattagctatataggtttgggttttgggttacagctatcaatatttggcttttttgttttctttccaaattgcaacttaaaaaaaagaattaatgtatttatatcccactatacatctctatagctagctactcattcctagctattatcaaataacgtgacacttgaagacgacgtccactattttatctactatacataattagagcattaatattatgtctactactattttttataagtcacgttttatatgatatatatacatatatttttttattatataaaatttgatacttcattacatgatactgataaaaatattagacactaataatacattttaataattttcatataattgatactatcctcttcatatattagatcatgatcatattttattaatttgttgatagatatacatatatgtttgtaatattatagattaattcttctatatattattaccttttgtacttatttataaaattatatatattgatgatagggtacaacaaataatgtaaatctttgaattttgtacatttttcagtactatgcatgcatatatatctcataatttttatttttacaaaatgatcaccagttatatatactactaattaataatgaatagaattacgtacatggtggaatatatatattctatataaagtatatatatatgaagtttctttttcggaaaaagaaaaatagttgttggagttggacgatgcatatttgcaaaaattggaattattaggttatatatttgttgaaagatcgtataaattccttccccactaacaacatatataaatgtaattttattttatttacgtatgtacgtgcatatatatatattgaccagtcatgatcatatcgttcaaaaagctatatatgtatacaaataatagaatcaaatttaaaggacgttgtttggtt

SEQ ID NO: 265529 - DNA, 525 bp, Cannabis indica
gtaatggtttacactaagtacacaaccattccatcattctaaaatttcctatcactagggtatatccctagaaggacttaggcagctactagtaactaatcataaaccttttactttcatcaatatacaaatcgaatttctagtgaggtaagtttggatacaatttgaaattcaaattaatgatctttgaactgcatctccaccaaatatttctccactcctatcatttcgcaagatctttaaccacttaccttaatgttttcaacattgctagaaattcatgaaatttcttaaacatttcaaatttctttgcataaggtaaaatctagagtaatcgtcttaagaatttaacgataacttatccacctctaaatgcacatccatattcgaatataaatgatcttactttcaagtggatatagacatatttctctttgtagagaatgatcttgtcaaaatcactatgaacaagatacaaatgccatagatatataatattcgtggttattagtttttttttttttt

SEQ ID NO: 265530 - DNA, 525 bp, Cannabis indica
tcattgattgttccgtttcacatgacaatataattttttaagtaagaaaatataaaagtttattaaaataagtactcataatattattaaaaatattatataagaaaatatattatataagaaaatatcaaattttgaaagttgatataacataccaaggataaaatataatgaaacattaagatatcataccctattattttttttacattaccctatttatttatttttataacaatagttttttaacaaattaatttaaaatcactacaaaaaatcttattttagtcccaacaaaatttgtgagataaaaaagttgtgactaattataaattatcattattgtgttgtgactaaaaggtccgtggctaagtattagttacgaaaattacaatttgttgtgactaaatgagtttttagtctcaatatttgttgtcactaaaactaaattagtgacaacttgtaactaaatactatattttagtcacaataacttgttatgactaaaagtagtaattttttgta

SEQ ID NO: 265531 - DNA, 1376 bp, Cannabis indica
aaaccaagggtaaaatggtcaattaccaaaccccgaaaattctaacacctctaatatctaacaatgataccccgataatattctaaaccatataaaatacgactctctaaaggcccgacgtcgctttccacagcttccgaacacaatcacagaaattaagtaattacattaaatagcataataacatatataatattaaatatatttccaaaatatgcatatcataattattaatttaatctcatacataaaccctaattatttgataattcaaggtattaatcatatgcggtctttacaactactaataactcgaatatgttacagaataaatattatttttgaccatatattacctattttattaaataataatttagattctgtaatttttataataatatatttaactaaaattttatcaaaataaaatttaataataatataacctaatataatattatgatcagagattatattttttttaaaagaatatatatatatataaaacctaatttattatttcacaaaataaaagtttgatcaaactaataattaatcttatattatatgttttccttgtaaatgaaaaagtggcccccacatgcaaatgcacaaagcaataaaagaggccgaccaaaccgagttggctgtgttggttgtgtcaaatctcaagggccctccttcttaagttttggcttcttctctacaaagttagtctttggaagcctctctctctcatcattctattttatttaatttttatttatttttttactttgattacttattaaacctttttatctaaaagataaatgataaaaataaaaattattagacgacccaaataggcggctttcaagatggttatcatgttgtcattataatagttgtataataattagttccatttattgatcacattcccacataatatttatatatatactataaatataaaaagtgtgtccaactatatacatattttattatgtagtgtaagtgttcttcattgtatcttcttatattaccaaagatagggtcttttaataatgagttatttctctatttgtgacattaaagattatttgcttacattcccattaaaataaaatacaaaaaacttgtcatgtcattgatatatatgaacttttctttattatacaagaatgagatggatattcttgttcttctttgtattttgttttattcttcagtagctagcttaattagtgcataagtaatatatattttagttaataattattaataatgtgattttgattgttagatatcttggtttagccgcatagtatcatattaaaagaaatcacacacatacatgaaaaacatatatatatatatatatgggtagg

SEQ ID NO: 265532 - DNA, 1213 bp, Cannabis indica
agatattcgatctccatttttggacttacaatggttaaatatttttaatatagcctcgagacgctagacttcgtcccccttatggatgattattcgttgaaagcattgaacaccgtaacaactcatatgataagtattttgtaagttttcgtctccattagactctctcctacggttactacttagagataaatttacaggatatgaaacaatggtggaagctcataaaatgagaataaccttgactctcgcctaccaggacaacgttggattctcattttgatcgaataaaaggttgctaaaatggtgtccattttagatgagctgactactctattcaactaatgttatctttgactctcgcctaccgggacactgtatttcattatgttggaaaccttggaaaataataaatatgtttagtttttggtatttttgaaaacatatttgctttacttgttattttctgaacttgtgtatgaatttattgaaccaataatttatttttgtttattgatatttgtagtgtcaatatgtaaaccccaccccatgatcctcatctagaatacgcctttaggaatgaacttcaaagtatgaagatgacacctgatcagagtatcacttcacgcttgctcatgatgaacatgaaattcaaaaagtagctatgttgggaattgttttatctggagagcaaagagttcattttattctcaacagcttatcacctgagtttcaccaatttattttaaacaattggaactcgtccgacatagacaagctggacgctaaattgcgtggttatgaacggacattgtcacttgcatggagatccttctccagtaatgcaaataagggcaaaagcaaagttgaagatattgaaaataattcctctgacaatcctactacttcaggctcagttgagaagaatagagaaagtgattacacttcctcagattatctttcacaacagattgaaccaacaataagaacaatccaaaaacagttaaggagtgattgcaatgctttcatttttgaatcatgtgtttttaagaatgataaatccacctagattcttgattatagatctacaaaccatgtctgttgttcattgcaattgcttgaaaactggaattatttaaaattcggagagttgaaacttaaagttggtaatggtgaaatggtattggttagagctagaggaaaagccaaactc

SEQ ID NO: 265533 - DNA, 514 bp, Cannabis indica
atatatatatattaattatcatttacaacatctaccttatatttttgggcacatgtcgcatcaaaaaagttattgaagacgtgtggtaaatctggacctactgaataatttgagagaattagacaaactttatattatatatattagtatatatatatatatatataaatatatcttcatggggaaaaaagttttaagggaaggtggccattaatttaacgtgtggaattattactagtatatatttaaataagcataagtactgtttatcaatcaaaagaaacaaattaataattatcatgatattctcatgttctcatcatgtgttggtagtacaatttaatttggaaaagtatatataaaaagtttttcattgaaagccaaaacccaaaaacacacgaaaattacaaaaatataaatctaaatgctagtatagatattatagcaagccacgcttggagcactcacaattgggtaatgtatgataattaaaaataaaaaaaaatgtcaaaaa

SEQ ID NO: 265534 - DNA, 369 bp, Cannabis indica
aaatatattttttaaaaatatgatacagtagacaaaaatatatatctttttaattttatttttttaatataattatttatgtggaccaataaaattgggtcacgtatacattatgttcatgtgtataatccaccatcagttaacaactaaatttggatagaaattataaattactaacggtatcgtacttttaggggttttgctaccaaaatatggtttttaggggttaattgcaagtaaagtgaaactattaagaattttgccataatttactcatctaagaaatatttttctttcaaggatgattgacttatgtcttactcaataagttttaagtttttatttaatatataaaaataaataatttat

SEQ ID NO: 265535 - DNA, 605 bp, Cannabis indica
gtcttaagaagagtcttcccagccactcaagaacccggagtgggggtacttgggccaaattgggaagggccatatgaaatcgaggatgagatcggctccgaaacttataagctaaaaaggatggatggaaccattgtgccaagggcctggaacgctgaccacctccaaaaatattaccaatagctcaaataaattgacttacgccttgtttaaagaatttgtaccgtccaaatgtatgcaacctctaaattttataataaaactgagtgccttaaaaacaaagttttcatgtcactcaggggggtactaaggcataccgcacggacagatgtaaaacaggctcaaagtaaaaacaaagtcaaaaagaaatatcctgacccaaagggcaggtccaaaagagaaatatgcataaaaaaggatcatatatatataaaaaaatcctggccctaagggcaggtcaaaaaaaatatataataatatatacaatacaaggggcccggggacaggccatagataattgtctccccttggaaaataaagcagctacttaattaaagattgtcttaaataaaagaaaagtagctgtaaataaaaaaaaagaagaa

SEQ ID NO: 265536 - DNA, 1800 bp, Cannabis indica
cgtaagctagactgaatccctacactagctagattcaaaatccctttcgaatcagatctgaacctttgataactcattcatgtggccaattttggggcccgactcgttaggaccgtcagacaccatctatttctccattggtatgatattatttgctttgggcctaagccttcacaatttatttttgggcaccttcccaaaaggtctcattcgaatggagatagtgtccatccttaaacacccaagatccttcccatttctagccaatgggagactttagttgtacacccaataattatctttctacacattaacaatgtgggactctctaacaccccctttaagatggtagctatttcattcgctcaacatcttagctaactcgatcaactcttttttagctcactattcctgatcataaatagctcttttgttctatttttaaattggtatttttaattttttttagtttttaatttttcaatgtgagttaaaatgaacaacgtatattaaaataaaatatttcaatcacactaataaaataattcatgaagcccacttgaaaattatctgaaaaattaattatatatcattaacttttttttagcactttattattattgtatatatagtttttatgtatatataatataactgataattaaaggattacacatacatattagttagaagaataattttattaacatcaaaactatataccatggagccaaaaagtcaaagaagaagagtcattatcatcaatggcttgcataagatcactactctagttttagaaatatctagacaaagacctctctgttaccaatgtttatgataattaattattatataatacttttattaagtaaacatatttagtataataaatttatttatcctagacattaaaatatattaatggtaaattaataacaatttaatctggagtctaaagtcttgctttcgagttatatatatatatatacaaaacgtccaaacgcaccttaatcttatatatatcaaaagtagagcttgagaaaatacaccaaagctaataaaagagaatataatgaagaggaaaagatcagaagtattggagataaatgggtcagagataagatccgccattgaagagcttactatgcttgtcaagctaatcaatattaataaaaatgatgccaaaatccccaccatgccttttctttctctctgcaacttattacttctccaagttcttggttagttctctcatctcatataatcttatcatatatatctaaaaataaatggtttttttttttttggtatatttcagataagataggaccaactatgactgttcttagaaaagacatacatcaaaacattcaggtaaatatatatattagatcatcaatatttttgggaagtttaatttttaattttattcttgaaaaataaaattatttataattaatattcatgatttgtttgtagagggtggaaaaggttgtggaatctgatccttcagtgtattcaaatgtggtgaaaatattgaagaaagaggaaactgaaggcacttccaaaatgagaactagttgtagtagagcctttgtctggcttacaaggtaataaaatagatttaatattatggggctttttcaaatttatagagttaattaatttaattaaatttactccatcttcgtttaatcaattatcaaatatatttattgttccttataaaaaaaaaatactttattattacttgtctatggttttctattataaatgcattaattagtttacatatttact

SEQ ID NO: 265537 - DNA, 532 bp, Cannabis indica
tattttcatatatttacaatatgtgaacatatgtattacatactttggattcttgtatttattagtgtcttaaaaaaaaaaaaaaggtcatatatatatagtgtaggagttaactttatttaattttgtttaacatttcaattgaattattgtattttgaggatcagcagaaagatcatgtaacacattaatcatgatgaagctaacaccaaattagcttaaatgtgtgttatattcaaattaattataaagcatttttgtttagcactttaaggtgtccaacaccacagctacgtgatgttgaggcttcacattagttagcgttattgtgttgttagtcaaagttagttaaatctagttagtattcagtttcagcaagtacattccttaaggcatcaatatcggcagttaattaagttattggggaaaattttgtttttccaatactcttggactatgcctttaaataccaacctcttctacagtcagaaataattttcagaacttcttcttccttctctcctaaattctc

SEQ ID NO: 265538 - DNA, 502 bp, Cannabis indica
agaataaactgaaggttcctaaacatgtcatccgagaccataagagcctgtttagtacgcatgactgtattggattggactggactggacaaaattagattatgctgaaagtaatcttgtgtttagtttaagaatagactggactattttatttatttccttttaaaaaaatttaaattaaaattaaaatatataataataaataaataaaaatgaataattcgcagttaaaaaataaaaataattaaattataaaataaaataatatatcatatataatcaaatatatatcataaatatataataaaatagtttatcatatttttatttaataaataattaaaatagtaaaataaaagtacttgaataatataatattatttatgataaatactaatttaatacaaattttaaaattttaaaatattaatataaattttctagtaatttaaaaataatatataattttagtgtcatattatttctcttagaatcaatttaa

SEQ ID NO: 265539 - DNA, 525 bp, Cannabis indica
cccataaatcatgttacttatcttttgttaaacaatttaaaggttgagttttaactatcaaaaatttaattacccacacttttagtataattacatcttatataattattggtattttaaataaagtgcacacacgtggcgtccctgttggacagggcgttacagcttcaatccataaagacacttgtcaagcttgcaaacatggttttccttgcctttaaccacaaacccctttggctgctccatatagatttcttcttctaggtccccatgtagaaaagctgtggtcacatccatttggtcaatctccatgtcaaactgagtagctagtgcgagcatcaaccttattgtcttatatttcacaactggtgagaatatttctgtgaagtctatcccttctttctgtgtgaacccctttgccaccaatctcactttgaaccttaccggtttatcctcggttctcccttccttgactttgaaaagtccaatttgcaagataccatactcttgccatcgggtctaagt

SEQ ID NO: 265540 - DNA, 953 bp, Cannabis indica
atatagtattaatgattatttattgttattattgttacattgatattttttggttttttttcctagtgtaactctatttagttataacctcccaattagaatataatttacttagtcccaaattgtattcttacataaggttctatatatacatatacgatcaaattatttgaagcccatatataataattaaaagcaatttgatcttatccataaaatttattgacaaaatttgagctaagcgtatcaaagaatatatatgatttcaaattatataatatcatatacgaacattaataaaaaaacattaaatatcaaatataagagtgttgctattattgttagaaggaatccgacataatttaatgtgtgaattagggtgtggcatatattgtccaattaaatttactgtgaattaataatctggcataccgaatctgatcttaaaagttgggtgttatggcattgcattgatggtaggggtggtattatttattgggcagataggattgggcctaagcatatctactctactctcaataaatggtctcaacaatatggaaacttctataaaccatcaacatttttggaagaacgagtaacaaaaggcattctcctggtaagacatgatgaattaatctaccaccatcacactactactactactactattgttatttgttttaataattattgtgaatttattactaataagaacaagaacatgttaatccaaataatagaaccttttgaaaaagaaaattataataatatattacatatgagttacactaataacaaccttgacatttcactgcagggtgatcaaactgtttcaaaataaaaagctcgcctgtaagtaaatgtagttgtgaatttgagaggaatataaagtgaaaatattgtgtgttcagatgaaatctgatcatggacttaaacaagaatgcggcacg

SEQ ID NO: 265541 - DNA, 1009 bp, Cannabis indica
cacattataaaaataccaattttatatttatttaggtttaatatgtgaatgttcaactcaaagtccactaattattgtattgttgacatttaattgtttttatatatttattttcaagccttatggtattttgacaagttttgctcaaagtttgttatatttgtaataatttaattatttagtgatagtccaaaccgcataaactacaaaaatcgtactgcaccatactattttttgcggtgcaatttttgcgggtttttagtttcgcggtgttggtgcggtttgggaaattggaaaaactgcatgtgcgggttggtttaaaaaaaaaaggcaaaaaccgcaccacccgtaccgcgaacacccctaaaaggcagggtttgaatttcggagacagagcgggcgggtatgggtttaaatatttatatctgtttatatctctatgttgagattaataacgacacatttttttttgttacattgtcatactcatggttactttgtcattataattgcaatcatcactctcctcaaaaatttagatttcctgtaattgccgctgatacttgcaccaaaattaaattagatctgcatacaattgaattgtttgtttttggctgataatttctccgtaattataaaagtaaaatattatatattatatacattagtttgattagttttattttaagtacataatagtaaattttagggaaaaaaagtaaaatattaggtaaagttttataaataagagctataattggcaatgatacagaaattcctaaaataattctctaaaactcttaacttttaaagaatatgagaatgaaatagcagatttcacaactgttatagcagatttcacaactgttatagaaatataattgacaattcaacagcgagaaaaataataataataataataataataataataataataataatataaagagcttaaagaaaaaagtgcaccttcacttcatcctagaggtttttttttaactgtgtt

SEQ ID NO: 265542 - DNA, 521 bp, Cannabis indica
atgatttataaagtaacctagtatataatacagttaattatctgggttagctgctaaacccaatttttgttattgagagttattgaaacaagaattagaagatacgtgttgtgaaaattatattgatttataattgcggaagtgtacacaatcacaaacaagtaatacaatgataagtatcaaagttcgtatccacagggacttttatactaaataatgcaatatcaactaagaacaactaaaaaacttaaaataaaataaaataaaagaacattaccaaatcaaaaaaaaaaaaaaattcttaattcttaattctggagtttagaaataatattttaagctagataaactaaaattaagaagccaaaagtgattaaagttgtgaaaatttcagattttagaaaatagatttgggtggttaatttcctcctggtatgctctagttgttacaccaatgagttagcaatggtctggcaatcatatcaaagttaactgatgtcacaaatacatatcagagttaa

SEQ ID NO: 265543 - DNA, 667 bp, Cannabis indica
aaaaaaaagataaccaattaagtgaaaaattagatattatcctttttcaagtcaaaatctactaatatcttaaattaatttaaaaaaaataattaattttaaaaaaaaaattaatttaattcagataattagatttaaaattcaaaaaataaaaatcaaaatacaaaactacacaaaaaattcgaaattaattccatgaaaaaataaaaaaattggaaaaaattgcatttcgtatggatggtatccgcgagcatgcatcaggtgggctaggcgtgatttgtcgcacatagaggctgcatgcagcctgtccgtgcgcgcgtaggggtgtttagacacgaaatgcccccctaaccgagaaatctcggacatgcatacgtccaaacacgcgtgcacccgagaaaatagggcatccgcgcgcgtgtatgaggtgtcaccaccccgtgatttttccaattttcaaaaattcataactaatttaaataaaatcaaaattgagttctgtaaaaaagagaattgtataattttttccatactatccaataaaaataattccagaacaaaatccaattattttacataaaaattttgtaaacatcaatcaatcatcaataaacacattgatcaacatgaatcacatccaaatcacacatacatcgttttaaatcca

SEQ ID NO: 265544 - DNA, 536 bp, Cannabis indica
atcctccttgaaaatgattttatctaattggcgtatgcatatgaaatctatatatttatataaaggaaagcacacaaatgtataggtggctctctagaattttttgtttttatttttctaattttttgagaattttatattaatgtgctaaaaaacatgagtactcactaatcttacttttgttaataatcccacattgtttataaagtaaagtggaacattacatatacactataaaataagtcctttcttttgttatttttattttgtcctaattttttttttcttcttggataattgattaaattaatcttatttaattaattagttagaaactttttttttaaaaaaaaaaaatcatctaatctatagtgtgtgcttatatattttattatttatatatatttataaaaaaaaatacaatttattttaaattttgggagaatgtcatattagttttatataatttttttatttatacaaatatactataaataaataatttcttttgtcatttttatttattctaatctata

SEQ ID NO: 265545 - DNA, 1206 bp, Cannabis indica
aaatgaaataattattctactaaaatgatgaaaatagttttatttttattccattccatttcattgcttccaatcaaatgacacttaagtttatacactgttcgactatggaatgcttgaaaataaattcattgaattcaattttgtaagttaaagcatttgagatattttgattttttggtaactattatcttaaggcgattctaaattcaattttactaatttggtgtataatttgggacactgattgaaaattgagagtattagtgataagaaagatgtggtaatgtaatatgaaagtgctaaaatattaaagaataaaacaataccttcaatcatgtgttaaaatttgtgagagtgatgaggccattattggttatgaaatgtcaatagataccctccaaccacatccaaatcttaaagaattagttatatattctacatgggggtgtcatgttgtctagtctagttggttctcatcccttattgcaaatccagagtcaacttagattttatataattgtgagaaatgtcagtatctagtttcattgaatcaataggatttgaatctttagaacttggagtctttaaaagtagataaaaaatgtggaggtaaagatagattctcaagtggttacaaagtttttgaataataaggactgtatggtaacttatcattctgttttgagcaatcacatgctcggtgaactctattgctcataatctgattaaactagttctttcttttgttgaagtgagagtgtggtagtcgagtttacttgagtttatgtaagtcttttggacttgttttggcgttttttctaataataataataatttttctaataaaaaattgattctttaaaatttggagtctttaagagtacatatacaataatgatttcagacacttgagttgacaatccggtgaataagataacgttgtaaaagtaacagctacaaatgaatgcccagaatctgctgtgagatttaaagtacttgttcacgaatgccttattaaatttttgtattccgatctttacattgggttgaataatccttacgatcttctcttaagaactcgaaaatttttgtagtttccttaaatttgaaggatctaagaagaggtatactgcatttagggccggcccaagcattttgggagccttgtgcaaaattttaaaattgggctcttaaaaaaaaaaa

SEQ ID NO: 265546 - DNA, 1328 bp, Cannabis indica
aataataaaaatttaatgatttggacgaattaggaattgccgcgtggcaatttattgtaccagatacctatcgaagttacaaaattataacgtaggtattattaccgccaaaaattaaaattaagtatttatttgcaactaaaatttaaatttaaatatttataccgcaaattattctacagtaaaaatatctatatttcgatcagtatatatgtgtagcatttataccctttcattgcatatataaatgaccctttctgcttttgcatgcctacgagaattggccttagtttcatctctttttgattggatcatctccattatttctcgagtttttgtcctcaggcattcagatttctcagcaatactctgttaaaaaccaaagtttttttgcttattaattggctagttaataaaaaccatatattatagaagtgaattaatatataaagtggtaactaaagagtaccatattggaggtttgtagtttcctcatttctgcttctattggactattatcattattcaccggctcatgacaattattaattactacttcttcatccaaattcagggacaataaatgttgaaaatagttgtcaatttcttgagtataacattcccattgactttgagaactgggggaatctaatggaattgaatcaccaaaattttcttcactcattgatatctgttttccaccacttactatgaagaactcgtcacaaaattcaggcttctgttgataaataaaaaaacagccactaattgccgtttttgctttcctatatataataaataaagtcaattttataaaaatacaaaattatatacatgtatcccctactagctagttaattaacttgttcaataattataaatattacctagatgaagatttcatgaatgtgagtcccatgaccaggttggttatatggagtcctgaaatcaaatctatgatgagttcacggattggcttatcatatttctcaaccttgaaaacttcagctttcacctatcaaaattatatgaaagcaaaaattaattaaaacttagggaattattaagaaagaaaaactacaaaactatatttttatatatataccttgccacaaaaagttatgtactgggaaagtaacttatcgatattttcttgttctttctttctaataagttctaacatctcttcacttatgtaatttgcatgcatctttccaactgcaccaaatatgaaaatacatcaaataattaacaaaccaaaataaataaattaattaagtagctatatatatatacataaaacttacaataggtgtcaacaatatctt

SEQ ID NO: 265547 - DNA, 1099 bp, Cannabis indica
ttgtatgaacgacactacaagcgattattttcatgagttttttttttttttttttttgtcatcaatcgatattaaaatgtaaaaagttgtaagaaattataaataactataatatgtacaatcatataaaaaattaaattataatttttctatatgccaaaaataaaaaccttctccaccgtagtgtcaaaaaatatgccctacctaaaaaaccttcctatgaaacatagatatgatactctaaactctttagagcaaagtctatgccgaaagaccatgtgggctaggttaaccgtgcacacttgtgaatgaagaccgagaattgttataaggacaccacactttaaaagacttaggtgatgtttggttcaccgtaatggtaatcgtaatggtaatgaataggtttcttacatggtttgtttttcgcttttaacttctgtaatccattacaatgtaatagttattacattgagtattgtaatgatgattacataccaaaaccaatgtaatccctattacaattacactctattacaaagaaaaaaaaataatattttaataaaaatatagtaaaaaatgtcaaaagtctatgttacccctttttttttttaaatatttcataattttaaaataaaaccaatagggttattttggtcaatacaaattttattccattatattctcatactaaactaaatacaataattctgattacaatgttcattccaactattaaagaaatcaataaaaaagagtattattataagtatcaatatcaatttaacttttaatataacaattattaaattaaattatataaattttaatatttaattattctaataataatatcatccttgtgcagatttaactggattaaaattctaaaatccatatttatacagattggatgtttattggtatgtaaaagtagccgatctaatcaaatctaccacacatatttacataaattttaaaatatttatgtatacaattaatatttaatgtaaagaaaagaatttaaaaatataatgcatatgatacaaatataattcaaaacttagtagatcaaatatatatattctatttttatttataa

SEQ ID NO: 265548 - DNA, 725 bp, Cannabis indica
tgacctttcagttggaagtgacagctaagggtagcacagtttgaactgtaacaggcttaacaactggagagaaggtcttctcatagtcaatcccttgggcctatatataaccttttgcaaccaaccttgatttgaacctgtccaatgacccatcagcattgagtttgactctatgaacccacttattaccaataatgtgcattccaagtttcttgggaactagtgtccatgtacctgctctttttaatgcatgaactttagtttgcatagagttacaccattgaagatttttgagagcaacttgaaaagactttggctctaaaggcagtgatgattctcgcaatcggtgctttgttgccaggtaagcttttggcttaactattccatttttggacctggtattgtgatattttacacacgcaagtgcatgtatcgtttacaagtaatagactcaccatgagtgaggtcgatccacaagaattgtagttaagtacgttaaaattaaacttttaattctatttggttaaataaaaagatagaaaagattaaaactagaaaataaataaatagtgaaagaagaagcaattaaactaataagaaaattaacagttaataataactagggcttcgacttcaattgtttctattgattatggtctaatatgattatctccctattatcaatttatatgcaatagcaggtttactaaggtaatttatagtct

SEQ ID NO: 265549 - DNA, 1160 bp, Cannabis indica
gtatttaagtgtataaaaccgaaaacgtatgatatttataccgcaaatatcccgttaaaaagttttgagctaaattttttaacttttaactattataaagacactaaagagagtgctcttactttattaatttgaattgagtaataaaatacttttgtatttaaatatcaaattaattagctattctttataatttttattaaattgtattactaacaataacaatattcctggtaagggtactagacactttggtgtcttttaccatttctcatttacatatgtatgtatgataataatttcttgtgattttcatgttttatttttttctgcattatctatgtgtccctccttttctttgtattttatgtaatcagattcatataaaaatttcacatacttttttgttggcattgaaaaataaaacccaccattatcaacatcaccatattcttcacactataaaatctggacattcttttctcaaaaaattagattagatattaaaattagtttatttgatttcaaaaatcccaaacaataatatgatacctaaatcacaaatctactaaggcgtcgtttggtaacacttttttaatcagttttctatttttgaaattggaaaaataaaatatttttcaaaaacatgttctataaaaccgttttacttttaatttttaattaagaatcaaaattttttaaaaaaagaaattgcttttaatattttttaaatagatttttttaatcaatattttgaacttcgactaaacctggacccaaatcccccacggccttggcgctgaacccggcctctgacctaaacccaaatccgaccccgcacctagactcgacttaaacaaaataaaaaataaaaataaattttacagaacacaattttgttttctatttttaaaattgaaaaacaaaagtggttacagaaaccaccacgaactgtcgccaccaccaaggactgtgttcgtcgaaacagaacagaggtcgtagccaccacaaccacgaacagccaaaggtaagttttttcttattaaaaaatagaattttcatagatttggatgggaatttgtgtatgttattctgattagattgttttagattgtgtatacgaacttgtgcttgtttttctgcatgttaatcagtagtgt

SEQ ID NO: 265550 - DNA, 3290 bp, Cannabis indica
ttaaaaaaataaatttaaaaatagatatagtgacacaatttgtgtgtagctgttatctttaagtgggactgtaaaagagtatggtgacacgctttgagaaactctaaaaagtattagtgacatgtattcagagtcactaaataatacttttacagttacccacattattgacgcgcattgaagtgtcactaaaaacttttagagtcactctaagtgtgtatttgaaacccatttttatagtagtgtttaagcgtaggctttggcaacaagccttgctttataagtcattaattctccatttgcatcccttttcttcttgtatatccatttacatccaatgggctttacatcttcatgtagatctataatatgtcaggacttattagaatgcattgattccaggtattgatccatggaactatattgcatttaccaactttagggttttctattgcttctttaaaagtcaatggattgtctttttctgtatctgatacaagaagatgtgcctttagttcacagcgaccaggttgtctcacaatcctcccattacgacgttgcaccgaattttcctttgcaagaattttggtttctctggttgatttatcattaactaatgaagaaggtggagatgaaatcttatctgtcattagttcttctataactatcttgctacgaggtttatagttattcatgtatttagtcatgttctaaaaaggttgaatttgttgaacaaataccttcttatcacttggaatatagaaatatgcacctcttgattctggagcataatcctacaaaaatacacactttaaaccttgaatcagttttccaaatttagcacataagttggacaacccccaaatacgaaaaatatcataaactcactttacttccattctataattctagtgatattttactcacaactttggatggaactacattcaaaatgtaattcagaccttgaagtgcatatccctaaaatgatagagggaatgaagagtagcttagcatggacttgaccatgtccaatgaggttcggtttcttctttctaaaactttggtttgttatagtgttgcaggtgctgtgagttgggatagaataccatgctccaataagaaatctttaaatttagaatccaaatattcaccaccactgtaagactgaggtgtctttaaagatatacctattgcttctcaactaagtctttaaaatctttaaacctatcaaagatttcagactttctaagaattaggtaaacgtgaccatatttattgtagttaacaatgaatatcacaaaatactcataactaccttgagcttgaatgttaattataccacacacatcactatgtataagctctagtggctctttagctctatttccttttgatgtgaaaggttgtttggtcatttttccttttaaataggattcacaaatcgatagggttccaactgttagttccctcaaagatccatctttggttaaccagtttatcctatctatactaatatgacctaaccttaagtgcttaagatacctcttttatggaaacattttatcttttcttactttgtggattagctaatttaaataattcagaattattaagtgttctttcaattgggtcaagcatatacaatctgttcctttgttttgcatgataaatattgttttcattctttgaaataagaataattctattattaaaagaaatacccaaattttattcatgcaacaaagataaagaaacaatgtttctagaaaatctaggaacaaaataaacattattcaaaactaaaaaaaaatctaaaaaaataagtgaacggtcccatatgcctcagctaaaataagcactccactttccactctcatagtcacctctccttgttctaactgttttgggaactaaagcatctataaacaagaaaaaaatatgatcaatggaactagaatcagttatccattgttgatttatcattttccactatacaagcttcttgtacaagtaaatcaaatttatctttctttttttctttcagctcgacgagatactttggatagtttctcttctagtgacaatcaacattgcagtagaaatattttccttaagtgctttctttttgaggtcattgtatcttttgttctcaaatgctttggatgacttctttgcctttttcggatagtcttttcaagtgcatagccattactttttcttttcttattctttgaagaagaaggcttatcctcagtaacatttacttcaagatgaatcgagatgatcttgttcaaagattcaaaagtttgcaattcattcaacaattgtgtcatgttgaaatctaatttgttcatgacatagtttgttgtgaatgtagaaaaaagaaagggttaaagactcaagtatgatgcttacttgtgtcttttcatccatgattactctgtgcatctaagcttcatgtagaacacgtactaatcatgttcaaaacatgttcacgcacagtttatccttttcttcatcttagcattcatgtaggttctagtagccttatgacaactttgatttgattattgtccaaacatttccttaagagattccagtatctcataagttgtgtccatgatttcatgctttcttcataagacatcattcatgcttacgagcatagcagtttttgttattggattagatctaagcatcatattctgcagaagataaatgctatttgttggagtttcttgtggaaaggagaagtagaatcaattggaccaggtaatgttgcttggagtaaactttgtaccccaaagtcagtgggtggattgggtttcagagacattgttacttaaaacattgctacaatagggaaatttgtttgggagttaactacaatattatatttacataaataaaaatacacaatatatacacacatattcaataaaacacaaaatacatataaccatgcacatacacaacaacaatgttaataatatgaaaaaatcttaaaatttacaaaaacaaaaaataaagcaatgtacattagaataagtgaataaaagtcatatttatactttaatagacgtttagattgttggaaaagttctcattacaagagagaataggaggattacaatcaaaatactcaaaatacaaatagaagtatttcatcaagattacaataaagctaaagaagaagaagaaaaataacacacaaaaagcttgaccaaggctcaaggacctttgtcctaaaagtctatttcctccctcatatgaacacttagagaaac

SEQ ID NO: 265551 - DNA, 1081 bp, Cannabis indica
cacactaatatagtcacaatagcatctcaatataccgatctaatttaacttttgatatattgaacaatgacaatcatattattttcaaatcaacaaaatacattcataatcacaaataccaaagtattaaattgacatagttaataagtctagttgtgtggtaaggaattatgttgaatatgtgatcaattcaaaataacataatatcattatcaatcttcaactgatactgtgatgcttaataaataagccagtaaaattaattaatcatacactacttaataaataagtccgtgtcgctaaacatacttaaaaaatttagccaacaaaatatcattgtctttaagtaattaaatttaaaagacaatgatcataacaagaaatgaactacatgctttcaattcaatcattctcaagaatataacaaaacataatattgaaagcataaacatttaataataaaattattggtccaccaagtagtttataacatcaacaaaaatatcatatataaatgtaatctctattcaaagagaaattactcccactaacctaaacgaacaaaagattataaaatatctattattatcccaacttttacttacatgacgtgaccaatatcagtgccacgtgatagtacagctcgccaacaagaaggttaagtcatctactcagtacttcaactaacgaggagtctgagcactcaagcaggacgacggaatgacgaaccaaccacctcaagggggctagccggcgctatggccagcatagccggacagcttctaaacatcccatggccagtcagcatgcatcctacaggtgcatggccgaccaacctttagcctgataggattttggtgcacaagttttgtaataccctagaattaagaaatggattagtaaaatcctaattagataattatgagtaattgagaaattatattattatatagtttaatatatgagaatttatttgattaattatatgttaagaccctgttggtgagccaggggcattttcgtaattatgaccagagaagggtaaaataatgaaattaatttaattacgtgcttaatagaa

SEQ ID NO: 265552 - DNA, 1217 bp, Cannabis indica
atatattttacaataatgaattatgttaatactccacaatctatatataatttttttaataattttatcaaagtattctctctatttaggaaaaatatgaaaataggtttgagggtatattaaaggaaaacaggttaaacaaacaaatgagaaagctttctatttatttattggcatatgatataaaagtttcagctgattttaacagagcatgatgatcagacacaacaagtgtctattacataacccacagttgcctctaagcagaaaagaaagcacaactccaacaaagacaacaacacaaatataagaaagaaacaaaagaaataacgaaagctcataaactagagtacaaattcctaaagcagcaacaccaagctatatataacctagctagaagctttctgattttctctattcgatgccggatttcttcctgatttggctagcaaattcgcatatcttcttcccatcaggtaaagttttggagacactctccctctgcaggcacctcttggcccatgcaataaacttgggacactcggcctcaatgctgaatttgccataggtttcataggcatcaaaccagcagtagaatcctataagggcaacatctacatacccaaagctgtctcctccaaagtatggtttgtccccaagctctgcttccaacaccttcaaaatttctatgaattccttcttggcagcctcttgctcttctccttttgtgctccatgtcttccttccacaatcatagacctgcattatacagtacaaatatgttaataccttttgtttaagttgaggctttctttcaaacacttcatataatgtcattagaccagattatacaatatgtaagctccaacctacccctcacgcaaatccactttagtatttgatgattcagagaagtcgtttatacttcttattatttattattttccatattttttttttccccattaaatccaacttctaagcatagcctaattgaattgaatcgagaagaaaaatgatacgcaaaatgtgttatacgagaaacccatatctatatattgttgggcatcttttgaagtgactagcatctttagatgtgaaaaggggttaaaaattgcacttttgcaatctatataatgaacattctcaaatctatgtattgattcaacagtcaaattttagtagaaaaagcttctctgtcagtagaataatgtgct

SEQ ID NO: 265553 - DNA, 800 bp, Cannabis indica
aaggttttgtagaagcagacataatagcattgcactggcggagttcaacaaattgaaattgaagagcgtgaaagctatgaagaggaaatttcaagtggaaaaaagtctaaatggcttcaagccatggatgaggagatggattcactacgaaagaagaagactttggtatttgtgccaaaagctagagaataagaagattgtagagtgcaaatcgggttctcaatgtgaagaatgaaccagtgagtttcaaagccaagttagtggctaagagttttactcaagtggaaggtatagactacagagatatcttctcacttgtggtaaaatataagacaataaggttgatgttgtccttggtcgcccaaatggagtttgagattgaacaacttgatgttaagaccgccattcgaaatggattcgtggatgaagagatctatatgaagcaaccacctacattttaggtggaagggaaaggagtagaattagtatgaaagcttaatatatccctatatgattaaaatagtccctgaggtaatggaataagatattcgatacgtatatgactcaaattgggttcaaacaatccacatacgatcactgcttatatttcaagaatttagagcaatctatagtcgtgttcttattgctctatttggatgatatgctaatcatgagcaaagataaatctttgaccaaaattacaaaagcaaagcttataagagaatttgagatgaaaaagcttggatatgttctaaagataatttgtattgaagtctcatagaatcgaaggaagtgattat

SEQ ID NO: 265554 - DNA, 1704 bp, Cannabis indica
ttatgccatatttttataaaaaaatgatagaaattccatatttataaacaataataagttttgccggaaaaatcgctggcaccggaaaagtcaccggcgtcagaaaagtcaccgtcgccggaaaaagtcaatggaaaagtcaccaaaaatagatgtctcaaatataaacaaaaatagaaccggttctataacataatgaatgaaaataaataacacaaaataactcaaaccggttataattgaaatataaccgactttgtaacataataaataaaaacaaataaaacaaaataactcaaactaattattattaaattagaaccggttctataacaatgttataatgaataaaaataaataacacaaaataactcaaatcgattataactaaaatagaaccggttatatagacataatgaatgagtacttttgaggtatatatggtatgagtgtaattatttgatgggttggagcatgttgaatggatgtttttgtttgaccttttttatttaactggtttttgtgtgtaaatttttatcttagttgctttacggaaccagtttttttatcttaaatttttaactagttgataaatataactgcttttttttatattatatttgagttattgtgtgatattatttgtgtttatttattttgttatagaactgattcttttcatatttatgcctcaatattttttaaaattgatctctattttttttttgaaaaaaattataatcggttttatgaggtattatgtgttatgaggtttttgattgtagaactattttatttttaatttatgttttagtgttttaggaactgatttcccctttattttttaattgtaatcagtttgaattattgtgtgttacttgtttgtattcattatgttatataaccggttctattttagttataatcagttccgtgttatttgtgttattagagagctttctacttggttatagtcagttgaatcctctcattcattctcaaatttatggttgaatggtttgttgtgtatttgtagaaccaattcttctacagttattttgtatttgcattagttgttcgaaagaaggattttctactgtatgcataacggagaatcagttactcctgtatgtgtctttctgagctcagtgtagaacatgagggagctgtcacttaatagctttattggtgttggtcctgataatatctggtaggatatgtctatgaattttctgttgcattttatctcaaattttatcagctcaactaagttttctagtgaacaattggttggaattagtatttcagtcattgtgtagtcatcataacttatattgtctgtccattggccccaatacttgatcacacacataatgtgtttcattcctattgttgaccgaggttttcggcaactaataaaatattataaagttagagagctgtaagaaaattagagaaggatttttacgtggttggggcgttaatgagccttagtccacgagtctttgttatttatggatgtctttaatacagagaatgtatttggggagtgtttcactcttataaatacagagaatgttcttggtgagtatttactctgcttgctcatacgcaacccaagattctcgatcccatttaatgagctttgagggggtatttatagtgtttttggtggggttatccccagaattatccttacaagtg

SEQ ID NO: 265555 - DNA, 700 bp, Cannabis indica
agtcattatattccgctacaatcaatgtaagattttcttaaaccattatgtgtttatttcattgttttagagaattcatatttaagatgttaattcaacatacttgttagtaaatctagatcctggaaaaatattcccaacaactagcctcagagccatgataatgatttactttcacgaaatatggatttaaaacgatgttgtgttgatttggatggtttcatgttagtttatgtgcaaatttgatgattgtatggaaatcacaatgtatgttgttaaatattttatgtttcattctggaaatatttttactagaaagtagacaaaaaattattgaatttagggttttagagaactcaatttagattttttatgaattagttatgattttttttgattttgataaaaatatctgaaaccgagcaacaccctgtgcgcgcgcggatatggcttgacacagctttagacacacctacgtcccaatttactcgaacaagggctgtcctaagcccctcctgactgaggttctcccccaagaggctgctagcagccctttccttgcccaaatgcagccttgtgtgcgcatggggagtatgcattactcccctagtgcaattttgtttttgtgatatcttttgattcaaaaatcatttttcattgaaacaaaattcaaattttggtagaattttgtgtataatct

SEQ ID NO: 265556 - DNA, 600 bp, Cannabis indica
tattatttaatcaactataaccctaaaggagagagaaaatgtctcttttatacatcataatgattcaaatatacttatacaataatcccaattacaaaatttaggctgaatgtatctaacacattcagatctttttctggttattcatagctgaaaactgatgctcagagttgagcagagatggccactttcctaatgtggttgcattttgctcgagaacaaatgaattttgatatacaacagtacaaacttgcacaaagaaggagtacaagaatccaagcaaaatatatgtgaaactcaatctttatccccttgcatcaaattatgtaaatttttctcaaaatgatttggggcatccatttggtagaggcaaatctaagttttctacagtcctgaatgttctaggcactattgtatcagcataaagaattctctctaaatcatcacactcgtgctgtaaaatacaagcttgccaacctgaagcatctattttgatgggattgccataaatccatgaacactgcaaaacaacccaaaatatgagcaaaatatgaacaaaatatttttttataattacaaaaaaatgtttttatatataca

SEQ ID NO: 265557 - DNA, 561 bp, Cannabis indica
atatatcatcccattttgaaaaaacagagcaaaaatggtctccaagatgattatatataccttaatcacttcagttaagttgcctatgaccatccccacaaactgttgggtgttaggaacggtgacgtttctaagaaaagggaatgagtaatcgttgctcccaacactaaagatataaacagctcttgaaagcaaggcttttgcatctgcatcccctatttgcttcctcagctcattgctaacattcttgaaatattcaagttgagtattaagatctatcacctgacattaaaaaccattatcatattgttgttaataattatttcatatgctatatttagtctaaaaaaaaaaaaagaaaagaaaaaagtatttaatacaagtattcctcttccagtctcaaacaaagcaccagatcctgctgaggcaaagttggccccatttctataatcatggtttccagggtacaatatggttgaatgaaaggtaacttagcatattcagctgcgtataataatttagctactattagtaaattaatctatatgaagattttacaac

SEQ ID NO: 265558 - DNA, 2742 bp, Cannabis indica
aaaaaaaaaaaaacttaatggggcagatagatgtaaaaatgaatatacatttatttttattttttaaataaaattttaaaaaaaaattggaaggccaaaaaaatgaaatagacctatatcgatgggaatatcggtaccataaattcattaagatattttcgacatggacagaaatttaagaagattttacaaatatcacgtatatttgtcaagaaatataaaaattagtgataaaacttattgattatcaataaatttgaacaattataataaatacatacaatttaataataaaaatcttatttaaatattataattttgtcttcattataccattatatatatatgataatatttgacattcattataccattatttaaatatcaccgcttgtttggatttcactgatactttatgcggggaagcggcggcttgctgtttggctatctctgcagccttagaagtggaagcccggtatatcattgtggagagcgattcgagggtagttataagtgctctcaatgggaaggagtcccgttgggtcattagtaactatgtctctttttgtaacagtcactcttctcgtttttccagttgtatttattctaatataagcaggacttgtaattatgtagcccataatgtggccaagtgggctttttcccacaatttggttggtgatattccgctatctaccatcccttcgaacattttatgtaatgaccatgaggtctagtttgtcggttaatcaaagacgctttccttcaaaaaaaaaagacattcatacccaataaaaaaaattaatacgaaaataaatttttagaaaatttaaaattattaatctattgatactaaacatactaatatttcactacaccgttatttcacggataaatttgtgagagacgacaattttcttcattcactacactaatatcattacatattgaattttcatagatatataagagacatattgtatatttaaatagaaaaagatatgcgacttaaaaaaattagggtcctaaaaatttagaaatatcgaggatatatattttagttacttggatgatagtattgatttttacgtacctgcatccaatgtacatgatactctaatattattaagtgtaattaaaggcgaacttacaccttaatgagtgcaattactcaccctagaaaaaatgatcaatccttcattttttttttcaaaataatttcttaagtgatcactttttatactaagtttcccttacaattttctttttcctttacaaaatttaaaaattccacactttaaactattattctttggagaaatgctaaagagaaactgtctaacaccttttacggtatcatattattattgatgtaattaagcatcgagtctcatataatttaatataataatttttataaaatataattaagaaaccaccttttaattaagcaccactaattgaaaactcaaagaaatttatgccaaaacttcttaaaaataataaaaattaaattgacacccacattttgttttgcttatatgtttttttgctgataatatgtttgataaaattgtcaatagaattaattttcagtttgaaaactcgacccttaatctaaaatcgtgttaaatgcatgaggtttttctttgagaaaaaaataatagtaaaaaaagaaaatgttgtaccttattttaacatgtgaaataatccaagtcaccaaccaccatctttatctaccttcatcaatggccacaaaaaagtctccactttctgtataattaattaattaattaaaatgccagactcaaagtgttaaccaaatacaatacatcatcttgatgcaaatattggacattattaaaaataaaaatagaaaaaaaaatataataataattacttaaaaataaaatagtagataaacttgagagaaaagcttctttctttatttttttttttttttaacttttttggcttaggtatgagaagagatgttaaagtaaaagttggtttgatttgtgtttttggctttaagttacagataaaataaatagtaattacattatataaaccataattagtagaaaaatccaacacaagataactaattaaattaaccaattacagtgcaataacgacttggcaataccaactaaccaatcccaaatatgtttttcttttctttttttttttctttttcttttattttattatttttatttggtttttcaatgaaattgacaccccctattaaattacttcattttttttattattggctagtttaacaagttatacaacaattaaaacatgatttatttatttatttctttagttttcatttcacattctaacatatctgtatacattgatatctcataatatattattaatcttaattatattaatagttctccaatctcataaaactcattacaaatacttaatagagtgtggaatctcttcattataataataataataaagtacgcgacaactaccgctattaaaaagacatacatatatatataaaaattaattttattttttttttgtctttcaaacattttaagcctttaattttttttttctgaactataaaaattattggacttgatttttgttaaattctcttcaattttactaactttttatttacgaaattgtactctttaaatttttactctttaacttgacaattttactctttaaatttttatgtactaaatcacaccttcaaat

SEQ ID NO: 265559 - DNA, 811 bp, Cannabis indica
tgtaatgcgtaaagtgtaatatgcagaaggtgtgaggtgatttttctttgagaaggaccaatcccttaaataagattcactttcagagagcgaaatcattttacttataagactagctaggtcgtggagtgaggatcgtagaccgattctcaattatagagtgcactatttgagataagttccacgtaatatatttgacgactttgttattaggtaggtttcaattcgataatgataatgagcttgcgtatttactatttacgacttaggcttaatttcgtaaatttataaactggtaaactaaaatgtgttcttggctcagtttcaatgccatttcaatttggtttcttagttgaagattgtccttttttactttcttctcttaattgtgtatctttacaaattattaaacggtctgttaataggactgctcattgtgttgctcgagcatcttattttcactcagatcgtatctttagtgagtgtaatgctccttctgaacttttatctattgttgatgcggaatgtttctgaatgaataaataatcttttgttacaaaaaaaaaaatgtgttcttggcgtgggcactaggggtgttcataaaataaccgatccaattcactccgcacgatccaattcaatccaatccgcaaagtgtggatatccgcacttgtggggattgaaaaattcaaaatctgcacttgtgcggattggatgttgattgacatgtaaaagtaaccgatctaatccaatccacacatatttataacaaaattaaaaaattatatatacaaataacattttaatataa

SEQ ID NO: 265560 - DNA, 565 bp, Cannabis indica
taatccattggtgaacaagttaattactgaggtgaagaacttcttcaaaggaaaagatgccattctcaaactgttgaaggagttcgaaactttgctgtactctgttgatctgctgctcagtgatgccgaggagaagctcatcaaagacccgagagtgaggaagtggcttgatgatctcaaggatgtcatttatgatacagacgacttggtttacaagatcgacattgaagcatggcgaaacaaactcgaaggaggtgatcctcatgaatctcatagcggctgtagttgtactagtagtaaggtactaatagtttaaccattaaacttaaattttgcaatatattatatattttttctagaagaaattttaagttcaatccacccactgtttagattttattagttggttttttggtttggtttaggcaatttatttggattagagtatttgtaaaaagaaattgtactattcaatttgagaatataacaattcctcagtcttagtctatcaattgatctattgtctaatacttgtcaggcactcatgagactcatctcatcaact

SEQ ID NO: 265561 - DNA, 1544 bp, Cannabis indica
tttatatttttttttaataatggggtgtatttataattttatggggtacaaataaaagttcccataaaaaaaatgtacatttaaacacaatattaccctttggtttgtgaaatatgtggttctcaaataaatattatattatttctacaaaaaaaaaaaattattatattacctaacataattttgtatattatgttgattattggtgaaataaatttatgtatttaaaataatattttttgtaatagttttaggggagttttatttgcactttaaaatagtataaaaacaccaaattttgactatttttattttaaataaaaataattttttcaaattttatcaattatttttgcttttgaattttatagcaaagttgcaaagattgataggatgaaaatggtcaaaattcgaggcagtcttaatcattggtatcaagaaagtaaaggattagttcaactgattcacaaagttaccatgctataaaaaattcttaaatagttccaaccacttggtgtctatagtacctcaattttattttgtagaaaattcttgcaaagtcatcaagtccgaaagctttcaaagggtagagatatgcaaaaccaccttacttacctccacctccgcgagaacacgacataaatcacaattaccctcatctaagatctatttaaaaaacaaactgtcaaactctgagttaatgatagggttggatgatttaaatgttagaacttattttattaggatttagatttactaacatgtatgttgattaacaccttaaatatgaattttctaatacgataaacttaaacacataagagtttagaaaaccttacattaatggcagcaaaataatatgacttcttccgcgttgatctctaactcttgttcctttctatggtagagtaataacaagatctaagcctagatctccttctctccttcgatctgattaaccaccgtcttccgcactataattgagtattgacttgccatgtgtgggtatggtactctatcactaaagctcaaatatggtgaagaacatcaagagggcaaaatcactgtagaaagagtctctcatctaatgatagagttagaaaactaggtttttggttgatgtaggttggatgagaatgagagcatcatgttcctttcatagtatttcaactaaggtttaggaattttaattatatgaattaaaaaagaataaaataatgagcaaaaatacactaagtggtcgaccacttaatgggcctcactagttacaattttgccactttatttcaactatttatcctttctcttaataatgtcatatatattctaatttcaatcctataaatatctaaactatatatttaataattacaattaattattaaataaaattgccatttattttatttattattcagaccatacaaagtctcttaattaaaaaataaacctaaaacatcttttcttcacaattaagcccttgcttagtgaaaattcataaataagagattgtctaattttagaattataattaattaataaaa

SEQ ID NO: 265562 - DNA, 2473 bp, Cannabis indica
atataaatatgtattattctatgaaatcaacacacaattcgaatcactattttctacagtgcccttacaagaaaaaattccactagaacctggaggccaaactctcgaatcctccataaattggtttctactctagtatttgaatcagaagtaataactctaatacctctctatctctcaaatttcttctgaaatggaattcccatctagagttagagctgacactccttcacccccaacagacatctccttaatacttttgtttctcgcattagagattagtaccaaatcaggaaataacctcttaaaagcttcataaatacttatgtttaactttatggtttttgttaagttttctctcttttcttcttctcccttcttttctactttctcatgcatcatcatgttatttattttcctaaaaaagttcccaaaaatgagatgacaaacaaaacataatgcaggcttgcttctccattatttctacctttttttttcaaatacacctgttggtttcatttctccacagttccttgtttgttgtcatctcaaacatataaaaagttgctcacaagcatgtacgagagattattatacattacatgttttgaacattcttctttatgtgatagctcctgttaaatgtagaaaaaataatgaattaagttgtgattcatacagggtagaacctcttgtttgtaaagattacatcggcaaacgacctgtccttgtaccataccacaaaggtggaaaaaggttgcacattgggttacaggtaatgcgtctaaatgtgtatttttgtaaaaatacctatcttttctttcccgtgaagagatcacacaatgtggtgtaggaatttgctgaagacgtagcttctcgttctcaagctatggtggatcgcctaagctctgttagggtgcgctattctctttgctaatatattctaatgttagtccttgtcattcatgagttttacatatgtataaagtaaaactgtcagtagtcaaattgtatgattgaattgatcattagtttcctaaaatgtgtgaagcttgacactctaacttctctatgtttgaacagaataaagtgcttacggtttgccagtcaagaaatgactcagaaggtaaatggttctactatctgtttggcttgcattacttttcctttgtttcttggtataatcttaagtgaaagaaacttaagtaggcatttatctttgccaacagtgaattttattatgcttcctgatacaggttaggtggatttagatcaataattttgagtttgtttttggtataagttttcagaaatgatgaaccaatcaagttttttaattaggtccacagtttttaagaacatcaaatcaaatttgaaccctatacaaattataccctaaactacccagctctaaaatttagttattctatctaatctaataatgccattttctcacttcccctgcttgttgtaggagaagaaacagccgaagtcagagaagagagatcatacggctctctgatgatggagaaattaacaggaagcacagaaggacgtatcgatcacatgcttcaagtgggtagttttaccttatcatggcttctcttcatttatatgcgaagtagctttagctctccagccagttggatttttctaagccatattttcttaaattttcctttattagatttatcattccaaaatataaaatgttttagaaacaagtaatttttctttcattgaacaataagacattatctttggtttcaggctgttaggtgttactcttgtaggaaatgaattatgattgtgtctgtgaagctgccgttagtcctgaagagttgtcacagtgttattctgttatattatggtattaattaatattggaagcacccaaagccattcccaataatattgaaaataacaaaaaaccatgtgcttcatccccttcaatttaccttgttacctcagaagttggaccatatagatagatataggacatctggtttttagttagagggtgtgttaagtggggcaagtcttgttctgagatttcaattaaaggttggcacatcttaatagtgtattcttatcttcacgttcttgtcagattataaaatacaatagtaaacatcccattagtgaatttttaatcacgaatgatttgtaatactacttgtttttttccttttgagaaggagacaaaagtcacatgtccatggctaacctcctacacttattatcagtagaaatcagatgttctctcgtaatattagaatgaattcctctgatttctgaaagtctttgttgttgattgtgcaggataaaacgttccagcatccatatatagctgccattggatcacatacgtacggatagtttatttattaatttatagatcaattttttaaataaacccttctgatcagaattgcatttctttaaaagattaattaccgttcaatgactggaa

SEQ ID NO: 265563 - DNA, 2310 bp, Cannabis indica
catctatcagtacaaattaataaaaaaagtgttataatgtattgataggaacttaaaaacccatctgggtgggtcaaagaggagtgaaacttaccaatgtttacaccatggaacacagaatttaacaaaccaagctgtatctttctccttcacctaaattatacaatgaaacaagaactaatctttaatacaagaataaatgcagaacaaagagtaataacccagtacaatcagaatcagattaaatcctatagacctctacagacaatacacaatcacacaaaacaatcagaaacaaatacaatataaagatttattcaagcagtaatagaagaagaataaaataatttgattggaaataattgaaaagctatggatctaagaattaaattaggttattggttaccttgtcagagaaggtgtcgggtgttagggttataacttcagctttggtgtgatgtgataaggtcaggagaagaagaagtgaggccgtaacgagaaaaggagagaaggatttcatggctggaggaagaagatgaagagggtttgaactgaagctctgtgtggaaattcgaaatcttgcttatacacaaataaaataaaataaaataaaataaaataaaaaatgtaaaaaggaaagacttctcgatcgtataaacttcagtgaaacgacatgtcgtaaacaattattagtttttttttttgtttttttttttttttttttaaaaaaaaaaaatactattgatagggattagttggtgcacttcctatccttgttcttttgacttaatagtaattttgaagattagtgaatagttaattgttacttttacactgtctcttgataatagttgtcaactgaggctctcgaatatgataatttaatagggcgcacaatatttattactctcaaaggagcgttacttttaagacatatgataagtgttgctatggggacttgaactccgaaaagtaactaaatgagagacttagcataaagtcatccaactaattacaccacacactcggtggttaactatcttaaagttgtgaattttacttgagcattttttatttcaattgatggaatgagattaatatgtcgatttagtatgtctctatattgaagtggggtttttgatacacgtagtatatactattagtcttcaactgcaaggtggatcgcgagctacattttaatagagatatacactttttttttctcttttttatttttaaataataatttttttttacaattttaaattaaaattttgatcccatatatataatacataaaaatataaattaattgaaagatataaataattttcttaatcttaatcgataataattaatttttaggtttaaaatagatgagacaaaaaataaactactataaaatatataatttttttaacaataagaagtagataaattgaataactaaaataatcttttaagtcatgtaatattataaaattgatcaaaaatatgtaagagtatagagtaatagctttgttggcttataggccaatactatagtgtcaagtgactcgaatgaaattttagaccatcacaatatttgaataatttagaagtcattctattactcattttctatagagcatatttcttaatttggtatcagagcttggacccaatgaaaagtgtggctaacgagaacatcaaattttaaaagagagtgattgtgacagtgagaataaagtaaggtaaaaattcaagtcatatttgtgtcaaaaagataatcagagtgcgcatcctagatgcttagtagttgtacgtgtagaacattagtatgagctgattatttagacactccaaataggttgaataagcaacacttgttggcacacccaattaacaagttagcctaaagggattaatgagtactacttatactaatatactgtattttctttttggtagctaagcacaaaaaaacttgtatttgtttgcaagactattatctttttaagaaatagccaaagtagttagtagttatagaaattacctattatgatggtggtatgtggttagtagttttgcatatataataaataggaaaactatttgcaccttaactacaatccaatatttaaaaaaagtaagcttaaaatatttgaaagtcacttttattattttcaaaaactttttttttctcacattattttgtgtcaattacaatacttattttcatattttttaaaatcatgtatatatattttttattttttttctaataaatttcacataatttttattataatatttaaaatataatttgtt

SEQ ID NO: 265564 - DNA, 583 bp, Cannabis indica
tattttttattttttaaaataaagttgaattgctaacatgagtgtggttttgggaatttcattgtaaaaaaattcgattggaagttagttgcaagcatagttaaattttaaaaaattttttgccacaattaattaaaaaaaacttgtggttatatgaatttatttatagtaggtattattattattattattattattattatttagttactcattatcctttcccatatttttagttttttttttatttcatgttaaaataatttttttttaaaaaaaaactatattcttgttctctacattagaactcttgaaataattttatatgtaaattcttaatcaatcacaatattcatagactattcaaaataaaataatatgatattgaatctcagtatcttgagagtcacagcaaaaagaaacttatatcatattgtctctttagaaaacacctaatatggttgtgaatatagaattatatttgtgattatattagtccatacaagattctaatatctctcccatttggacaaataaatcaacaaataccctattaatttccatcatgcaatatgcagtcaaa

SEQ ID NO: 265565 - DNA, 572 bp, Cannabis indica
tgtcccttaattgtttatacccactcaaaataatatatgtgtagtaggcaccacattgatgtgataaaccattggttgtgaaaagtatttttgaactgtatttatacctactcttgaaagaagcaaggtggttgtaattgcagtgcattgcattgctactgccttactggtttaaggagattattatgataagctaaaatagttcatatcattattacttttacctttttctattattataatttgataaatacttatttggtactttatcttttatcaaaatatacactttgtacctttcattttggataatgatgaattagtactctctatttccaaaaactaccattttagtacctgagtgcatttcaaattttaatattctcaaactcacccttttaatatttaactcttattacatatccaattatatttctttactttatttaaaaaaatagtttctcgtccttgttgaagtatttcctcattcttgagccaataagtttgtttagatttatgaaatcttaactattggtacagacatatgtattactacgcaagctgacatatgc

SEQ ID NO: 265566 - DNA, 514 bp, Cannabis indica
tttattaccattaattgtaattaaatttcctctttttttagtttccttttttcttagtttcttaatatttgactcttgtatttgtataaataggggtttaccccattggaataaacaactgagaaattctttttcaatttctctttctctcttcttcttcttcttcttcttttttcttctcatctattttatattattttataacacgttatcagcacgagtctctgctcaagccccaatgtaagtattttgttaaagttcttaaattgtttcaaggtcatgatacactaaatatatatttatatatatacttatctcactgaaataatttcaaaaatcttttgttttctttttatctatatatctatatattatatatgtatgtatatgtgtttatatgtttattattgatttcatatatatattatgttcttattattcataatattttcaatatttgtgtatctatgatatagtagagaaaatctatatgaattatacatatatcctgaag

SEQ ID NO: 265567 - DNA, 831 bp, Cannabis indica
atcgacgggagggcatttctgtcctcttcttcctctacctccgggctcctggtgcacggaaacgctttttcggtcctctcgatcctgagggccaagactccctttttggagtttgcccctctgcggacctttccctttgggaaatctgagcggacctttcgcggatcctgcgcctttttctttctcccaggggtagaagtagggtttttcttttggttcccttcagcgggataccttatagggcttggttccctagatttttgccgttgggtacttggtgaggattcctctggttcctttccaagtccagcagacatggctttgggatgcacgtggatgccagctgcctccatggctttttgcatggccagcattacctcttgcatcttttggttttgtgctttttgggctgcgatctcagcttcatgatcgacagccttttgtcttagaagcaccaactctgagtagctaccgtcatcgtaggcgtactcatcgaggtttccctcgtaatcatcatcaggaattccttcttcttcctcggagccctcagctgctcttgaggctacgtcttcctcatttggatcttgagcatcttctagagggcgaggttgacgagtgcttcgagtctccaccattgttgtaacgtattgtgtgtttacagaagctttcttcagctctcaatgaaagcaccaaaatgttgaccgaggttttcggcaaccaataaaataataaaagattaaagagctgtaagaaattaagagaaggatttttacgtgggtggggcgttaatgagccttagtccacgagtctgtatatttatgagtgtattta

SEQ ID NO: 265568 - DNA, 466 bp, Cannabis indica
ctgtcaaggtgacccactgtcacaatatctgttaattttatgcaacgaagtcctctcaaagctagtctcgcgtgctgaaagaaacagagaggtgcatgggatacgcattgctacaagggctgaccctatttcccatgttctatatgcggaaggttctatttttttctgccaggcttccacttctaatgtcgaaaatcttatgatgtgcattcagaagtatgaattgtggtctggccaaagagttaacacaaccaaaagtggagttatcttctctctgaacttgtctcaacgatgccgtgatgagattaagagtaaaatttggtttaattgcctggatcgaagggagaaacaccttcgaaacaccttctttttctcggctaaaaagacaaacgattatctcttcctcaaggagaaaattttaaatagactggaaggttgaaaggcaaggttgttggaaattatttta

SEQ ID NO: 265569 - DNA, 2277 bp, Cannabis indica
aagtaaattaacagttgagggggttttgccgcaaattactctattattatacaacacattttttcaaatcagaaacaaactttataaaactttaaatcaacaaacaaattggtgatcacatttcctaaagttgaaaacaccacaaagactcttgtcttttgctagtcacaccacatagtaagaaagtgagtagttgcttgcttgccttgttatagtccctaattaaccgaccaacaagaaaatttaaccaagtaaaaagaaagtttaacataagccaagataggcaacaatcatcatctataactctactcacttacaacaaacaatcattaaagaaaacaccattctatactcattttcaaatactaaagtagccacgagtgaaaaactaacattttgcttcaaacacaaattttgcaaaaatataggatgttgccaatcaaggacgacctgacttttagcaggccataaaaaaaactacgtacctttatttaaaaaaaaatataatattttaaaaaatcgctaagaaaaaaaatgaattttttttggacctataagctaagtgtgccttaagtacaaaatttaatatccaataaataaataattggattagattggttgggtccgaattcattaaatgtgattcaataaacactcctactcctatatatatatatttttaaaaaaattatattgaattttttacattttctttaatttctttgaaaaattatgtttggactcttctgtcttaatttgggactctaacttcgaatatgatgaatggcacttgtgctatcttttaaagcaacattcacaaaactgcaaatgtgtgtttagtaaggagaattgaaaataaaataatatgattttgtataggagtaatctttctttaaaatttttgagaaaaaatgtgtttacaaaaatagattaatctgcaattttagtaaatcgttttagattacactaacaaatagtataattaagatgaaatgaaatcatctttgttttttaatgtataaaattcatatttccactaattgaaaatatattgcgataatactttcactcaattatagctatatgcggtatttttttttttttgtaaagaaaaacattttattcagtaaaacaaagcttacaactggtcaggcttctctgcctttaaaatggcagcagcacaagagggttaaacctctgaccaaaaagaattacatctttgagtaatagtccacttagctaaagagtgagcaactttattacaatctctattaacaaatttaattacagcacacccatctaaaagttttgttgcaaaaataatatccaccaacggcactccccagtcagcacgaggagccttctctatatgcggtaaatttgttaagcatagcagtatcaacattgacatagatcatattctcaataagtttgatccaatgtcaactttcgttccttagatatattagctttccataaataaaataaattatttatctgagaatatgtgcattgatcaagactaactctagctaaaatcactacttcttttacctatttaatatttatacttctcataccatatgatcttatttctttcattttaaataaccaacacaacattcagaataaatttttgttttttttactaaattgtgtaaaattaatttcgatacatagatatttggctggttgaggctaaaatatgatcaaactagtgaaaaacattgaattgtgttaagattggtacaataagtacaactatgtatgttttccaaatacaatgaaagaaaacattgtcatgtaacaatcaacaatgaatgaagtttagcaaatcatgaaattcttctctattattgttgcttttctttcctccattaaatcattagacaaattttctttttgttgtactactttttattttttcatatatttatataaaaaaaataaatgtgatgcacactgtaataggggcagttttgtcaaacaaaaacttaaggccaacctaataattattatagctagacatatgatatgaccaaatcaaaatatatatcaatcaaagaattttattttgataaaatatatcaatcaaggaattaatttgctaattaatcagcttaatttacgacaaaagtatcaattaagaggatgattgggtttggttatagctgttttttttaaaagaattttttttaaacataaattgctgtaataaaaagaagagatggtatttagcaaaaaaaaaaaaaaaaacaaaaaagaaaaagaaagaag

SEQ ID NO: 265570 - DNA, 1290 bp, Cannabis indica
tctcatttgaatatcaattaattattgacgggttgtcgataagatttagcttttggtgatagtcattaaatttagctattatcaatgggttatcgatatgttattgatagattatcgacagttgaagcactgctaaaaaatttataattttgtttttctgtattgattatcgattaagatttaacttttggttcttgacaagttaaagtatatactatcgatatgttctcgatagttgaagtattgtaatttttttttttatttattatcgcttgaatatcgattgattattgatgggttgtcgacagaatcttgataggcaataacacaataaaatggtctaatttttggtgcaaaatggaatattataagatgaaaaaatagaaatagttgagtaaaataaatctaatatataatataatatattggtatatcataacattatttttttatttatatattacaaattattacatgttaaacaatagtgttagttaagttctattattataattaattgtataatgttgttggttaatgacaactataacaaatattttttattacttaacagatttgtaaatataaacaacacatatgtatatgtcaaaagagaaaagatgatgaagctttaagaattactttgttgctagaattaatataattatgaacttcaataagattgcagaaatatagagcaaacattaatgaaagtaaaaaaatcagctatccatttgatgaccttcaaaatcagctttgactcaacgataattaaaaattaagtagcattatctaccaatcgaaaagattaatttaggtcaatatgaagcaaaaatatactaattaatttaaaaaaagtttcattgataaataatgaaacataaaatgtgacaaaaataagatagaaagggaaacacaagtgtcgacatcgcttttagccaataacaatgagtcaattaaagcgattagaaataataaataatgataataataattaaacaaataaattatgaaaaaaaaccaagaagttcttaatctctctcgaaagctcttacaatgatttttgcaacttaaaagctctctgaaaaaactatagtgaaatgacttcactatttataggtaatgattacatcaataggttcccaaaactaataataattaaaataggaaacttgagtactttccttaaacaagtaaagtaaaaaagaaaactaaataggcttcctcttattttcttgtcaatgcgaatttgtctcataaaatagggatataatcgtgacttgaatactt

SEQ ID NO: 265571 - DNA, 460 bp, Cannabis indica
tggtagtaaatttagatcctagtaaaataatccccgacaactagtattagagccatggtaatgatttaatttcatgaaatatggatttaaaacgatgtttttgttgatttggatggtttcatattggtttatgtgcatatttgatgattgtatggaaattaaagtttacgttgataaatatttttgtttcgttctgaaaatatttttattggaaagtagatgaaaaattaataaattatggcttttacagaacttaatttgtattttttatgaattagttatgattttttaaaagtttgaaaaaacaaaatatcttagggatgcacatccgcgcgcgcatggggggacacaactgagtgtcacgtgcggctcactcggacaaaacccctttagacaggggagtgtccgaagcttgctccccatctgaccgagattcctcgcccatggaggctgcatgcag

SEQ ID NO: 265572 - DNA, 722 bp, Cannabis indica
gcctatgcccagggccgaccctgtttaacaatagtcatatttttgtggaaattgcattgtaacctactttacttaatttgttttgatttttaccttcaatactatattctttaagatatactcattttttataaatgatgttcccattataccctttgaattaatgcaaattatgtgctacacttaagtggaggacaatgatatattaggcaagtcactcataaaagtaggtagattttaataaaatataatataagagtatttttaattaatgcatacaaaaaaaacgtattcttcaatttatccccatatttttcaataaaatccaagagcataaattaataaaataaaacttttaatatgccatatcaagatagatagattttgtagatatttatttcatttcatacataatgcaacacttaaattttgagcattgattgggtaggttggaaatgtatggacacaaattaatcttcgtttccgattccttttggcacgttctaaaggtttttgtggtctttcttttcttttttgagataaattgtgtgtgtatatatgatatatcaaatctctaaatcacaatctcatacactttcaatacttttgagaagaattgagcaaaaaagtaaaaaaagaaaagaacaaagagtgtatataatcatatatgggttcagtttctaacaacatcaatattacatcatccaattccaatcatgatc

SEQ ID NO: 265573 - DNA, 734 bp, Cannabis indica
tgtcttctaagatctgaatagtcctctcagactatccatctgtctaaggataaaatgttgtgctaaactttaactgagtacccatacctctatgtagactctccaaaaatcttgatgtaaattttggatctctatccgaaacaatggactttgagactccatgaagacgaacaatttctctaacatataattcagcatactgatcaatgtagaagttcgttcgaatatgcaaaaagtgtgatgactttgtaaacctgtccactgacccacaaagagtcgtattgtcctgtggttctaggcaatccaaccacgaagtccatagcaatatcttcccatttccactccgggatattcaatggctgcagtaaccctgcagaactctgatgttgagcttttacttgctgacaagtaacacacttaacaacatactcaacgatgtcattcttcatgcctgcccaccagaacatggccttgaggtcttgatacatcttcgttgaccctagatgaattgagtagggagttgtatgagactcattcataatctctcttttaataccatcatccataagcacacaaacacgattcataaatcgtaacattcccatttcatccaccgttaagtcactagtcttcccagccgaaaccctatctcgagatttccctaactatggatttttcatctatgcttctataattcactctaaaagtgtagattgtaggataatattagccaa

SEQ ID NO: 265574 - DNA, 838 bp, Cannabis indica
catgagaatttcaattgggtggttgatgaaattttccaaattgatctaataaaatatttagcttaaaagtcaacattaattttttaagatttcgaagatttttttttttaatccataatttgttcaaatattagtgacatgcaatgtaactaaatattaggatcggtaatttaatgatgtaattaattaattgttaagtaataaaagaattttttttaaaaattaaatgtgtgttgaatatttaacaagtgtttttaaatatattttgggactctaaattattatttttttgaaatttgcacaaatctgtattggataggtaaagttataattaacattgtaattttcgatattaatatgagtaattgaaatatttggtttaaaaggcagcattaattttttgatttttttttaaatccaaatttttttaaatattttttattttaaaaagctattaattgtagggttagggttaatgctgtttttaaaatactcactaaaaatatttgaaattacatttatttactaagaaaataaatttttaatctcaaaaagatatttttttaagggttgagatgcaaaatgaccctaaatttggtaactaagttagtaaatgtccactttttaaaaaaattaagaaaatagccaaatctaataaattagctaataaaaattataaaaatagatttattatataataacaaaattaagttacataatttttttagtattgcatattattatattgtaacaaaaataaataaatatattagatcatttaaatatactagtaaaaaaattacgtagcgaggcacgtatactaaattttatgttaggt

SEQ ID NO: 265575 - DNA, 722 bp, Cannabis indica
tccatgcatcgaggctctctagccaagatactcacatcgtccataagttctcgttatgatagacaaatcccaacatcggcgctcacctagtcacttgtgaccaaggtagcatgtgtggcaagatgccaacaccaagctgacgcgtcaacgcttctaatgatgccccattcgatattgtctgaccctcatcgtccaaggactcccatacatccatggaccaatccttaaggcgccatgcctccacgcatgttggcaggccctcaagacaagccactaaactagttgcatacattagacctctgtctctttttagcatggtgcatccgtcctatgcacgtatgcaaactagcccacgaatgactgcacgtgtcatctcgtgttgagacttatggccaaggcgcaccataacgtctcttagaggtttaggccacgtcccgtgcaagcggcataccgacaagccaatggagacgtacctgctaacctctggcagcattcttagacgcactactgagttggctcgatagtgtccatgagtattccaacttatggagacatatgagtcccctcgtggtcctcatatgcctgccctactatccccactgactagtagtaactcacttagcacaaaggtgtcagggggtggtggagagctgacatcaagtactccccccttaaatagcattctaagtttttagccttctaccaagaacatatataatttt

SEQ ID NO: 265576 - DNA, 2067 bp, Cannabis indica
ataaaaaatagaaaaaaaaaatcccttattattatgttttgccatatctactttttcaaatactcattctcctataaccacaaatttcactctttaatattttttattagagaaatactgaaagatattattagtacttagcacttttttcgatgttatactgaaaataattaatcgtgaagcgccacttacaaaatatattaaactaagcactgcggttatctaataataatgctttttttttttttatttgtgccacttatggctaatcaacacatgtaagccaaagatatataattttttagtgtgtttttatttttcgattggcttggaatgaggagacagagtatttaattgtaaccactgcttttctcactctttctttctttcgttttcttttttcacaccttttttggggccatattattgaactacttgtgtgaaagtgggcagtgtgggtaacgactaggttaagataatcaagaattattgtgaagggactgagttgagtagtacacatacgtaattttcttttatttattatcatcattacaaactttgctttttatctttattagtagggatatttttgttccgtatacgaataaattataaccaatattttttgttcatttatttatatatgtacatgatagttatactacatattttattagttttcaaaatattgtaatattttttgaatagtaatttttaaatattgtgttgcgcaccgttgaaatgaaagatcatgaattcgcacaattagagaatgaaaaacaatctcactcagcaaaatgtatctaatattaatgttgtaataattgataataatattagctcatgatattgttgtactaatgtggtttcaaagaatattttcttatattaattataatagccaataggaattatattagctaatgtatcaatcatttgtaaagtacggagaaaaataatacaatcactctagaatatgtaatattcatctttctcctattttctcttggtatcagagccactggcttgcatcaatggcctcagtcgaagatgataatcagtcctcagccacaaattcaaataaaacatccgaacccaaaaaactagtccatctagtcttatttccccaatcattaattgcagatgtttctgctgcaacacctactctagttgctcatatttctccatttaaaagtttagctctccttaccctcaagcttgatgtagctaacgatgcctattggaagttacaggtgctacctgctctacgggctcatgatttggaagggtgaattctagggtcaaaacttgtccaccactgtttgttgatactgttgcaggaactttttactacaacaaaattagcttttagaggcggttacttcaattgaatatagaaaaagcatttttgattagttttgggttcccgctcattcaaaattttcaatttgtagtagttattttataaaaattgtaactatagagtacctcaatatttatgccatcgattacttatttttatttgtgggaatgaccttatgtcgtcagttatttggtactaactgatgccataggacacgcgttggctacaccacaataagaattgtcacttttgccagtgcagttggcaaaatgcgccggtaaagtttttcagcaaaaagggtaacttccaatccctaatataattaagtttactttttgtcggcgcgtattagcgctggaaaaaggcatagtgagaactgtcaaatggtgcatcccattttagcagtttaatatactcttgccaacgcaaatatgtgctggcaaatggtgaacattttggtgagaaatttccttccatgaaatagttttagcagggaattcaaagtttcaccggcgcataactgcaccgacaaaagtaataaaaaattttagggcaaaattcttgtgtgggaattgatttagtcggcacagttaccatttaatgaaacacaccatttcatttagggttccaattaagactttttcgacacaaccaaaatgcgagaaggtcctcttcctcgtcgttcttctctctctctctctctc

SEQ ID NO: 265577 - DNA, 535 bp, Cannabis indica
ctaaaattgagctatttatatttttttagctcaatgaagggtgcttctctacacgtagagggcactattatattagttttattaaagttttttttaatatatgtgtgtgatattattatattaatttatttaatttttgaaaaatattataatatttaaatgatatagaataaaaaaaatatatatatgtagtaatgtaaaagtgtgaggtaaaatagaaatagtaaggttttggtgaggtatttcaaagaataaaatagagaagctgatgagagtactcgaatttgtcttattatgatctatatgttgatcatcacatgtttcatttcaaacagaacaaaagtgggacttctcagcatttattgtagatttggaggtgggggaatagttcgaaggtaaaaaaacatatattgtcttttttttttgctcactcatgatatatactatgttaaaaatcataagactagctattcgtttaaaaatcaatttatacttttttataaatggtttaatattttcatatatttacaatatg

SEQ ID NO: 265578 - DNA, 639 bp, Cannabis indica
atttttagtcataacaaaaaagttatttgtgactaaacatagtatttagttacaagttgtaactaatttagttttaatcacaataagttttgttactaaaaaacacatttagtcactataaattgtaatttttgtgactataattttagctacggatgttttaatcacaacgtaggaataacaatttataattagttataatttttttacttttaatcacaaattttattgtgactaaaagtaaaatttgttataatgtcttttattttatgatcattatttttaaactttaaaatatatatgaagggtcatcgtatatgcttgggagagcattaacatctgttttctggggatacgtggccgatcgctatggcagaaaaccagtcatcataataggaactttcacagtgttagtaacttaattatttcattctaatactaattcatctcaaagcttataaattattaattatttgttttacaatgacagcttgtttctctatttatctcagggttattttcaacaccctgtttggacttagtctaaacttttggatggccatagctacacggtttcttcttggatgttttaatggtttgttagggccaataaaggtacaccataaagatgtaattata

SEQ ID NO: 265579 - DNA, 1831 bp, Cannabis indica
aataatcatctccattttatattcacacaaagagaattaagctctcctattgattaattaacacataataatgagttcactacatctattacaatcaccaaagcccgacgtaactctttcccttaacttatcatcacaatcaaatacgacgtcgttttcaccaacttcctcacactcacacgaccataatcataatcacctccaaacgacgtcgtcttcgtcgtccttgaccaaagccgaagccgaaaagggaggcgtcgttctgattcagctcctcctcagctgcgccaagcacaccgcttgcggaaacctacgccacgccgactcatgtctcagccaaatatctcaactcgcctccgtcgatggcgattccatgcaacgactcgcagcccgcttcgcctcggctttggctctccgccttgttaagcgctggccgggccttcacaaggccctgtggcccaaaccacaaatgggccgagcccaactcgcttcccttcccacctttccgtgcttgggcatcgcctactccatcatcacccggaccttggtccactccctctcccaccaagatgcaatccacttcgttgattttggttccggcgacttaagattgtggatcccgattttcaggagactcgccgtccccggtgagccacgagaaaatgggtctctcagcttgaactttacttttgttcatcgcaacaaagccattttagataagttgggcctgggccttgctaaagaggccgaggccttgggcttttcttttgaatacaacgctctaaacattcctttacaagaattaacaagcgaaatgattaaagctaggccaggggaagctttggctatagtatcgattctaagtcttcatgtgttattggccgaagatgatagagtagaagcacaatttggggggaaaaggaataagggtattaaagattgtcagcaaatgagtcaatttcttaccatggttaaatcactgtcaccaaaagtgatactattagtagagcaagaagctgaccataatttaaaccgtttggtggaccgtttccttgggagcttacattactacagcgcattatttgactcgttagatgccacttttgggtcatcttcatcatcaagtgatgatcaagagaggttggagttagaggaaatgtttggaagagagattgagaacattgtggcgtgtgagggtttggatagggtagagaggcacgagagatatgagaaatgggtggttaggttaggtggagccgggttcaggccaagtcgaatgtggtttgatcctgtggaggatgctaacaaaatggtcaaggtatgtggctcagagtcggagggttacaaagttgtgaataacaaagctagttttgtattgtgctggcatgaccgacccctttatgccgtgtctgcttggatttcttagcatttttagaattaataataaagctatagtctattttttcagcaaaaatattattaataataataaagctctaatctactttctttttttaaacgaactagttctagtatgatgtagatattactatgaactaagtttgaactatgtaaacaatcaagaactttatttttcattgttctagtttggctaaaacttgtattgcttgtaactttgttaaggttcctagaagaacatgcttgtacaggcctgaggcctccccttttgggttctttttgcaatatatcttaacgtttaatttcaaaaaaaaaaaaaaaaagaaactaatgttgaattattgagtattatatagtaaagtaactaaactaagaaatccttgccaatgccaactacattttggttatagat

SEQ ID NO: 265580 - DNA, 645 bp, Cannabis indica
ttgccactctctcgtatctgaagaggatgatggattttgagtattttgatctgcaaatctctcagctgcttctctaactcattttacccaatcattaatcgacacgttgtggtggtcacacgtgccaactgttgtctctcactctctttctcctttttactctcttcaatgcatttatgcctacttgtctctttctttttcctattattaattgagccacaaaattataaatgtgaaaatacattttttatttttttgctatcccaatgtgttcatactttagtttggtttggattttttttttttaaccaaattaaatgttggtttttaaaatttaaaattgaattaaactaattaactgctctaactaaatcaaatcaggtttgaaactgtgatttgtaattcattaatattttaatattttttttactaaattatttttatatttaaagcttctaatacataaataacaataaaattaaatattcttagcacaatattaaagtaatcatcaatgttatgcctaaaattgttcttaaatatcaatattcaataaaaaaatcatattaagtatatatcaagaattaagcagtttggtttgattagaaccacatcaaagaattttaaaatcgtgaccgaatcaaa

SEQ ID NO: 265581 - DNA, 765 bp, Cannabis indica
  modified_base (514)..(514): a, c, t, g, unknown or other
aggccggtttgaagttggcttacacttactcccgggctaaattttctacttccaagagtgcggctctgttcgacaccttgagggcagaggcggacttggccaagaaggaagctgaggaggccagggcagagactggagctgttcgccatgagttgggtgaggccaacaagaagctgttttccgcggagaagaagatctccgtgctaacaaagtacctcgagggtgctgatcgctttgaagaaaccatcgagaccttatccgctgaagttgaccgtcttcaggatgagaggagttctctacgacaagttcttcttcggctaaaggaggataaggacgcccagttgaccgaggtggaccttttgaaggagaaggtcaatgctttggagactgccggcctcgagcttcttttttgatttttggaaggccaatccccagggcagcttcgactacttgggtgacactaagggcatgtacctcgagtactgcgcagccaagttgcctatggtgggaaagnaaacaggtggctccgttcaacttcgtgaccaggttgctgatcgcttctcctgctcgaataatagatcctcctgctccagttggctcagaagaaccgaaccaagagcctgggactccagatatttgagcacttctctttttatctcctgtttataaatatatatattatatatatggcctcaaggcctttaagacatcatgaccggccaagcggtctttaaacatggaattatttttcattttttggacaac

SEQ ID NO: 265582 - DNA, 705 bp, Cannabis indica
attccaataaaatgacctttctaatattttggtaaattaattgtttcattttgaaatgaaaataattctattccaagacattatgaaaaaaaaactaataatttttatattaaattttttcatacattttaagttttattctatttcatttttacttttatttctattctcattactctttttatgttttcattcctcctaagcacactttattttacgttttcctatttctttatggattgtatttatgatggcagttatctctttttttttttccttatacttttttttttattatttttcagaatttagtgtgtccttaaagataaaaactttgtgtacaagtggtacaaagtaacatatatcttttttatttgctcttattgtaacaatcaaaataggatatagcttagatagcttagattctgaaataaaacaaattaaataaataggatagtaacaatcatgagtatgacccataattatccaagtatatagaacgtatagttttgattgttacaatgagaaacaaaacattcatggtttgatgtggggatgagttggtgaagcactatatcttcacataatccaaaactgcatacgtatgggcttacaacacaaacactttttagtaactggtagctagctatttatacaaacatgactgagaaagaaaatattaaaacacatcttgtatactaaagg

SEQ ID NO: 265583 - DNA, 809 bp, Cannabis indica
gtccacgtattttgggcaaattttggagcaacaacatacaacattgataaaaggatgtaaaataaaatccactaaatttaaacatcacataaatatttatttgtacactacttagcaaaaatagaagaagaacaatattattgaataaattttttaggttgagttgcgatttaagttagttctctttaaaacgttcacaacactgttcaaggatgtgcaagcagtcaaaatttaccgattgtccttaggataaaataacccaatcatactatagcggaactccactgcactgtagagaatcgtcaaatacaccctaaaaattatgatatcgcagatgaatttttgtaatgaaaactgtgtttgttttttttctcgatatgaagcagtcaggatttgttggtcgttctcaaatagctcaatcatactatatcgaaatcccactacactgtagagaactattgaatacactttaaaaattatgatatcgcagatagatttttgtagtgaaaactgtatttgttttttttcgatatgaaaaagaatgtattcttctcatcagttaaatcacattatataaatgaatggattgacataatatagctaatacaattatgtattcagttttatattaaatacgttttcaaataaataaaataaagtaaaaaataactattttattaaataaattttcaataaaaataaagtgtcacactaactagttcgattgggtcagtctaaacaacacgtgtatagtaaatgtgttttcacctgttcgcacaaaactgaatactcctttataaacaatgact

SEQ ID NO: 265584 - DNA, 718 bp, Cannabis indica
gcaaagcatcctgtgttggttgcccatcctcacccaacactagttcctccaagtctatgaataaaggtgcctcactgccagtgatgcaactcacatactcactctcattaggccaaggacataacacgaaatacactgtcaactaaaaataaaaataaatatattaatagatgaaaattaacatgaaataaaaataactaaaagcaaagcataaggaacttatatttctagcaaacaatcgtatcacttcatctttgccgagtgtcgtcttcggcttactttaccagttgaccattatgggaaagcgatgcgacatcctcactgcatactcattgcccacctccaagatggcctcgtatgcccaatactataacgctgcagtatagctataagatgcgtactttacctcattctgagtaactcccttctcaattttcttatttattcgtgtcttcacgtctatgaagtctttattacaagttttcatcaactttttaaacaaaatcttcccccatggatactcgtagaagaatggaagattgtcaactattcttatgacaaaagaaagaacgacagtcttctcctcattacaagtgaggacgcccataacaaacaaggtcatccccaacttgaagacatcatcaacttttgtgcaactctcgaaaactctgcacaattgactaaagttgatggatggatcactgttgaagtactccat

SEQ ID NO: 265585 - DNA, 785 bp, Cannabis indica
acccttatgcgaggcttcttgaacgctgaaatgggatacgaggctttgctgattgtgaataagatgagggaagttggagtgagtccaagttcatcagcttgtagaatactgttcaagttattgattagaaatggtgagtatagtagtgtgtggaagcttttcagagatatggttagtaaagggcctcccatttcgactcatacgtttaatatgatgattctcgggttttgtcgaaaagggtttctctcaactggtgagagcttgttacatgtgataagaaaatttcgttgtgagcctgatgtttatggatacaacattgtaatcaatgctaattgtatgatggggaagatttcaaattcacttgaatggattcattttatgatttcaaatggatgtgagccaagtattgttactttcaatacagttataaatgacttatgtaaagagggagacatggtgaaagccaggagtttctttgatggaattcttgaagtgggtgtttttccaaacacagtaacgtacaatattatgatcgatggttatgttaagtcgggggatatcgatgagggagacaaactttacgaggaaatgaagaacaaaggtgttaatcctgatggcatgacatttaatatcctgattgcaggtcactacaagtatcgaaaggagaacattagggacatgttaagggatttggtagtacaggaagtgtttccatttagctctttgtttgatatttcgattgcaggtttgtgttgggcaggacggttggatgaagccatggaatc

SEQ ID NO: 265586 - DNA, 884 bp, Cannabis indica
gtactttttcactcagaaggatctgaacattgacaaaggaggaggttggagttggtgaaagactatgactgtgaaatcctgtatcatcctagaaaggcaaatgttgtagcaaatgccttaagccgaaaaggacctgatcagatactcaatatgatcatgatttctcctcagttagcctcagaaatgtctagggcaaacattgagttggtgactgagaaattgtataatctgacacttcagtcagacttgttggaaagaaacaaagtggctcagttagaagatcctgaattagttaagatttgagaagatgtcttagtgggcaaagctaaggacttttcaatctccgacagtggaatgttgttgttcaaagcacgagtatgtgtccctaataacaccgagcttaagagagaaattttggatgaagctcatacaaccccttactcattgcatccaggaaccaccaagatgtatcaagacctgaaaccctatttctggtggtatgggatgaaaagggatgtggtagactatgtcactaagtgcttaacttgtcaacaaattaaagcagaacatcagcgacctgcaggattacttcagccactaacacttccagaatggaagtgggaagacattgcaatggattttgtggttggtttgcctagaaccataggaatgtacgactcagtttgggtcgtggtagatcgctttacaaagtcagcacatttcttgcctgttaaggtaacctacacagtggattagtatgctgacttgtatgtgaaagagattattcgtcttcatggggtaccgaaatctatcgtttcagatagagaccctaaatttacctcaaagtttttgggaagtttgcagaaggccatgggaactagtct

SEQ ID NO: 265587 - DNA, 521 bp, Cannabis indica
ttgatcttccattaaattattgtttttgcatttggaatatttagtcaatcatgctatatatatatatgatatacagcgcgatttgaaatattgaatttggattataatcattttgttgaatttatgtttcattcggtcgttcatggagtatatatatatttgaaggcactgtatactattctcgtttatgagataaagatatatgtatatataaatatgttgaatatttggtttgagtttttgaggttataatcgttgtatatgcgattaattaaaaaaaaaatctgctattatgtgatttggttgttctctgccgattgaaaattttggtatataaatatgacagttttatatatactgccatgttacagtatttggtcaacgttctaatttttttcgatcaatcgcatatatatataaaagaatctacagcattttaaattcatacatatgcgattaatgtacgtatatttgtttctttttttttgtttttttttttatttttcttgttttttacttga

SEQ ID NO: 265588 - DNA, 615 bp, Cannabis indica
atcaacatgtcgatagaccctccgtgatctatcaattagtcttccttgaagtggatctctgacgagatcctaacctctttaatcggttctctggttgaaccaccttatcagattgttggcctctctattgcggcaatctaacactacctagtgagatcaaaggatgtactcttcttcatccatccatctcaggaattcgcatctctactgagtgagtacatcgcaatcaacaacgcttggttcttcaaggaatttgcatctctattgagtgagtacatcgcagttagcagcacatggttcttcaattaggtcagcttggcaaacggtctctctaactctagctaactttagatcttctcccaagtctacatgggctcgccaattcctggtctcgtctctcctgcatagtactgaggacaaaatgttgttgttgttcttgtggggttcccctcaaggattcttccttcaattggaggcacctgtggagggtcttcccttggagataggggcttactattcacatcaactaggatgcttgtatcgtcgtggccaactgtattggctagatttgtggtgcatgctatagtggcaagattgaccacatctgttgtgttc

SEQ ID NO: 265589 - DNA, 2957 bp, Cannabis indica
tttaaaaaaaaaaatatcttaaaactatttcttctccttcaattccattgaagtactcttcttgcctcaccccaaccgtccacctactgacctctattcaccagcgacacatttggcgactgacgacccacacatctagcgatcgatggctcaaacgtaccctagataagagatctccaccaccaaaacctcataagaacgaacgaatttcgctgcaattggagatctagaaaccaatttcttaaattagaaaatcggtttcataataaacacatcttatatgagttttggtattcgtaactgatttcttctttaagaaactaattttgcttttttaattcattgccttaataaaaaaaattttaattgattttttcatcaataaactagtatcttcattacaaaactggttttgattatatagaagtcaaatttatatacaagttttttaattttttatggtattctttcttatttatagtgatttattccatatttttaaattttttgttaaaataaaaatcatatttggtataattaaatttacatatatatatatataaaaattcattttttttttaaataacccttcgttatatgatatgattattcaatattttattaagtgtagagtaaaattttaaaaataggtattttttaaatataaaataaaatttaattaagttttaaatagtttttttagcatgttccaaccaatcaatttttatttttattttttaaaaatatatatatatttatattaatagaaaagtctcttggactgagggaccatagacaacaatctcaatcgtccaccttaatgacgatcctgaattattttttagatttattagagtcagttaattttagtactattacaaaatatcattccactaatattataattatgtataatattatgtcctctacttttggtttggttattagaaattgtaatagtctattgtcagttttaaataatgttagtattcgttttataagacgatcagcaaatcgcgttgtccactttgttgttaggcgatcccgatttttcactgatcgtagcattcataggattgactttcctgatgagcttcaagctcttttgtatgatgaatgctaaatttcaatgaagttgatattttatttttttaaaaaaaaaaatatattataattatgtaattattatgtatcatatattttaatctaataattattataaaaaaaaaaaaatcattaattatttctcgtgggttacttggtagtgttgtgccaaaataatttccacaagtgtatctttctcagtcatatttctacttctttttctcataagacttttcaagagtaattaagctactgaaaatgaaaagtcaaagaaagaccacgtgacttttctgtacatattcaccacacgactcaatcaaccaactgttcaagaaaataaatgaataaaaataaatataaaatatgatgaagaaaatttacaaccacaatcaataaataaatagtttgaaggttttactatagattttttagaaaattagcaccccttaaaatagatatttgatacactcttatcactttaaataattttttagtcaaattttttcttatggtcatgtacgttatagtaatttaagacatcctgcaaaattttaagaaatttagtaaagtttaacacgccgaaaattacgttcaaacagtgtatgcgtgactattttattttatacacgtgtaaaatagactgtttaaacattgttttctatattataaattattcggaatttctcaaaattttataggttatcttaaatagctataacgtaaatgaatatgaaaaaaaattagactaaaaatttttctggatgccgaaataaatcaagagtgtatcagtacatctcttttaaaggagtgcattgtagaatcacccggatttttttagtatggcaaaagtctggaatattattcttttttatttgctcaacactgaaatattaatatacttgagtccataagtaatttttctctttataactgtaaaactcacccctcacaaagaatagttatttttagtaacaattttttagtcacaaaatacttatagttataacaaaaaattacttgtgagtaaaacataatatttaaatataagttgtcactaatttagttttagtcacaacaagtattgtaactaaaaacacatttagttgcaacaaattgtaaattttgtaactaatacctttagtcacaaaatttttagtcacaatatataaataatgatttataattagtcacgattgttttatttttagtcacaaattttattataactaaaaataaattttgttttatagtgccttctaattctaattacattgattctatagtgatctaatcaaaacaaaatattaatgacaatacactctttgtattatgtttacacaaattgatagtgtacttacaattaaatatattttatggatcttttgcaggaagacacaacttggtcattaaagcatcaattggtaagtaaaaaagttctaatactcttataattaatcaaatttttaaatgcaaaattatactttaactttctattttaatttctgcgtctgaaaatatatataaaatatttttttataacttttttatagtaatatttattatagttacaatattaaatttgtaattttttataaaaaagaaatcgaataatttatagtatcaacaacaaagttactatttcaatttaccatacatattcaaaaaactataaatatactttcaacactataaactatttgggatttttttaaaattatagtgtaattataacgaacactgttgtggaaaaaaaaaatacctcgacatatgtttttgaggtaaaaattgagaaaaaagttgtaattagcacaccttttttaaaaatattttttagtacatatatttcttttttt

SEQ ID NO: 265590 - DNA, 708 bp, Cannabis indica
gcaaaaccctaattagataattatgaataattgaggaattatattattatatagttcaatatatgtgaatttatagaattttaaatatgttaagacctcgttggtgagccaggggcattttggtaattatgacccgagaagggtaaaatgaggaaattaatttaattacgtgcttaatggaactatattattatatagtatgcctatgttgtcttttcaggtgtgttctgacaggttggcgcggtatagtcacaaccaagaattttgggccgaacagagttcgggcccgaaatgcaaatgggattgatttacttggcattttatttgataagtgataatctgaaattatttgtgagttatttatgcatgaaatgacaaaattaccgttgtgtgggtgagtatgtgtgctttaagccctaggggcaaaatggtcatttgaccatatatgagtttcatttaattaaaagtgatttttgaagaaatgaaatgtaatttctggttgtttcttcctctcacccgaaccctctccctctctcttaccctcttgattttcaaagcttgaatttgtaaggaactagcttgatttgaagcttgtttgttggaaaagggtgttggaggcttgaggcttgattgtgcaagtgattgaggtagtttttatagttttaaattgtgtttcccttgctgaaatattgtggtagaaacatgctt

SEQ ID NO: 265591 - DNA, 722 bp, Cannabis indica
taatataataaacactctaataaataatagcctaacttacataagaaaaacatgactgaacttatataaaaggtactattaaatttaaagtgcaatttagaagaagataaatttaatataacaaatgtgaaaatgaagaacaaagagaatcaatatattagaagaataaaaattgcatgaacttacacttgagtcttgccaaagaaattagcctagaaaaggcattgtctttacaccaaaattaataaagcaaaataaagaagaaggaaagaaaagacacaattttgttataatatctactagtaaaatctgattccttttcattgtatttggctactatttatagtgtaaatttgctattcaaatatggtattttcgtgtaccatttagtggggtaaatggcatgaaaaactgaagaaaatgagaattatgagggagttgcgtcaggttcatagccacgtctgcgtttgcgtgttggaggagaagtaacatgggacatgtgttgattgtttgagcttctcgacttacgtgggaacaagattaatggaagtggtctgattgctatgttgttttcggtcaaaagcacccaaactaatttgggcttaattgatttgtattgaataatcaaatcagcccatcaaaagagttaactagagttgaataattattttgggccgtaactttggtgagcaagatggagattcattcccatcaaatatata

SEQ ID NO: 265592 - DNA, 543 bp, Cannabis indica
atcttctgacaccaaatcaaatcctgtcccctacgtcagaccatggttgttaacgtacgtgcttctgtagttcttattgtccaacagcttgtctaggtaattgtttttaaaggagaaacccttgggcgacacgtataaagacctttacgagatatctgcattgattgagcaccacacaatgagaaagctacctaacaaactagcgatcagatggtcttgttattttttggcccttcttacatgttgactaagaaattctaggtgggtaaagggtatgcccttacccacacgtgtgcctataaatacctctactttctatgtacagagggtgaagaatttttacttacaaaacctttcctaaaattcctacagggctttcttctttgagagaaggaagaggaatacataattatcattgtaaacacttgtaatactcaaatactcactgaaaaggccaatacaactgactcgtggactagaggttattaacgcctgaaccatgtaaaaaatccatttgtctattatttactattttgcatttcc

SEQ ID NO: 265593 - DNA, 1700 bp, Cannabis indica
taataatcgtttctcacttaacatgcttagtagtgcaaataactctccttaccttaagtccaaagtcaggtgtgtggcctgacctgggtcgaacaatgcttgatgatctcgggtgctatgtcagacaacggtaaatcaataagggtctattccaaaacactgtctaaaacctgcataaaataacctagggttttctacaaaagcttatggtaaaaataccctaaaataaaatataatacatatcttggctttaatctatggttcatactatagagcccttcataagattcaaaatgttatatagattgtctaaaactgacactcgagtgaaaagttatggccaaaatacaaaaatcggcgattttcaaaaagtaaccaaacaaaattccagttcactacaacaaaaactcgaaaatttcagatcttcaaagtcccaaaacatgctccaaacctaaccaattgttctcaaacttcacaaaacagttctatatcaggtatacagtgtatacaatcaatcaaaacttagaaattcatcaaaataaccaaaacaccataattgagtgaaccttgagttcttaaacttcattctttcaattctaattttaatagccataaaatcattcaaagcacacaaaaaaaacttaatttaaacctagaaatcatgctttgaatctaactagtccttatagtcccaaattcacacacaaaacccaataaaacctaacctagaactttagaaatcaaagagaatgaataaagaacttacctccaagataaacaactcctagggatgaagaaattgacaagattttgatgatttgggctgagttcttccttggagataggttcttttgagtcgaaaagagggtgagagaaaaaaaagagttatgcttattttttgttttgttttggtttaatattaaattcaacatttatcttctaacttaattaaataaaataaattaaaacacttaataaatcagcctataaaaaccatatagcacaagaatctaaaaacctcaaaaatgactattttacccttccttctaacacttaagctaaatataacctaggggtattttggtcaaaccaactatcccaatttaaaccaacaactccactttctaaactagtccagtataaaccaatataactcatcttttattgccgtgacatttttgaccactctgacaagtttccacgtgcaccgagcccaaaaatattttatttcaaaaatagtatttacaatacccccataataagataaaatctctgtatgctttatttattcatatactaaatttacactaattaactcataattagcataagtaaaattataatcttacttcaatatcatataatacatatttaataaaatatgtctaattaaatatcattatattttcttgggatattacaactatcccctccttatagaaattgtatcctcaaatttacctaaataactttggatattgctcccgcatctgtaactccaactcccaggtcacctctttaatcttgttgttcctccacaacacattacctagcagaatagtcttattccgcaacactcactccttcctatccaagatctgaaccagtcgttcttcatatgataggtctgtctgaagtttaatgtcctcttagctcaagatatgggttgtatccgatacatacttctgaagcattaaaat

SEQ ID NO: 265594 - DNA, 1107 bp, Cannabis indica
aaattaataaataaattaattttcaacataaatataattttcttatttaattaaatgtcttaagaaaaatatcaaatatttaagtgtcttgaataaaatcaacttaaatattaactttctatttaattaaatatatctagaaacaaaaatctagaaagtatctatctagataattcacaaactaattacttattttttaattaaaatataatatattttaatctatttattttaattaatcattattgaattactagatttaagttgatctaaaattaattttcaactttaatctaatttttcataattgaaaattttagaatatctacatttaaaataattgtattttgaaatttatgtgggaaataattattaaaataaaataaaatatatactctgaaaattattctaatttaagttaatctaaaattaaaaaatttctaacttaaatataattttctatttaattaaagttattaaaatagaaataattaagttctagaataaaatcaacttaatgattaattctaatttaatatataagaaaatattctaatttaagttggtctaaaattaattaaaaaaaataactttcaacttagatatattttagtgtttaattaaatttctatgaaatagaaacaaataattaagtatcttgattaaaattatataccaaaaatttggttgtactttagaaagtggcacgtgtcaatctcaaggaatatgaatcagcaaatataatggtaattatatcattaaatgcaaaatagaataactcattaaatgtagaattaatagagtacatttgtaactcgctaactgtatattactaagcgagataaggatatacaaactatcaattcatgtattgacgagaaactctcttgtctcgggaggcataatcccgagggagccatagacaacacatatcgaggcatctatctcgttgtatgtaaagaattattgacaaggcgaatcgattattagaacagttagcatataacccacactataataactaagtgaaataacttagaggacatgattgtctagtcttcaaggccttatggtcaaagagcagttcttaagtttgctcaatacact

SEQ ID NO: 265595 - DNA, 568 bp, Cannabis indica
ctgaagcaatgccttctgtcattgatccaaaaagccaacccattaagagttggtcatgtgtaatccaaagctcatactctggatttggagcagggatttcagcttcagtattttctgaaggaagaaactccgggggacatggttttagaccattgagaaaaccctccagacgatgccctcttataatggttagaaccattgttttccactaaaggaaaattgcttctgtcgagcttcatggtgaatggctagacttaaagtgttgctgaaaggagtagtctattgttgcagaacttgcagaaaaggatcctgacgacacaagacctggattggcctgtgaagcttgtcctggtgttcttcctggagtctgagattcatcagatgccatgactagagtacaaccgagctctgataccaagtgagaaagtaaaagaaatacagaggatgatgatgataaatctcagctcaataagcatgagtgaattcattgctatttaaggtttttacaaatgattacagtccattggatacaagggacagatggcagcagattatacaaaaggaatat

SEQ ID NO: 265596 - DNA, 635 bp, Cannabis indica
atgtgcgggttaggaaaaaatggggttgagttatgagaggggtatttttgagttttagataaagtggtcatatattttcaatagtgatatacattagtttatgaataaagtattaagtatatgtaagtatagaaaatttctcattctaaatacactaagtttttttttttttaaaaaatactaaataatacccaatattccttaaataacaatttatgacattagtataattattttgaattaagttatttattgaaaaaaaaaatcatacttgcatacattattaccagtctattctcttactgtgaatgttttaaactatactgtgctgccattaattaattaagttgctaaagtcaaaatcaatcaaatattttacacatattttgataatcaagttttgattgctgagtgcatcatactgtatttgacattgggggaaagttgtggttggtcttaatgataaattaaaagggtcccagctgaagtgaaattgtacattaattactcattattatgatgattgtgatgaagaagaaactatgcagcagaatggctatggtctcctaacttattattggacccaagaaaattatgaaaccacgttaaggagtttactatttgtacacacacat

SEQ ID NO: 265597 - DNA, 902 bp, Cannabis indica
tctcattttatgagcttccaccattgtttcatattctgtaagtttatctctaagtagtcaccgtaggggagagtctaatagagatgaaaacttacaaaatacttatcatatgatatcttacggtcttaaatgccttcatcgaataaccatctttaagggggacgaagtctagcgtctcgaggttatattgaaaacatttaactattgtaagaccaattatggagatcgaatgtctcttgattaaagctcattatttaaaataatgcatttttagttaatcatttatttcaattatattttaataataaaaattacttaatttaaaattggtccaaaattaataaaaaaaataatttttaactttaattttattttcaatatttaatttcgaaaattatatttaaatatataaaattcgaaaaataaataaattaaaatatgataaaataaatatttgaaaattatctaatttaagttgttttttaaataacaaaatttccaacttaaattattttcaaaaaaaaaataattaaataacaaattaagttactaaccacttaatttgaaaaatattattttaagttgatctaaaattaataaactttcaacttaaaataatatttaaaaaatctttcaataactaattacctagaatctctcaacttaattatgaatttaaaaaatattcaaattcaagttgatccaaaattagtgataataaccgattttcaacttaaatatattttatgaaatattaaataatgaagtatctagaagaatctaattagttattaattctttatttaattaaatgtagaaaatacatttagtttatcttgaatttaaattttattaaactaagtgtgtttttctaaattaatttcaaaataatcaaatgaaaa

SEQ ID NO: 265598 - DNA, 834 bp, Cannabis indica
aaccactaggtttaggttaggaattatggacattaaaatatagaaaatattaattggaaaatcaccattaagtggtcggccatagggttaatcgggcccacactttggtattttgcaattttgacaatttttatttctatttctaaaaaaaaaaacgccaattttttaattttaaccatttaaatgccaaaattatttatttaataactaaaataaattgttaaataatattgtcatttaatataattattaattagacataataaagtcttccaattaataaataaaacctagaatctattttcttcacaatttagcccttgcttagtgaaaattcataaactacacatagtctaattttagaattataattgattaattaaaatcaattatttgagtcttacaagcagtatggtctaaactagaatggggaccatgagcctatataactaagcttccaataagttgaaccagaattgaccaagtaaattccctaacttatcaattccttgttgcatccactcacagaatttagaattgcactctcagtcatatagaacgatctatatgttccaccatatagatacgctatcacatttaaccaccgttataatctcaataatcaaagatcctctatagatgatttacaccgagtagggataaatttaccgtttcacccctcgatgtattttgatccttaaacttaacttcctgtaaatgatatttcagtgaatataatcaattgaaataagagctcttccattttacatctattaagccaagctcgaaggaatcatcatttcacttcaaatacaagctatgattccatattta

SEQ ID NO: 265599 - DNA, 500 bp, Cannabis indica
atgatatgaatgagagggaaaatggtaacaattactattatatatagcaaatttatagtactgcatgatatttaaatttacatgcatacgcgtaaattgactgataaagtgggaaaagttgaccaagacaaaagagatacataaataaattactatttttattttatttactttttgactagaaaatattatttaagataccaaattcatgtattagttattacgaggtttcatcatatatattatatattctaattattagtgtgtacacatatacccattcaatgatccaatcagaatcatcaccaattctaaatattagatagtgaattatgatctttgaattgttagttttaaaaatatttaattcgattagattagtagatggcattataagatataaaaaaaattaatatgttcaatatttaatccaactaattagcatttttatctaatttggatatacacgtaataagttcgattttaaacttacaataaat

SEQ ID NO: 265600 - DNA, 2056 bp, Cannabis indica
ccaaactagtgaaaaagtaacaatagcaagaaatgacacagagagatgtgtgcatatatagaaaatgataattatgtactagaatagaaaagagaatgaagacaaatttgatgcataccagggccaaagcatattgtacgaggtaattgctgtaagctgctccttcaggctgcaaaactacagcaaattagagagcctactactacaacactatgcaaatatatgagaataagatttctaaacaaaattgtacaagtaattcacagtggaaaagtcatagttttttgattaaactcatatcaaccattacctgacacccaataaggcggtaaagaagttgctgcaatgctggaagctgatccaacagctcgttacgattcaacatccttgttctactatgtacctgtaaccattaaagcatccattctgttattaaaacaaaacaggcagagattttgaataagtttgttggtttcgaaataatgaaaattgcataacaacggataagacctttgaagctcccggggagtattttgtcaaacgctcggtctcaatgtcatacttcaagactctaaagcactccattctttcctctaaaaagagtgcataggtgcggacccaagcagaacagtcccaagctgcagaaaagacatgttttcggggtctaagaaaggaatgttattattggtaacgaaatcaaataaaggcgcaccagtttgacatgaagcagtgtaccgagggggcttgagtcatctttgaagtttgatatttggagaacatgtgccttatgtgaatagttcaaaagttcctctctaaaggttggatcaccttctcttaatgtcctatgaatcacaatcaatgccttaatggccacctacattcacatagttacttaaattgttttaacatttggctaaaaatgaaagaaaactaaaaaattctgcattgtttcaaatagaagttttaactttttttttattgctcttcaattttggtcttttttctcatatttcattactattactacaagaacatcattatagaaaaaggacattacaatccaatttcttgtctttgataatctcttggccagggcatggatgcaatacgccacatctgcccgcggacgaaccaccgatgttgcagaaaagatttctatgaaaataaattaagaaagaagaaaaaaaattatgaaaattgtcaaacgaacaaatatgaaaaatataatgaaactttcaaattagacaataaatgcatgcaatggccaattagacagatacccaacggtgcattttgtatatacatatacaatcatcaaaccataacatttttttttctttttcttcttccaaaaatgcataaaaaaaaagacactcacttcgaacatggcgttcttttggagggtattctacgtgattggtagccttgacaatggcaatatccaaatccttttgcaagaaaaataaaagaccatagagattaagaaaaatgaattgaaagaaggaatgaatagattaattttgtttagattattaatgtgaaatcagtgtttcaaccttaaattcactattgaccttggcaaggccaaccttggtggtgtccttgagagctccataggccttcctaaagctctgaaacgtccccataattttaattaattgaaatgggcaaccctccacagagctttctctatgagagagaaagttggggagagtttagagagaggaaatgaaggaaacaattaattaatttgattgatttaattatctcaaattcataaatttcaattttgaccgattcatttgccccattgtttagctatatttggaaacaatatgtgttatgccaatgccatgcatatctctttctcttcttgtcacgctttaatcatccattatttcttaccaaaccaaattagattatggccttctcttctggtacgtgacatgtgaaacactgctaagcaaatatatattcataatacatgaccttagaaaaaaaaataatagataataacacaaaaacatttatatataggaggtattaatgcttacag

SEQ ID NO: 265601 - DNA, 600 bp, Cannabis indica
aatattttaacattcaaaatacgaatatattagcggttacaatacaagtcaagtcaccaaaagatatgtaacaacaacatatggaataaaaagaatccaaaaaatatatctcattaataagaggtaagaaaaaacttagataaactaaatttaaacttctattaaaataaattaaattatattattatatttaaagaattaaaataacaaccttatgtaatatttttaaataattaaacatctaatctgaagaaatagaacttaaacttacgtaatatgtaatataatattttatgtaaatatataaataaaacttataaataatatttatattatcatatcaaatattttaaatagaaaaaatacattcacaattgaaatgcatccatttagtacaagaatatatacttaaataaatgataataatactaacttttataatttatttttcaaaaaaagactaaatatattgaaacggtttccaatgaattgttaataaagtgttaaataatacaaacttatgttgatcaagagaagatgaagactcaaagatacaagaatttcaatgtatactctattgaataagcgaaacaagaaaaa

SEQ ID NO: 265602 - DNA, 4116 bp, Cannabis indica
catttctcacggacggttttctcacggacgctcaagtatcgcggtgcccttcccgcaagaacctctgtgtcaactcgttaaggccggccccgctgggatttatatataggaggtactgctgtctcagttggaattctaagatttcttttctttgcattaatggcttttgtttcaaatgcgttaagtcagaaggtttttgatgagggttttgttgttttatttagaagatgatatcgaaaattaaagttcaatttaagaaaattcttgaccgtttagtagagtgataaattgtaaattgtttgtggcttttctttttctcttttacgtttgtcatgggagtctttttgaagattgtgtttacaaaaatgttaatggtataaacatgaacatatgtaattattgttagactatcaaatgcaaacctccacttagtgtttcgatagtgtattcactacttattacggatgtagtttgcaatttgcattgtgatcttgtaatatgattttaaccagtccttatagttcgatttgttgattttgggcagaatttttacgtgatttccaaacaaggaagaggcagctgctttataatttcatttgttgattttggttttggtattccaaatatgggcacctctgaagagtacgctgcatttcaggagaaagttaaacggacagtttatattgacaacctctcaccacaggttactgaacctgtgatgaaaaatgctctggatcagttcggtaatgtaaatagtgtacagttcattccgaactacattgtgcctgggaatatcccaaagtgtgcgttagtggaaatggagagcaaaaaacaagctgatgctgttatctctgtgataacagagttccctttcatgatatctgggatgcctagacctgtgagggcatccgctgctgtggagaatatgtttgatgatcgtcccaggaaacctgatagaaaaatacattgtcgttggcttgataatgacgatcctgatttcgagatagcaaagaaactcaagcatctttctcaaattcattccaaagaagctgacttcttgcttaaggtaatgttctcttctaggatacaatacaactttatttcctaccagcaactcatatattctttgaatttaatttgttttttttcctttattacactaggatttagaaattgtaatttagtaagagcaaaagagtatagaataaaataaatattgtaaagactgttctacagctttccaatctgattacatggttgttgctttgaaagaagcaaatgcataagttgtacattgttctataaaggcaacttatcttgagcctaaacagagtgaaaacggcacacctttacaccactttacctttttttactactgccagccgaagaggaaatgtctggggtgaaacacaaaatatgagcttattataactcaattgatttttttttttctgaaagggaataactcaattgattagcagtaatttaagttgttatttaactgaggcttgcctttgaaattattactatttctttcacatagtttattgtttttttttcctgctgtagaaacaactacaagaagaggagaagcttgcaaagaagcagcaagaagaactcaaagcacattataagaagcacgagttgatggatggtatcatgtctgatggaactgctaagcgcttggcacgtctttataacatccgtcctcccaatgaaggataggctttcaaattagaatcttcctcatgtctaacaagtaatgtcagattgatactaggtaactggtttgtaggctccactagtatgaagaaaacacattctcacctttgttatatgcatactaggtaattttttcagatgaagacagacagaccaggttacactgaagtcacctgagaaactgttctagttcaattacactcaaactttgggcatgtaaatgcttttgcgcagcatcagtttttttgactggtattgtgtttaatcatcttctattgatattagaacaatattatagatgctgccattgcaatgagatcaatctcattttatcaatcttaggaaactataccaaattaggaaatcagagcaatgctaatttacaactatatataatttagagcataaatattaatcatgtccaatttgttacaagttttttttttttttttaaaaaaattttggtacaaaaatagttcacttaaaccccatttaaaagatgtgtgaagatatcccctcagtgctctagtctttgttatgtagagatcaagtcttattaaattttttgttgaataaaatgacaatcaatttcaatgtgcatagttctttcatgaaacatagtttagatgcaatgtgaagaacaacttagttgtcatgccacaattttgctgggtattaaaatctcgagtcccaatttagtcaagggctgatacatccacattatctcacacaagttggactatgcattgaattgtgacacaacactctgcttcttacttttccattagaccaaattccaaatgtacaataatttgtacttaacaaaaaaaaaatgtacaataatttggagtggatcttctatcattttttgaccctacccaatttgcatctgaaaaatactcaatataacagtattcattgtttgcatacataattcaatgtttaggtgctccttttaagaaacataaaaaatttcctaaggctacctaataatgatataaactgacttagcacactaattgaatatcactgtaagataattcatctgcccaaccaaccttcggtatctcttaggatcttcaaataattctccatctcttgtaaggacacttggagtcattgaagtattacaagagtttgccccaatttttgtcctagttaataaatcaagaacatattttctttgagataggaagataattttttttacttgtaacctcaactcccaaaaatactttagcacccccaaatcttttttgtgaagctgagtatgaatgtaacgtaaggagatgagatttatgtaatatcacttcatactttttttcacaatctaacgaagacatgttactatattatagtcaaagcttcttgagcaaataaagagatggatggtccaatcgacaatgaaccttaaaagaaaatgacactcgaacaagcaatggaaattgggagcggtgtatcaagaatgtagaggtttctagactcatatctcttaccataatctttttgtcatagatcctaaaataacaatgaccagactaaaatgaaatacaacatttaattacaagtgtgttaactaaacataaagttaattgaaggataagttatgtaaataagacaaatgacaaaaaatcatagggttatgatattgctagattcatgaacagaagatggtaaacaattagctaaagtaattgtagaagtaaaagtatgatattgaaaagcaagaaagagactagaattatatcggaattaatgaccatttggaggatgaggaatgaatatggacattaaatttacttgaattaataatggtagtgacaaaagaagatgaaaacatgagtaattttcgatattgtgaggacttggcaaatccattctcagagatgaggattgtttttcaaaggtattattggaacatgcaacattaacagagtgtttttgctaatttatgaactataactttttatacaaatttggtgtgattctaatctttttaccagttgcaaaagatacctttagaatctgatgtttgatcgttagattttaaatccttgtgaaattcccattttgtgtaaaatctcaagcgcttaactattagggaaatttgaaattttatgcataatatgaactaaaattggtcaactaatttaaaactttaaaaaatttgtaaaatgggataattgttactaaaacccaattttaccctccccaattacatcacatccctctctctcctctcttcccatttcttcttccttcttcctagagctttcagccgagctctactccaccaccataattttttttttcttctcttcactcattttcaacactataagctgctacactacaacacaacactacaactacaagctccaacactacaagctc

SEQ ID NO: 265603 - DNA, 2359 bp, Cannabis indica
tatttatgaaaaatatcccatccgaatattaaactgtagggatataaaagacgtaaactgtatactagtcatataatttcggttttttactcaaaaaacaattacactttgtgcctgtggctatatattttatatcttagaacgaagttcataacctctagaaaataaaaacatgataatagttgactcaagaagataattattggatatcataactgcttggttcaatatgtgtggccacacaaactttgaaaaagtccaagggtagtagatcaattctaactcactcgaacaaattataagttaaacacttactaaggtcaactcgttgtcgttgacctactttcatttttaaatgaaacatatctatctgttgatatatattgaaaagaaagaaaagaaaaaattgagagagggtcaacggctacaaaacagcatcattctcattggctgcatagtgaagattttttttagcacttggaatttgattaatgtgttttcaacaaaccaataatcatgacgatgggaccagtccactttgctggtgtgcatgaaaaacagaagctcttcttagcttccttccactagagaaagatatataaagtgatattctgatgaaaaatttccacataccactccagattgattacatcacaaaatgtcattgaccacatttggttgctactctcatatttttattattatttatcactacattaccaaacaatgtagtccattgaccagacaccaaccttgaattataccatataattcaagtaatatcttgagggtcacattcatttagagatagtgggaacattaatcataacacatacatatatgtctgctccattatgtttgaaaatggactcaaaatggctataatgtatggaaatgctcgttaaacataaatagaaagtaagtaaagtagcttaattaagcaagactagcaaatgatactgtcttttaagggactcatgtcaattcatttgggagtgttaggttaactaattccatgtaaatgaatttttacgagcatgtgagtccattatatataaactcttcggattttattttgtcccttctaaagttaaaaagacaatattgagagatatatagatgccttggggaacaatgagtgtctattgaaatcttgtcaaacattttcattaacaacaaagaatatagaaagctacattatttatgttttgcctttcacagattgatcatctgtcactatttgagctcaaacctattgtacaaggtacaatgctatcatctgaaaaacagggtatccagcatatgggatatagttttaatctaaaattgacttacaaatccaatatcttagctacactaaaatattcatttatgtgcatgtttgcctttcttttctttcttttctccattttacccaaatcccaaacaagacgagggaacaaaaaaaaataccggaccggagacccccttgtaaaccaataatcttttaagaactctgtgtatatgtccaaaggctaaatgaatgatgctaatgatgtcttgtgtttgagctgcgaacaccatgcaagtatttagtgtacccaagcaaactaagctttccatctgagttgatccattctctgaggattccataagctgaagggccaagactcaattcctgtcaacagtatcatcgacaaaaagatatagatgagtctcttttatcacttatacccagttaaactagttaaactataagggacgtcgtagttcataccctcgccaattcttcaactgatataacccggtttccctctagttgaaaatgctcatatgccgtcgaagctatctgctcccacctatcgatggcttccaattgatgcgtgctaattgctgctgcacaaaactcttcaaagtccatctgtctataggaaagtggctccatctgcaatgagattccattaagatggaagaaatattaagacaaagcggtttaattatatcacataagatgtttgatctgtggtgcatagtatgtcattatacatttctcaaaactaaattttaaacacaaactatgtttcaaacaccagctctcaaaatttaaacttataaaaatgatacacagaagtaagaatcagttctaatattactagagaaacaataatgtaataaatttaaaaattaagttcgagcttgcaaacttgggagtaaaagtacatcaacactagcagaaattttacataccgcattcagtatatcagggaccctggactctcttgtggcatcagttgagttttgcaaaagagcctgaaaaccgaaaagttaatatctttcataagaatggcttttacaaggcatattttaacagtatcaatag

SEQ ID NO: 265604 - DNA, 4033 bp, Cannabis indica
ttttcaaaaaaaaaaaaatacacgaacacgaaaaaaatagcaccaatcgttttgggtttttgctttgctggcttgagaccttttaatgaccacaaacaccgcgaaaactaacaaatggctgaaccaggtgaacttccgttaaaccccttgggtaccctcgttgcgcctgtttatggatccgagaccggtcattcagctgccggaaagcgccgccgggaggaatattctccgggtgtgatgtcaccggtgggcgatggagatgagtcggcatccaagcggcgggtcaagggccaggacgtgctgttcagaatcgttgttccgtcgaggcagattggcaaggtcattggtaaagagggttgcagaatacagaagattcgggaggagagcaaagccactatcaaaatcgccgacgctgtagcggtatgttttagcatcattaactagggtttcaatgcaatctttgataaaatgagtgtaaaagagaagttattttagtgtagcaattgctttatattttgcagcgacatgaagaaagagtggttattgtaaattcaaaggatagtgacaactcggtttcagatgctgagaatgctctacagcaaattgcgagtttgattctgaaggtgaatttgtacaattcaaatcttgctaattgcaatattggataagcctttaggaaagagaataagaattaaattttcttacactagccagctacatattagttatgttaacatatgtgcgtataacaggaggatgatagcactccagaggcatccaaagttggggctggacatgtggctgcgaatacaatcaggcttttgattgctgggtcgcaagcaggctctataattgggatgtctggtcagaatatcgagaaattaaggaactcatctggtgcttctattaccgttctggctcagaatcagttgcctttgtgtgcttctgctcatgaatctgatcgagttgtacaagtgagtagtctactttaatttatgtattcattatgtactggttttatatgtggtcttataaatctagagtgagaactttaccctcggcctgatgtgatgatgaattattaagtattgtttggatgaaatttggataaagtgagatggtgatggattttgtaatatgaaattgggaataatgagaactaataactaatttgcaacattgttaatttaacatgtagatggtatttttatttagggatattaacggtaaaactacccaaactttatattttttaatatttaaacacataaattagttttttgaaggtaaaacctcctaaatttacattccattttgctctttacactttcctccaaaagcctccgataagtgagttttaatggtctacataattttaattttaaatataataaaaattattttaaaatctaaaaaaataaaatagaaaaaaaaaaaattaagaatttttttcttctttctttttcttttcttttcttcttcatctaaaataccctttcttcttcatctgaaataccctaattacttaccctaattcttcctcaccacaccaccaccatcacactacctaacgccaccaccatcattctacctccattaacaccaccaccatcacaccacctccattaacaatcacaactattatgactgtcaccgctatcatcacaccataatcactaccattaacaccaccaccaccaccacaccaccgagaccactccaccacaatcacactaccaccaccgtagctgttgcaataaccactaccactatgacaattttcaaatccatttaaacacctataaaatacaaaacaaataaaatccaatgaaagagagtttgagagagattgagatggagtgagagagagaccaagacaaaggtgacagaaacaaaggtgaggaagagagcctgatggagtgacgacgccgatgttgtggacggaggtaacgatgctgatttgagttttgttttcttagagatagaggcttttttgggtggagtgtttgggcttttggcagagcaatcttcaactagtagacgttttagattttttggggtggagcacaggcggacttttggtggtggtaatggtagaagaagaagaagaagaagaagaatggaagaagaagaggaagaggagttgttgagggttccagaagagaagaaaaagaaaaaggaaaaagatttttttttttttttttttataatttattattaaaataattaattttataatatttaaaataattaaattgtgtggaccaatcataatttgacacgtgtacacaactatacacatgatcagtagaagtgcttttggacggaagtgtaaagagcaaaacggaatgcgagtttagtagagtttgccataaaaaatgagtttatgtggttaagtgttgaaaaatataaagttcgggtggttttcccgccaatatcccttttatctatacaatgaattgatactatgtcttctcttaaaattcagatatcaggtgatgtttctgcagttttgaaggctttagaggagataggctgtcaactaaggtatttatttagttttgtatggtatacaagctgttacgcatgtagttttccagtatctcttaccaggacttatttccttgtctgttagggaaaaccctcctagacaagtcatatctatcagtccagcttataattatactacagtccgaccgcatccaccttacatggacccatcatcaggttatttattttgtttttttctcaatgaaaagactccaaatgccacgttcgcggcaatatcaagttttgataatctttttttcttataaccacatcatctttaggccaaccaatcttgcagctgattatgtaactttcgagatggtaatatcagaaaccctggttggtggtttgattggaaggtgcggctctaacatatcaaggattaggaatgaatctggagcaactatcaaggtaagcagatttgtaagtttcgggtgaaatcaatttttaggtacatgtttaatgcttttaaagaacaagtttataactggtgccgccttaagtgatttttaggttaattatgtttatatatatacataattatatgtatataaatatatatgtatgtttatgcatataatagggcaattctaccaatgtattattgttttaatggttgcatgatccaggtgtttcaaagttttgccaatcttgtatgtttaattgttacatatgttcttagcatgcaagaagttgcatatttaggccttgtttagtacttgaattttgataaggaaaattttgtgggaaaaaggaaagggaaaaatgttttgttttccaatttttcttgtttctaatatattttagtgtttgattggaaatttacattaaattgaatcctcaggtttttttatgaaaacattctctcatttttttttttgaatctaaaaatgagaaagtggagtaccttggattttttttcattaccatcaaaaaattcaagttccaaacagggcctagccttagacattaaggttcaatgggctggtctctgtgcaggtttatggtgggaaaggtgaacaaaatcagagacaaattcagtttggtgggagcacccaacaggtttgtgtaactatttcttttgaagcttttatgaatctttccatcccatacaaatctccatgaaatttacatgctgaatatatctctaatcaagagaaagtacccaataacaaaggaggaagtactacgttgctaagtttacaaactgttcctagattcaaacctttaggggccatttagtacgcaggtttcattttataatttgggtttaacgttgcttggaaagtgatgaagaaaatcataaacctaggaaagcaacattattgtgtttggttgtgtgcagttatattatgatgattgggaatatgaagagttgagataggaatgaaatgtgacaactttttatttttttcacaataatgattattttttttctaaaatactaataattcaatactttttttttctaagtgttcaaaat

SEQ ID NO: 265605 - DNA, 912 bp, Cannabis indica
tctacttttaaaaacaaaaaactgattaaaaaagtattaccaaacgccacctaaatatatctacaaattaactatgccttaacttacttcttagactaagaataattagaagtagtccattcaaaaagaaaaggaatagtgacaacaagagataagatagaagtaaatgacgtgataggaaaacaaatattgaacttgatgaatttatatacaaaaaataattaattaaaggagcattaatttcattttaaaggatgaatatcttataaatcctataattattattcatctccatcattcagccaaacaatatttacgtacctcatatatgtgtagtgtaaatttatatctattctatataaagtgtgcctatataactgaattcttacgtttatgagaaattcatggataactttttttttaaataattttctattcaaaaataatatattttttttattaagatgtattttaatattaatttttaaataaattaatattacttttaaattttaatcgggtttatgagaaatttatgggtaacttttttttaaaataattttctattcaaaaataataattttttttatgaagatgtattttaatattaatttttaaatacattaatattacttttaaattttaatcgtataaacctaaccggaaacacaatctctgaaaattcttaataaaataactaaccccaaaaaagagcaaaagcatgagcaaccaatcgtgattatttaggataatcatttataatttctttttctaaatctcaaaccctcaaaccctatattgctattgaattattgcctcatcttctatgtcgtgattcatggcctctctgctgcgattcctcactttttgtttatttgggtgtaatattcagtgttctattagcgagttatc

SEQ ID NO: 265606 - DNA, 1363 bp, Cannabis indica
ttttttatttttaggtaggtgcatttaaatttactatttggagtttagttttgaatattgtaaattattcataattaattttttcaaaacctattggatgtactctactataactttaatgtagacaatcttatagaaaaaaaaaataaccgatctataatttgatcacattcaagaaatacactcttatcaataggaaaaaagggacacattttaacaaaaattagaagtttttagaaaaatattaaattttgggtaaaaatttataattttattataacatgaaattcttttataaaaataatgtctttttattgaacaatcgcaaaacaacaaaacagaataattaaaacaacagtgaaaaactaaaattaaccgtgaaacaacagtaaaaacttaacacagtacacactacacagtataaaacttacacagtattttcgaaaaaaaaacagtatttttgaaaaaaatttaccctacaataaaaaagtataaaaattaaaaatttcaatatgaaatgtaaaaactcctttataatttgagcgaaaatttcctttattcatgaatcatgtgtcactaagaaaaaaaacctatatcctttataattaatgatgacttttagtcacaatttagattttatgaaactaaacatcactcttattcataataaaatgctaacatatttagtccaccatatttttatttttagttataaattttgtagtaattaaaataagattttttgtaatatgtgtatcaagtgtatatatgtgcaaccaacttgattgcaattgatgtattaattttgttttgttattggagaacagtggtttgtttgggagagagttgtttcataacacaaatttattgagttggtctctgatgttgaaggcattctcttctttgatggttattttgagcgttaatttgtgtactaatatcattaatcagattaccgatttggacatcgacaggtacaattatcactacatttttaattttgtaaaattaaactataatattgattacacttaattaatataattttcattatcaggataaacaagcctgatctaccactagcttcaggggaaatgtcaattgaaacagcttggattatgagcataattgtggccctaactgggttgatactaactataaaattgaactgtggaccactctttatttctctgtattgtgttagtattttggttggagctctctattctgttccaccttttagatggaagcaaaatcctaataccgcattttccagttattttatggtaatttattttattataagtaatgatatatgcacacaaataatatatatagaaaaaaatatcacttttatattaag

SEQ ID NO: 265607 - DNA, 2085 bp, Cannabis indica
agatatttgattaagtgcactaattatattttaacttataagacattaacaatagttggtaattgcgtgcgcaactttaattatacatatgcgtttcatttttattgatgaagttatattctgtatattaatactcaatattttacacttttgaataagctggttggaaattagctatgtactattagtcatgtctaaaggattaattaatctatttcacccgtagatccatatgagttgaatcaaagattgatattgccaattactgcatttagtttgggttttacttgtaatttttttccttatactaagtacagttttggttcttggcagaaaatagaagggaaaagtcattggcacttcttacccagaattttgtaaagctctttgtctgcactagtgtaagtgttatttgaggtttttcttttaaaaattgttttgtttgagtcatttggttgttcgcatcacttgacagttcctcaaaattgttcaggtggatttgatctctctagacgaagctgcaaagttattgcttggggatgcacacaattcatcaattatgagaagtatggtaactaagtcttcatctttaaaataaaaggtttgagtcactgtatttaatatgttatctattgtggttatttcagcgaaagtcaggcggctttacgatattgcaaatgtgctgtcctccatgaatctaattgagaaggtaaaacatcattgagatctttactgtagttactgtctttgtgctttaataaggttacaaatttgcacaagttttaacctgctgtggaaaattatgcagacacatacatcagacacaaggaagcctgcattcaggtggttgggatttggaggaagaggacaagctgagcataatgtctccgctcatgaatcagttgtaactgaatcaaaaaaacgaccatttggagcagacattacaaacatcagttttaagaggaataaattggatttaggtgagagtttaaatatgaactttagcaagcagaagcaagtgaaacaagagagttatgtagatgagattgatagaatcactttcgatgaagattcaaatgaaagtacaaagagctatcagtttggcccttttgcaccagtcaccatagcaagagttggtacctctgagaataatccaaggaaagttcatgacttggagaagcttgctactatttatcgtcctcagtaccaaaaccaaggtaaggtatcaatcatttcatgactgcaagagacttgcctctattttttgttcaagcatttaatctctgcttaaaggaaagacttaaagttttattatttattaaatatcactgatttaatgtagtctttgcaaccgtcttgcagccctgaaagaccttttttcacattacatggaagcatggaaaacatggtactcagaagtatccgagaagaatccaattagaatttcatgatactcaacagtgattgatcaactttatgggggagtggggttatggtagaagtattaggtttaagattttgtgccttgagtcttaaatgcttgttggccacatctaaaaagagttaatcccctcttgagctggtggaatattatgaggaagaggcgggtcttggatgcatgttctctgtgcaccaacaaggaattgccatcttcattttgggatatagtattttactgcattggtttgacatttccacaatcgctgtatctctaatttgcgtctacatagttttttttgtttttttttgttttaacatttggagttggttgaaagttaggataggcaataatagaaagttgggataggcaaagatcttcgtttatattaattgtggaagctgtagagtagctcatgtaaattttctgcgactgaaatttaaagtcaattatgacatttatgtttagggggtgttcatttaatctaatctgcactattttgctcatagtatattcaatttgcactaagtgtggatttcattcttttggatccaatttaattcgcacaatagcttaaatctaatttaatttgcaaaagtgcggattggatcggttattttggattagttactttttaatattaaatt

SEQ ID NO: 265608 - DNA, 1651 bp, Cannabis indica
tgccaacagctccccttcgagaatcctagccccttttttgaaatctgtagctacccaagccatcttcccatcttcctcagcccttagaacagccgcacaaccagcttcgtcgtttaagattgaagcatctgtatgaaaagggaccaagtcggatgaacaaaacggatctgtccagtcctgagtagccaacaaagaaacctccccaggttctgccatatgtctcaggttcatttcttgaacagaggcatggatatcagataacaatttatcaacctcgaaaggccggttcttaaaaatcacattgtttctccatttccaaatcgagtcacaagcacatgccacaaacaattggagactctcatccttcaccgttgtccaccataagccaaaatccataattgtgttccaatgcagatcatctaatcgaatgccccacttactatgaaacaacactgccttgatcacactacagcctccaaacaaatgcagaaccgattcatttgcattatgacaaagcacacaaacttcatcccgtatcccaatccgcatcttagtgggcaaaacatctgaccataatttccagagtaaaagtttcagtctaggatgaatcgatgatcgccagagcttttcccacaccttttttggatccttgaatctccctttttggctcaaccaataaccgcttttaaccgtaaattttcctgactttgaagctgtccaaaacaacatgtcattactagtttctaaaggccgaatgttcaagatagcttgagccacatcctcctgaaaacagtctctaacaatctctgaattccactcacgggtcccctccaaaaacagatcagaaactttgacaaaggcatgtcttctagagtaagtgaaactgtttcgaacttcctccatagacaccccagggacccaaggtctctcccacaagtccgaaacaccatccccaatgaggaccccagcccccatcttgcaaacttttctagcctccaagattccttgccaaacccatgaatctcccaatctcttctccaccctccaagcatcaagccctcgacagtatcgagattccaacaaattcacccaggctttgtcggctctagaaagcatcccccaactcagtttagccaagagagccacatttatatctctgaaccttcttagcccaagaccaccacatcttttaggttggcaaatttcactctaagacttaaaagaacgatatctctgtttttcagcattgccaatccaccaaaaacgcgccacaatcctatccaactcatcacaaacagtcttaggaaccaatgctgttgacatagtatagcaagggatactttgtaacaccgatcccaccaatgtagttctcccagcttgggacaagttctttgccttccaccctccaatcaacccatgacattgtctttgaggaattgaaagtccattcttttcctagccgagaagaagaaaggattgccgaggtattttctttgtgactaagaccgtcaatatccattgtactcttgacttcttcacacctcaaaggagtgttaggcgagaaagagactccactcttctgcttattgaccttttgccccggccaacgttcataccgagaaatacattccataagggttgccgcattctt

SEQ ID NO: 265609 - DNA, 746 bp, Cannabis indica
tcaaaaacttgttgaatttgaattaaccttctttccggcttactcatgaaggagagggttgaatccgaatccactcttctgaatttgttcatgagtcgggccatcacttctcctaggctcattaaatgggctcgtaagcttattaggaacacttgaaaataaatgtgttaccttgtcagaaaacggataatatttaccttcaagttttcgagacttgagagtcacggaggcttacaacattcatccaaatttgttgtggtgtgttaggccataacgacacgaaccctttgatattgcaaagagaaatgttgcggaagcttgctaacctttcatattccgtgagtagagtacacatgtcagttgctctatggtccatgtattggaatttattttactatgatctatatttactaacatgtatattgattataaatctataatctaataaacttgaaacttaagaaatcaaagagaagtgagtttgggagtttaccttggattgaaattactataatcttgctaagatactcaaaattgagctgaaaaatcccaacttgctgctggtttgcttgagaggtcgagagagagagagagagagagggagttagagagagagaatgatgtaattttgtctaaattctaacttaactaaattgatatactttaattctaactaaggaaatagatacaatattcagcaattaaaataaaatagagaataataataaagagaataaaataataat

SEQ ID NO: 265610 - DNA, 811 bp, Cannabis indica
ttggcaagtgaggaaacttagacccgaggttcatgggaccttttgaaatattgtagaggatagggcaagtggcgtacagattggctatactccaagcgctagcaactgtacacaatgtgttccatgtttcaatgcttcgaaaatatgtgtcaaactcatctcatattttgagctacgaagctttggaacttcagcccaatttgtcatatgaagaacaaccagtgtacatactcgatagaagagagaaagttctgaggaacaaaacactggtgttagtaaagtgttacggaataacagtaaggtcgaataggcgacataggaattagagtttgacatgaggcagagatatcccgagttgttcacgtaaatttcgggacaaaatttctataaggaggggataattgtaatatctcaagattagtaaaatggattagcaaccctaattagaatgaattaactatgattgaataattatattgttatataattattgctggaagaatttagacaacaccaaaataaataataaattaagaatacaaacagaaatgagcgagtactcaacctagaatggcgagtattcaaactatggatacacaaacgtactggaaatataaagagcacgaaagaaatatagtggttcagtcagatcacagtctgcttagtccaccgttgcatgggtttttccgtcttatccatttcatgttggatcactcctttatatacaaagcaagtgtccttagattacacagagattgaattcattatcaatttgtttgtacattgaatataacatttaaatcaataaaaa

SEQ ID NO: 265611 - DNA, 525 bp, Cannabis indica
ccatatctcaaccttgtctccgtccggctctgagcagagagaaatcgagaaagagagggactgagagtgtggatctagaaagagagggactgagagagtggagagaactcaagcgagatcgagagggagaacaagcttcagtgtggtctgacgcttgcgatcttgggggtggtgggaactcgtccatcggttgtggtggaatggctcacggaggtcgggcggaggtgcgctggagaagaaacctgggtcaggcggaggggcacagagaggaaactagagagagatgagaacgagtttcagttttaggtttgttttgatttttttttatttattctgtttaaatttttaatgttaatttatattattattttgtatatttaaaattataattatgtttaatttgaatttttatttaatttaatttttttaattttaaaacgaattttaaataataaaaaaaataattaaatgatgtggaccaatgcgaagatgacatgtggacacttacatatcacttaacggaga

SEQ ID NO: 265612 - DNA, 833 bp, Cannabis indica
atatttgttagtttaattaaatacctaagattagaattttattttgataaagttaggtagtatttagtgatattgtagtgtgtatagctaaaaaatttttaaaaaatgcccttagtgtattttgaatttaaattttgatttaaaaagattcataatttttttttatagcattttaattttaatgttaatgtttaatttgttactagaaaatataaagtaatgtagtttaggtaaataaattttttaatgtagtttaattgttattagtatagtttattacaactttagtataatttaggtaatatttaattttaaattttacaaaatttatttgatattggaataattaaaactttatttttttttttgtgttgatgtgtttgctatatgataggttatttgtgatatagttcatctaaataaaaaagtctccaatagtcattcttgaaaagttgttcactcacagaagccagtcctggaaggcttcatttttcttctaggaagggtgtttcgtgagtacctttggtccatgatcccataagcttagatacgttcccggatgcacttagagttacgataacgtggagatctcacttaaaagagagttggttaaattagttgctgactaactaacttaacaactttgattcttatagccaccaacttcaaaattttgatcttaagcctataaataccacatcactggtcattttagaataggggttttgagtagaattgagagttggagagagaaaagattgagaggtagagaaagagaggtacagagaaaagagagagattaggtttgggttttgtaagaagaatcatctgta

SEQ ID NO: 265613 - DNA, 892 bp, Cannabis indica
tctttcttatctttaaatatcaaaaacttgataagttgtaaaaagggcagcaaccatggatgaacaatttcgaatttggattgcaatttttatgttgaacattagctaattttcttaaggcttgaatggctatgaactcctatgttgggtatgattaattttaaagcttattttagtatttttgcctttgttcattcaagtgagttcttatttttatttgattgttatttctttgcaattaataacaatttgctaagctagatcttgttccggaagggctagatctagtagctcaacttgaatggagcaagagtaggggtgttcataaaaaccgaaaatcgaaaccgaccatcaaaccaaccagaccgtaaccgaattttcggttccacgtcatcaccgaatttggtggtcggtttcggtttcggtttttttgacatggcggtcggtttcagtttttgaaataaaaaaatagtttaaccaaaaaaccgtcaaaaccgccaaaaaccgcctaaaactgccaaaaaccgccaaacccaaaaccgccaaaaatcgtacggtcggtttatacggttataatttataaacggtcggttaaggttttcgtaaataaaaccgtaaccgaccggtcagttataaatttaaaaaccgaccataaccgactgattttcacccctaagcaagagaaatcctagatttaggtttttttgtgtacatgaaataggaatatttcatttaccttgcataacttaagaattgatgcataattagtgttctttaatctagtttgatataggaatatgtgaatctagagtagaacttaaattgtgagttttggaaaattctcataaatacataaaaatactggtaggaatgctgaggtaatgttataaca

SEQ ID NO: 265614 - DNA, 1453 bp, Cannabis indica
atttattttgttgttatattagtggcaggtttactaatttagaatattgttagatttagattttttttagtgtttttgacataaataattgtatttttttctatttattttagattttattttgtatttgtattattttaagtttaagtttggccatggagttgtttgttaatattttgccaatagttatattaatgtagttttttttatagtgtgtttattaattgctttcattttgataatgttattgtttgatttcatgaatgaaaatacaagtacgttaaatctgatcactatataaatttaaagtggcctgcacttgaacttaaagtgtcattgagaatcttaatgtcattctatcaggaaatgtcaaggatttatttcgtgctactcaatttggtaaacatgtagatattctttcgtataaattctactctcaagaggttcatggtattcttttaagagaggtgcaacagtccaatgcgaagaaattttgggcgaacattcttagtcgttacattcgttttagagttgaaaggttcactttgattatcagtttggatagtatgggggatagtaataaaataaaattgactcaagattcaaaccaaactattgacagttatgtttcgcggtgttaaatagatcactcaaaaatctatattatgcgaattttactatatttgtttgagacattgtattatatgatatttttaatttttacttatgcttttatacatattgttggaattataacaaaatctgcaactttaattccaacacaacttcaaagacaatacaatagtgcaaaagtgatatttttcaaattctattattttatgcatccacaaaataatatagtattattaaaagctcacacaattgtaaatttactttcagcccaaccaacaagagttacaaactctttctattctttttaaaggttcaacccaacaagcaaaaccaacccaagaagaacatcaatacaaaccctaattctatacctagtatataatggcaagtatcagatattattctcaaaccctaaatatctcttcctactgcagttgccttcttctattctaaaaaaataacattttcttcttctcacaaaaacaactgcacaaacagaaaaaattagggttagggttttggatttctttctcttcttcttcttacagtcacggtaggatttcgggttctaatagattcttgggttttctaagtttctcttgttctcttctaaatggtagctagggttcttataggttttgatttcttcaaactttttctcctcttgttctacccgaaataataaacccagaaaaccctcacgcctctcagccagagactcaccacaccaaactcaaaaaaaccaagaacaaaaaaacccacacaaatacaaatatcagaaaattaagagtgagattagagaatacaaacagtgatgaaa

SEQ ID NO: 265615 - DNA, 537 bp, Cannabis indica
cgggtcggagtctgatccgactatgatccgacctgatccagatcatgtacggatctacctcgccccgccccgctggatcagatactcggagcggataagatccgaccctaactttttttttttttaaaaaaaaattagtttatatctaaatttattaatttttttttcaaaatttatttgtttaagaactaataatgcataattttttttcttgtatatttttttcctgtttagttttgtttcagcttttacagtataaactcagaccaatttcatttccttcctataataatcaacaacaatatgaaaaactcagaaagagctttttttttttgaacagaaacaacacctctttttactcgaacaaagaataataagttgtgattgctccctccttgtgtgagggaatgatagattagtagtcttacaacaaatggaattttgttttgagttgctgaacttgttggtaaatatgttaccccaaggcctaatcttattcatgggtatccagacaagttgttagagctctttgaaaaa

SEQ ID NO: 265616 - DNA, 641 bp, Cannabis indica
gtgtaaaaataaaaaagtccctaaaaaattaatatatatattttttaaattagaagtaaattatttaaagatcatagtatacctatattagatttgttaaaatcttttttatttaacaactatgtcaattttttttaatttttttatgggttgttgtgggttgttggtaatatattttgttgtacagtatatttttattttgttataaggtatattatcatttttagataatatttattttttattttactatatataataatgatatataattttgtaacgccttaactagtaaagcgtcaggtgtgtgtgcttttataaattagtttataataataaattaacaatttaagaaaaagcgaattaattaaaagtttggaagattacttaaatttagtatttttgctccctgaatttttgacgttatctaataatgccccttaaagtatatggcttagtaaaaattctccctaaaaacataatggttacataattatgctccttcagttaggtttcgtttcttttacccattaaaaatgagtatttttacccactgaattttgaccaacacaacctcattttattaaaaagaactaattttaaaaactataatgtactactaattataaaaaaaaaaaaaa

SEQ ID NO: 265617 - DNA, 975 bp, Cannabis indica
ttgaaatgagcatggtaagtgaacttacttattttctaggtctccaattgaaataatttgatgagggtacttttgcctctcaaagtaagtgcgaagaatttgatgaaaaaattaagacttgagaatgccaaacataccaatactcctatgagcataacattgaaactatccacagatgaacaaggagtaaaggtagattttttttttatatgtgtagtaagtaattttttaaatcttattttttatactgtaaattttttgaaattttttaaaaatttaaaagtgatcttaaataaacgtatgcgatcatgaaaacaaaaatgaaagcactctcctaaatatcgaaacagataaaaaatctaccaaaacgatgttataaagatcagaaattttctaaattttatatggatactgttaattcccttattattaattgttttacctttggactagtcaatgagagatcgatgtacattgatgcatggaatgaagcccaaaacagttggtctcaacaaacagtttaatagcagaactattaggctggtgactatgtataataagaataacaacaataatcaattaaaagggggagtaataatttttttatcaagaaacgagagtaataatattaaaagtatatatatatcaattatttttttgaatgtacccatttattaataatttataggaataattatatttcaaaaaaaaaaaaaacttaataaaaataacgactgtgtagaaatttaaatattttacagtttttaaattttatttactataaaaaatagtctagatgtattttatatgttgtacttttattatttttgtttaattttttcttatttattttgttattattatgtttgttgttttttgtattattatttttaattagttctttttctttgtttatttttctatgtagtttttgtttatttacttattatttttttttttttaatttttgttttt

SEQ ID NO: 265618 - DNA, 1396 bp, Cannabis indica
cggcattacaccactctacaaaaataaataaacccatttaaaacatacttaaaagtcaataattaattaccttaattattagcttgcctgaatgagaaaagagatcgatattcgatcatgtgatgagttaattaccattgtaattgaagttgaagaggtgttgtgaaaatgagtgaatcttgtcattgagaagaagaagaaaaatatgaatgatatattaattggtaaagaggttatagtagtttgattaatatatgtatagcagtaataatagagaagatgtagtgatgaaaaatatgatcagaattaggcttcaacgtgtcaaaagcaatgtgaaaactgtaagaaaaacactgtgatcaccaaataaaaaatcgaatttgtctgagaaacccaagacaagaaattagagagaaagagagctttatgatcaatgttttgctaccaacatatattgggcctatcgataccccctcccactactgctataaatgtttattgtgaagtgttttttctataatattttttaattatgatcaatatttataagaaaatgaaagttttatagtagataatcaattacttcactattggttggtcaatctcaaactcatttggagaatgattataggtatcatctatgtatagatgacaaattagaagtttgattgtgttcaaatctgtaactaataaaatttgagatttgattttattgtcttcattgttttctcattggcatctgagttaaatagtttgactttgtgttggttattttgcttggaccgtctcagggaaattctacatcaattacaaagtataatttttttacttttttgcactacttcgagatgtgcaaaggttgttattttcgagctacttgttgttgtgtgcactactaaatttataagattcatcacatttatcagttaatattcttttgtcatttttagtttgaagtatgctgttttactctttgtaattttgtcacatcatataacatgatttcgatatgtatacacacattggcatatggggaaacaaataaagaaagagaatctcttttttctcgcataatatttatccaagtttttacacaatccagccaaccattaatacatttatatttataacatcatagtataatcttcctgatctatctattttatagaatataacaaacctatagccacatgaaatatgcaaaggctgagagaaatatataaagttgcagtctttaactctttataaagttaaatgcagagagactatctttgaataactttgaaataacatctcttgattgacaatatccaattattatttatattttgcagcaacaaaaactaaaattcttgagtgtatatatataatataaaatcattgatagtactgcttc

SEQ ID NO: 265619 - DNA, 723 bp, Cannabis indica
attgagtaactaaagttgaattttagtttctttcatgacactagttccttgatgagttacttctaacattttccacatatcatgagccgaggaggcttgctcaatatttttaaatatatctctatctaatccacatattaaagcatacttagccttagcattcttagacatcatctttttatcattttcatcatatgcatcatatttctttatagtttctacaccatctacaacatgcataggaatgtaaggaccataacatacaatatgccacaaatcataatcaatggattgaagataagtttccattctaattttccaataaggaaagtctaccccatcaaagaatggtgctctacttgtgcttaaaccttctagcatgttattgtgtgaattgcttggaaacgacatactcttagattgtgaaatctacccaaaaacaagagcccttgctctgataccaattgttagcccaagatatgtttccaagaggggggtgaattggaaatttaaactaatttcagaaatttaaaaaccccaaagacaattcatgcaaatattcaagtttaatgcaataacaaagataatcacaagtataaacaaataacaaacttgaaatgtaaagactttagggatagaaattgcaaactcttgatttttacaaggttcggtagaactaagccacctacgtccttggtcttcaaagctatggacctagctttg

SEQ ID NO: 265620 - DNA, 651 bp, Cannabis indica
tatatatatatatatgatattacgattctatctcaaatcaattataattagttaatttaaaagtttttttttttaatattacggtaagattgatgaattctatcttaaaattaattactaataaaagaagaagtttattaatcttttatattattattatgatattatctttcaacactagcttaaaaaattatatttattttcaaaatttattttaaacatctctaatatttttttataaaagcaatttaaatgtaataattaaataactaaaaaaacaaccatacgtaaaaaaaaaacaaaaaaaaactcagatgaagagatttgatagtagatgtgggcatttcagttgcaattttttgaatattaaagtttgtagattgatgtgatttatcaaaaaaaaaaaaaatacatattttgacactattattaaacctaatttattaccttttatggataataaaaatgtaaattataaaggcctttcttctttctttatatatatatataataaagcagtagtacatatctgaaaaagaaaatgaaaaatgattgaaagagatggaaagaaaacgaatataaattaccagaatatctttcaatatcattgcaataattttaatttttaatttttaatttttgtgaaagaag

SEQ ID NO: 265621 - DNA, 917 bp, Cannabis indica
gttgatagtattgcactatcaatcaagtaagcatatacttaattattatatattatcattctgtcctatattatatacaaactgatcatagatttattactaatttatctaatggaatgtataatacaagagacatgaaaatgcacttagaaatattgacaagtactagatagtaatgatattaatgatgcgacacttgatcaactcactactcactttaattcccaatcgtccgtttatgaagaagaattaatagtagggcttttttcatttaaagtatcataccaaatcactggccaactaaattgatacatatataacgaaatacataaataatgacaaatagtatggcttacaaaaatgaaggccaatactatctaaatgcattgaaaacaaatcttcaacacaatccctgcaagaacgaaaaacaacaccaaaagcaccacgatcacagtcggccttagaatctccattatctcatatggatattaatattgatccaacctagaatgggaacagattggggccgaatgaaataattttcttattacttaaaaactcatacatagatatatagatcgatatggaggattttttgccataacccttgctttcttttggttaatatgcatcgcaatgataaaaattacaaattaagcacattaatcttaattattggtaagaattgttacgatttatcaaactagtgattcagttatctagttgggttttttgttttagtagttttgattatgcgtcttctataaaaacatcatcattaagcatcattgtataagagtttctcgacaacagattaggtaattaaaatagaggttggaacggtacataatatatatagatagtatttctggcgagcgaggagtattttagtgggattggatacagggtggctaacc

SEQ ID NO: 265622 - DNA, 482 bp, Cannabis indica
tttttataaaaaaaaattacatttttacgtttaaagaattttttttttacatttttacaattttccttagaaataacatgaaaacacaagaaaactacataaaagtaacatgaaaataacatttaagtaacatcaaaataataaaaaaaaaataacatacagatatcaaaaaatcaataacaaattaacaagtataacataaaaaaaccgtattttctataaataaaaataaaaaaaattataaaaatgtttaaaattctatgaaaccgtattttcgtaattttttttgttatttttgtgtatttatgaaataatcccattatcattacaatactcaatgtaataactattacattgtaataaattataaaagttaaaaggaaaaaacaaacgatataataaacctagggtgactatttaatggttacatttttattgtaaccatatggttacatttttctttaacctgtaatagcaggtta

SEQ ID NO: 265623 - DNA, 654 bp, Cannabis indica
aagttgaacccgcccaatgatttcgtcggtttggtcgggttaacccgtctaaaccgttcttaactttttttttacaataattattcttagtttctactattgaaataattttatttaaaaaaataaaaatatattatttatattttaagctaaaaaatactatagtttaaattaattctaagaactttaatataagataaatataattgagtaaacataaaataataaaataaataaaaaaaaaagtaataatatagtataaattttaaacttcaacttcaatgttcaaatacaataaaaattattacctataatatttaagttttaagttaaacactaaaatatccaaactttaaatacaaaatagtttaactaataaatgtaatttatgtaatataatatatacactttcattaaaaaaatatataagtcggtttaattcgggtttattgggcggtttataataatttgtaaactacccaatatattcattgggcggtttgaattttcattatattatttcgggttgtattttttgtcggtttattcggtttagtttgggcggtttattcggattaggcggtttgtaaattttgttgaacacccctaagtttatgtcctcatttcaaaaaaatatagcaaatgaccctaaat

SEQ ID NO: 265624 - DNA, 1319 bp, Cannabis indica
gtaatagcctcttctcatttggactgtactagtgctttctctactaaatgctttactcagtatatcttcttgtgcactacaggaactcctgctcttacctcaagaggatttattgaggaagattttgccaaggttgcagaattctttgatgctgctgtgactttggccttgaaaatcaagggagaagcagcaggtacaaagttgaaggactttgtggcctccttgcaggcccctcacatccaatccgaggttgcaaagctcaaacatgatgtggaagagtatgccaagcagttccctacaattgggtttgagaaggaaaccatgaagtacaagaattaagggagacatcctcatgttctaggtatgcaaatgaatgaatgtccatgtatctaattcatcggtgattgaaaagttcggattctttaaacttgtttgtcatagctttgaaagtactttcagagcctaaaagttatttgggtaattatttaaatgtgttttttgtattcgaaagctcttttgaaaaaaaacaaaggatgctaatttgagttttaatgaaattttaaagtttatatattttaaatatttcgtgggtttttctttcactgattacaagtatggaacagaataggcactgtatgcagacgcgaagaggagtttcccatttgacaaatgagaaggaccatatgcgaaggagtttaatcttgaggcttttataccttacctacagatttaggagacctcaatttggttcttcaagaagtatatgtaaatacactatttgaggccctgtaatgcaataaaactacataactcttatctcttttatttatgtgatatgttgacatagcaaactccctttaattggtttaataaaagcataatcctactagtgctcaaaccaaatgaattgatctcatgtttatgttacaagacaaaaacctgactcaaacatattaaaagttgcatattctatattctaattgaaagagaataagaaaactcaatcttaccttaaaagttgatggttgacctaagaaagtcaggtggaactccaattttcctaaagtataacctcaaattgattatagaacttggaaaatgatgggatgtgtaagagtataagcaagttagttttatgataggaccaatcctaagatatttgttccatttttgtggataaaaactccagttttttttattagtaaaatgaagttgtttgacgtaagaaggggagagttgttaagagcttttgtaataataaatatggtcatggcaacaacgcgcattggcctctcacgctcagtagtacaacctcttct

SEQ ID NO: 265625 - DNA, 376 bp, Cannabis indica
cttatagtcaacaggttacaaatatactctgatacttacgtaattaatgagttataccataaaaagcgacagcatcgatccgcattccttttatcttgacacgtgtcccccactgagaaggtagccaaatttcgggtataataattgccccttaaaaagttcttttttagtaaaaagtgactttttaataattacatagggcattttcatcataatcccttttcgaaagacgcgtcctttgatcatggcagttgtacggttttgtagggtaattatgaaccgtatcttcatatttttccctactcccaactgttagatttcccaatctttggccttcttgtcactggactttgtgtataaattggcgacttaagct

SEQ ID NO: 265626 - DNA, 1747 bp, Cannabis indica
cttattcagtttcatatcgaaatacatgcaaactttaagagcaaccaaactttattatttttatattcttcaagcccagtttagcgggagggcacatgtggcttgtggtatcccacttaaaatttcttatatgtaattagcattactataggcacgagctgttcctaaatacaatcatgaatcaagtctcgttaggcatattgtctagcataatattactatttgtgtaattgaatatctgatcctacttgttatactttaataaaaattatagaaaattgttaactttgtttttaaagatgtcatctcatagtggtggtactcacattgatgtcctatagcaattctcttgtataatagaactatgagattagatacttataccttttaacattaaatttaatattactcctacttttctacaaattaaaaaaaaataaagtatatacatatctaacttaatatataaaaattaaatgtttggaatgaatatgagtagcttttaaataccgaattcaattgtaaacatataatgacaggtttacagagtcgactttgtgatcctttgcattggacgattcagcaatgtgcctaacattccagaattccctccagatcatgggcccaatgtgtttcatggccaagtcattcactccaaagactatgccgccatggattccaaagctgctgctgaatttgtcaaagataagcaagttactatagttggctttcagaaatctgcactagacattgctatggaatgttccactgcaaatggtaaaaaaatatttgcattataaaactattgctagatttaaattgctcgtaagaagaaaaaaaaacgataatgatcaaaattttattttaatttatatatatgcaggtgtggaaaatccatgcactgtgctatacagaacagaacactggaatattccagattacactccatggggtttcccgttagctaatttataccttaatcgcttctctgaattacttgttcataagcctggcgaaggttgtatactgggtctcttagctactttactttctcctgtggtaatttcctttttcccttattagttctttttgtagttttgtcatttcacttactaataataaaattaatgtaaaaaatattagaaagaggcattctcaaaatttgtggagagtggcataaagcataagcttccattggagaagcatggaatggtacccaggaatagctttcatcagcaaattaatacttgtttagtggcaacagtgcctgaaaagttttatgatagagttgaagaagggagtattattttgaagaaagcatcaacatttggtttctgcaaagaaggtgttttggtagacggtgaaaccaacccaagaaacaccgatgtggtaatattggccactggatataagggtgaccaaaacctcaaacacatttttacatccccagcctttcagggctacattgttggtgaccctaatgcttcgttacccctatataggtaatacatacgtacacttaagttaattatgttttcgctaacattaaaatatttttcttagaataaagtgagtgtataaatattaggttaattaggaattttttccttctgaattttgacatgtataaaatcatgccttctgaatatttttggctgttaaaaattttccctaaactattgagattgttagatttaaagacttttgtctaagttcattcaattttactgttttagtgattgtttat

SEQ ID NO: 265627 - DNA, 1052 bp, Cannabis indica
gggtcatactataaagatagataactcttttaaggtcatgaaaggagaactaagaaatggcaactatatctacaaggtaaaacagttactggtgagagtggcatggttgttgaaggccagatatggaaagcactagactatgtcatttaagatttggacatgtgagtgaaaagggtatgagtgagctggaaaaataagggatactcaaaggaaaattgggtgagaaactagagttctatgataactgtgtctatggaaaatgttgtaaattgaaattcacactagcgaaatacaccacacaaggaaagcttgattacatacactctgatctatggggggcttccaggattaaagcattgagaggtgcaagttacttcataagtatagtagatgactataccaagaaattatgggttttcttacttaaaataaagaatgaggcattcaacacctttgtcacttggaaaagactaattgaaaaccagacatgaaggaagataaagaagctcagaactgataatggattagagttctgttcagatgagttcactaggttctgtcaacatgagggaatcgacagacataaaacaattgtgaaaaatccacaaaaaatgaacttactaaaagaatgaataggactttattgaaaagagtgagatgcatgctcaagggagctggccttgaaaagaaattttggggtgaagcactgaagaaagcgtgttatttgataaataggtgtccttcaactacactcaagtttaaaactccttaagagatttggacaggacatgttccaacagttgatcatcttagagtttttggatgcataacttttgctcataccagataggattaacttgagccaatggctctcaagtgtatgttccttagataccctaaaggggtaaaaggatagaagttgtggtgtttggaagaaggacataagaaatgtataattagcagggatgtagtgttcaaggaacatgaaattgttaaaatatattttaccaggatctagatttactaacaagcatgtttcattaacatcctaa

SEQ ID NO: 265628 - DNA, 2592 bp, Cannabis indica
aaataatataaaaaaattattaattaattataagaccacacataatatggtattaagtactttaaaatttctaataaaaatgtgcatcccattagttatcaactgatggaaaagtagaaacattttcatatatgttataataaaatattacaaaaatatattggtgagaaagcataaacataaataaaaatgttaatagattgccaacccaacaaatacatccaatcttttgtgaaaagaaatgttacgaagatgtggtttatagagaaaataactaataaattaggcttattaccaagttgtttgcaataaaatagaagaaaagtctaagaggagtcaactgaaaattcaataaatcaccatgctcaaatttaaaaaaaaaaaaaaaaaaaaaaaaagatatatatgaactatactaagcctctaaatcaaataaacatatgataaattttctactcatcaatggtgtcctcctattattgaaatagtttataaaaaaaaataacaaaacagcagcatgatataataaacttacaattgatgataattttataaatcaaataattaccttgtcatatatgataggattttagtatagctaggtaattattgtgtttattgtaattattctatcaaaaaataaattatatgtatgttctacccacattggtcgtacaaatgtgatttgtgagtttttattacatttaatcttgactgagcataaaattttagtaattaaaattattttgtgctaaaaaataaaaaataaaaaatgctacgagttgattgaaaattaaaaaaaaaaaataaataaacctgtggttgtaggtaggtgccacgtgttggattcaatcttgatgacatggcacctcaccacccactagttatctttacctatattactttgaagagaaaggataagcctttttcacgtcaataatcgataatccaaacaaaagtctaacagctcagtaaagactgactcagccatggccaccgcccacctctccttcccactacgtcttccccacctatcccatactccgtctcactgcaaacccactggattgttctccgtttccactcgaagccggctcggctttaggcttccagctatgggtggtgacatgttgggagatttcggtgccagagaccctttcccggccgagctggaaagccaattcggagagaaagttctgggcaacgttagcactgagcacaaaaatccttatccccaatttggatgctctctctctcgcccagcaacagtgtgacccctatgtctctcctatgcaaccgcccatgtcagaggatgaggctacgaaacttctcaagaaggtcaatttcccaattcttatcttctattagtaatgattgaatggtattcgatgaaattactgagtggatatagcttttgttaattttgagcttgtttttaagtatttgaattttcccaaaaaaaacattaaaataaataaatagtaagtagttatttgttatacagataacccttaccttacccttcaaattcgactgtatatatatatatatgggaagtagtttggtttttctggtactgtataggtgggaaagacacaagtctatcatcttttggttctgcaatcttttattagtcagaagtaaatttactaatgctcatttgtgaattttgcttttgtataatatatgcctttggttcttgttttaatcagatttgtttatgctctttttgtgaataggttattggttggagactaataaatgaagaagggaatctcaaactacaatgcttatggaagttaagagactatcaatgtggtattgaacttatcaataggatatacaaagttgtagaaagtacaggccattttccagatctccacttggaacagcctaatcaaattagagctgtattatggacatcttccattggtactaaacacattcatgaacttgtcaattttgttctccttaagtatcattttaacattgtatcaaactcttcttccttttttggtaactaagatggccaaattttcatgctttcttacatggttactggttttgtttgttgcaggaggattgagcatgaatgatttcattgtagcagccaaattagatgagataaaaacttcagatcttgacccctagaaaaagagtttgggcttaattcaaacatatcatatcgcattcacccaagaccaagagacaaaatcaatctgtaatgtgattcttcagaaggaaaaggaaaattttagttttttttttattattattttgctaaagaaaaaaaaatgttactgttagtattttttgaaagtagtgttattcttttgctatttatttctcctggattcaaaagatttcttcctcacgttactcaaattatagtgtcaggtcacgatattcttccatttggtcatgaatacgaaaccaaaatccattttaatcatatatgcaattatgtaaaaaggatttgattttctatacttacatatacctaatattttatttctaaactaatacatatcatcattgaaaatatatgaccactttatctaaaatccaaaaatacccctctcaaattttcca

SEQ ID NO: 265629 - DNA, 620 bp, Cannabis indica
cagaaattaaagtgcagaatttaaaaattttaagtctctccccccaaactaaatatgacattgtccccaatgtatacaataacatgcagagagaagagacttacctgagaccctctcagaaagggttgggtggtggcggctggtcatatgggtagaaccgaggaggttgcgccaaataattcgggtcatcaatcccgatgttcattctgttgatgagagagttaagttgctgaacttgtccctcatcatggatactcctctgcaccatgtattgttgcatgtggttgttctgctgaattatataactcagctgtgcatgagtgtattgcgtcgtgggatcgataggcccaggcaattgtaggggctgctcctcttcttcttcaacactaggctctcgttgccgcctacgtccttgcggtgcatcaggtggaggctggccatagggatgtggctctttcagcctgttgacaaaggcgatgtccatcttgcgaagtggcaacaccgtgttgtcatactccaattggggaacttcatatgccccgcagagttctgttataactcccgccaaaccaaaccacctcccgtggctcctgtacgatctgatcaatactatgcctgat

SEQ ID NO: 265630 - DNA, 1586 bp, Cannabis indica
gagtttttttagaacattttttttgcacaactcagaggaagaattattctgctttttgagctctttttgattagtaggaaggaggcatttgcagattgtttactctttatatggctttgttactttctagtttcttgtaaggagaaaaggctcctcttattgaagctatagactagttattgttaaattaataattgaaaataattgaaatgtactaaattatatttcatgaactttttatgttattaaaaattcttttaatattaaaattattggatttaaggatttaatatgacgattgtccatataccaaattgtgctcttaaattttgatatatctactaaatcatgtttcttgaaatttaacatatagtaaattttttatccatatcagattttctttagtaaaattaaacaaaaattttaaaattcaacaatttcaatagtttaagagaaatttcaacaaagtgaaaaattcaaagaacatgatttaatatgtcaaagttaaaggaaaaaattccatgtttggtaggaatgaaaagtgaagaaaaaagaaaattgaggtgaaaaacaaaattgccttcttcaaaaacttgtgtaaaattcatactactgaaaaataaaggcaactgatataattcaacactaaatatgataaattaaagccaattccagtaatgtggtcacatacatctttagtacaacatggtatgatcaaatcatctttgtaaacatggttctttactcaaatcttaaatggcaaaatgaattctattttctagtacctgtaatgtgaacaacacctctaactcgaatgagcctataaacaaatctagtgtgttcctaaaagaattgacaccaagtagttaacatggttccaaaaatttacagcaggtgttaagggcagctcttgatacccttcatttcttggtagtcattcaaatatgcatctattagttgttgaggtaccgttagagagcagcttaacaataagtttctcgagtcttttcgcgcctggaccaggcctcagaacatcagcatctccccataccgagcacgtgctgtttctaggctcacctaagcaccagccaccaggcacgacatcacctctacctcggcttaaaatttcttggtcgatacggtcaagtaatggatcattcaggttgaatttagaagcgaaggctgccccactttgaatcattggatcaaagtcatcgggaatgaccttacggggctcctcctttgggggtttgtcgaagttggcatattgtaggttgtggtttacaatggttttattgaactgtcgagaattgcataaaatggtggggaagtagctggaaagtgctgaaggtgtgttggaaaaatacatcaacagagttctagggaggttatccgtacctagaatgcagaattcaataagattacggctgtaaatggcaaacgatgaacctgcacaaaaaattggcatcagagttagacatttttaggagtacagattgcccatgactaagtagtgtatacagaaataaacaaggttggtaaggaaaagatgaaacagacaaattagctacaaaaaaggatctgtt

SEQ ID NO: 265631 - DNA, 657 bp, Cannabis indica
aaacggcattgaattcctaataaggaaaaaaaaatacacacttgctaaagtatgttaagaccgatcaaggtcagaggaacgacaacaaccaagatttgctacctccaccggtagacggacatttacaagtcattgttggaggcccgcacattgctagagatttgggcaaagatcgggagaggtatgcccgaacagcgcaacacgagcaagaagaagttattctggtcggtgaagaaaggaagcccaaagttccacgagcaggagagctgaccataaccttcaacgatgaagacgctgtgaaaattaaatttcaacacaacgacccactggtcgtggaagtccagatagctaataaaatggttgccagagccatgatcgataatggagcctcttctaatatcttgttcaaaactgcttatgaaaagatgggactccaactcaaggatctaaccccattcctccagcctgtctatggtttctccggtcaaggagtcgcacctctgggacaaattcgcctacccctcactgttggacaagctctaacaagcatgactgtcatggcacagttcctgatgttagatgttccttcaatttttaaccgtaatgctaggccggccggccttgtatgcttaaaaggctgtcacatcaatatttcac

SEQ ID NO: 265632 - DNA, 1370 bp, Cannabis indica
ctcagaaacagaaatttccgtctaacttgcttgaaaggcacaattgaacttcggtcttcatcgctattcacgtatgtaaatgctaaagtgaaactctccttttcctagagtacatttttcttttgttacagcattgattggatagagcagaaggaagtaagccatttaaagtctaggcaacagaaggaactagacgttgattaaatttgtaatttgattgcaatgctgtacagtgtactccctattcattttcaattgctctttcttttgatgcattacatcatgtactacaggctattttgctatgcaaacagtaaaccttgttggttctgatttctttgtaggaaaatcttgttggctgttttgttattttgaaagatcaggttcttttgtttaaaatggatggatttattgcaccggaccaaacctgacaacttgaaatcacatggtggaggggtccgtttctttttttaaaaaaatttaatagcagtatttgttatagttttaagaaatatttttataaattttttgtaattttttaaaatagtttacttgtattgaagttcttaatatttaaattattcacctatgttcataaagtttaaaacctaatgttcataaagttattcgaatgttttcaaaagtttacatagatacaaatgttgttgtaatttttttgaaaagaataatttgccatgctaacaattttatacgtttgaaatcacattttaaatattttttattaggtttgctttttaattggatgtattcaaatattcaattgaaggctttttaatctccaatttttataatattttctattaattattaataactacttttgttctttgtactgttttcttttttaagaataagaaaaattataataacaacaaaaatgatattttatttggttgttagaatggaaccatatttatggaagtctgaaatgttagcaacattgttatttgacattatatttgctccactataaattgtagtcatgtaaataattaataatattttataataattactattaaattaaaatatataaaatttaggaaaattgctttatgcgctattttttaatttttttgtttttaaatttacagtttgggttgctttggtagtctttttagtggtttctatgcgggttgctatatagattttagttgcgattgaagttgctccgttaattgctatagtgatttctgtgtgaaattatgtaaaaatgtaaaaagaaactattttaaaatataaaaagaaaaagattcctaaaatttaatatttaatattaattacattaatattaatataatacaactgtgaaaatttacattaatttaaggagaattacttcatatact

SEQ ID NO: 265633 - DNA, 890 bp, Cannabis indica
tggatttggaacattttttttttcctaaaatggatatttggaacatgtttttttttttttttgtctgaaatggatttagaacatgttatacttttggatttagcatgtccttactacttgtgtttgttttttgtgtttgtattgtgggttgatggattttgattttagaatatggagcttgtgttttttttttagatttggattatagaattatcaattatggacctggttgtgcagcctagtactacatactgttatgtgtttagggtttttttttttttttttttttgcatttaatttttttgatgaaatattaaataatttttaacataaaaaaagtaaccgatccaatctgcactattgcggattaaattggatttaaactgttatgcggattggattggatccaaaatttaggattcgcacttagtgcggattggatgttgtttgaccaaaaaagtgcggattggatcggatgaagagtcctatcttcaagaggtgaatctcatttctagtaaattagtatgaccatcatcttttccttccacaagctgaagtgtctagtcctatcaaatctctcaagatcgaatctggttaatgatgaagccatcactgtctgtttcttgatgtcttgatcctttgatgttcttcaatatcgaattcctatccttataaaaccaaagctctgataccattgttgtaatactacaacagtgaattcaactaacatcaaacataataatcataagaaattatagagaaaatgattcaaagaattttatccaggatcgaccaaaagcaatgcctacttcttattacccccttaagttgatattcctcttattcagttgatgtatctatcattataaccagttaagaacacttgaaag

SEQ ID NO: 265634 - DNA, 638 bp, Cannabis indica
tttattcatatttgtgcttatttcatgtgttttattggccaccttatgcatgatatatgatctcaatacaaaatctaaaaagtgaatattaagaatgctctaaataaatagatatatgttttaatgtgaaacgagagtattcacatagcttatgtgacttttagattattacttaaatcgaattgtatgttgttctatctcagagatgtagtggttgacatgcaatttaggacctttatgatctaaaaagagtttaggttaatttatactctgtcatcacataagaggaagaagaatattaattagtgttaacaaataggtaatcaaattaattgaaattatatccctaatttcacatccattattaaatcttttatttgtttgttttatttaatttttcttagttgtttagtttcaaaatttatttattcaattgccaagtaaaaataagaattcaattgattggtacttagctacagttctcgtgggaacgatactctactttcattattattacttgtaaacgatacgtatacttgtgtgttagatttatcacaagaataagctatagtttgaccacaatgcttgaagagtaagcattggctcccttgttttcctttttatttatttaattaatt

SEQ ID NO: 265635 - DNA, 563 bp, Cannabis indica
aaacaacataaaaaaatataaaataatgaagcagatataaccatttagaaaaatataaaagaacaacacacctcaaaactattttgacaatgagctcatcaaatgtatttataggagaaaaagaataaaaaaaaaccacgaaaatagctgtagaaaaagaagaaaaaatgtatgtatagcctctatctttcacacctacggacagaaccactactacaacacgagaacacctgaaaacaactattgattctgagaaaatggagcaagaacggtgtaatcgacatcaaataaataaatcatgacaaaacaattgtaaaataacactaaaataaattttaaaaaatgattagaaaaaaactatctcctacacagcctcaacaccagatgcaatggaagttatttgtaaacccaattctcgaaaatcagaataaaaaagaatcacactcttatcttccccaaaaatgtgattgaaaatttaaaaacccaaaaaaaaaatgaaaagaagaactggacaaaaaataaaaatatatgctaatggagagagagagagacaaagagagaga

SEQ ID NO: 265636 - DNA, 797 bp, Cannabis indica
aaaaaatcgtatagaaacctttattgtaattagcgctgcaaccactttagaaacacaaacggtaaatttaaaaaaaaaaattaaataataatatatagactaattcccttatttaatatatattaataattatatttttttattttataacaaaataataaaagaaaatataaaaatatcattgtaagatattctttaatatatataaaataattaaattttttttactttataataatataataattaaaaaaaaaaaaaaaagaataataaaaaatgtcattcattaaagcattcccattggagatgcttgtcaaaataataatattgaaaaggattgattattggttataactagcatcatttaaaatattatattattattgataaaattaattatcaagtctacatgatttaatttaataattattatagaatattgttagcttgtcactttatgataatgctagacaccattaatacttgcaaataagtaatacaaaactaaagagtattggtgttggatactagtagtgtccaacactttttataagtagtattttacgattggttagcgatattctataaaaactattttcttaaacttgatacctaattacaccaataatagtataacacagaaaaatatactaggcaccaatagtacattttagtaattctctagcaaatattaccacaacatttactatgatcactataaatgcactatttttttatctacttttatattatttttattagtttattagtgtaattatttataacattaaataatg

SEQ ID NO: 265637 - DNA, 612 bp, Cannabis indica
atagacgtgtgagcgtaacaagtgagtctatactatatagacattaatagacgtgtgtgaacgtaacacgtgaatttatgctatatagacattcattataatggcatcattatatatagaataatgtgatacaaagtgcagtggcaaagtatatacacagtggcctagtgtataaagtgtaattattattattattattttattgttatttatactgttttgttgggcttggctcacagatgctctattatgcagggaaaggataaatcagtttgtaatcagccatgagctcaaggacttggcggtggattgtacatgttcgggctatactagaccacgcaggttgagtctaccaattgatgtatgttgtatattctcgaattttgccgtttaggtcggcatatcaaaataacttataatgttttgagaaaatttttacgggaatcccaaaacgtgcataatatttttggaatggtttagtaaaatataaatagtttacaagttatattttcattccgtaaataatttaagtttaaattcaattatttccagtaatcccgatttagcgggattaaattatgtttatcggaaaatcgtaacgtgcttaattgt

SEQ ID NO: 265638 - DNA, 1248 bp, Cannabis indica
ggattaaatagatttattatccccacttgaggcttatgaagatacctgtattttgttctttttgtttgcatctgctggtttgtaatcacttgtgattctcgagttcatttgagctgatttagtaaatcttatttataacatttgcaggacctaaaatggttgagatccatcacaaacctgcccattctgatcaagggggtgcttactcatgaagatggtaactgaagggtcttcttttctttttgtgctatctgtagattttcgtagtgttattctatagaatgacaagaaaccaggcaattgaaatccaaagcctcttcttttcattttcttcgtctcacctttcttagacatcattctaaaataattgaaaatcaaatataccataacggatgacactgtattcttcttcataaattcaaaagtctccattctttgttaaccaaccatttaaatagccccttcagattcagtaaattcatcaaatgcttctttttgctagcttgtgatttattcttaaaagttgtactacttttatacacgtatattgaattgataagatcttaatatttgagatgttatgcccccaatttcagcaagaaaagcagttgaagcaggagttcatggcattgtcgtctctaatcatggagcccgccagcttgatcatactcctgccactatctctgtcttagaagaggtgactatgcttatcatcatgtatctaacttcttgtttagcttttaggattgctgtctttctgttaaaatacaaatgattctcctgatgatcaatgaatttttgaaatccttacattaggttgttcaagctgttggagggaaagttcctgttattgttgacggaggaattcggcgaggaacagatgtctttaaggcattagcccttggtgcacaagctgtacttgtaagttcttttcttcaaattaatccagctttttatgtatcatttcagcactaaagataatgagcataataaatactaaaaattaacgtgttaaattcataggttgataagtgcagggaaaaatgataaacttcacctgcagtgaaataataaagaaagcttaaaaaaaattcggtttgataaaactactaaattcacaaaaagagatatatttcacttataactcaaaattatacactcactatctcaatttctccacccaaatcttaatacacaatttgcttctttttcactctcaccacactacaaactcacacattttttttt

SEQ ID NO: 265639 - DNA, 1067 bp, Cannabis indica
atcattaattttgtcaaaaaaattaaagattattaattaatataaaaataaattatataatcgtatatgataactaatgattcacttaattaatttatagtaaaatatagttcacttacgtataaaagtaaatatttatcgattattgtttgatttattttatgtacaaaactacaagtaagatatggtaatcaactttaaatataatactagtagtgacggcaagagatactgtgataataattgtttagaagatatttttgtgtgtgtgtttttttaatgtaagaaattgtatgatgtttattttttaaaaaaattcagtagaattttttatatagatttactgtttttcaaaaaaaaattatacataaaaatatgttttactttctttgatatgattctattgttaattaatattcaaatatataatagacaaaaaattttaaatttaacaatgttaataatttgagagtatttttcacgacctcaaaattcattaaagagaaaaaattctaattagctaattttaaatcttgaggagaataaaaaggttaataattaagggaagtctgagtgcagtcgtaccctagtccacttgtcagcactagattagagatacacaagctttgtgttacatgcgcgaaacagggtatcactacatataagattaataatatagtagagagtagataccctcccaatggtaatataaatttcgaaacgacttttatttaatatattcctttttatagaaagacaatcgtattttccatcatccttacaataatatataaatataaatatggagcttcatgatcatcatcacaataataaatatatataaaaaaaaactaataataaaattaattacttgggtcttgggtaagagtttaattaatgtgggtctgaaaccatacaaagaaaactttattataaattcattaacaaatcctttactttgttttcattttcacaacccatctctctctctctagtctttatacgtaccttacatctctctcctcccgtcggtccaaggatatatatatatatactatatatacaac

SEQ ID NO: 265640 - DNA, 539 bp, Cannabis indica
aagatatcctttcacaaatatataatattgtatatttacataaattattattccaagagaacatgaaaagtgagcgctgatatgtacataaatatatttatatataagtcttttcatctttccttcgaagtttagtttattgtttctttacaactaaattaatccctaaccacatatatgaatgtggtcatgcacagaacacaagtgattagagttcaaaaaagtaataatgtttattttattccttaaataaatatatgaaaaattctaagaaaaattatatttataaatgccataaagacaataatttgagttcaactgaattcaattaaagttatataacagcttaaaaggctcttaagaaaatatatatatatatatatatagggacacaacaattttattccgtgatgtactttcacaaaatgtattccgtgatgtacgacaaccgttagatgggagagttatttgatttggaggttggggttgatttaggagtaattaaggttaaaaatcgtaacgtactctgagacccatta

SEQ ID NO: 265641 - DNA, 607 bp, Cannabis indica
ttaatattatgtgtatgttatgttttgttgaaaatatatattaataagagattaatatatattatgtgttggaggttatattatatcatatataatataataatacacacaaaattgtaacatatgatgagttacaaatctgaaaatagattgtaacttaaggatcacaattgataaatatgtaattatgtgagttgttacatatgggagttatgggattaatgggatttgttttctagctgttagaaactgttacaatactcaattatatcatttaaatgggtattgggatgttgggaaaagaattaactcagagatgagttacattttgagttctctggaaacagttgtttaatagttgtttttatgttgttttatggttgttttcgaacatctggaagagcaattcaaaattaatttctagataaactatttgtatttttcttgtatttaattaaataaagaattttaaccaactagattctttctgaaacttactttaattatttcattaaatattcctaaaaaaactgaacccatatagaggataattgatcacattaggattataacaatggataactaatcatgtgtctatatggtggaa

SEQ ID NO: 265642 - DNA, 332 bp, Cannabis indica
gagcaatttgcctaaaaaaaggactctgaaccactaacatatttcttttaagagtaccaaatcatatattcatttttaattcttattacatgttacacaatcaagtactttaaaatgatgagaaactcatttacttttgaaataattccaatatataaaaataaaacagaacaaaaaccactcctacaattccaatgctcttcgccaattcacttaatttaattttgtattcagaaagatagatttggtgaatttatttattcaaaaagtaaatgaaagtacaattaggccaatcaagaataaaaacttactaatgttggaaattattttac

SEQ ID NO: 265643 - DNA, 509 bp, Cannabis indica
aaattattccaccatcccacccaaagaaacaccagacgcctccatatctgccactgtgcccccaacatctgccactgtgcccccaagctctgctccagccaatgactccgactacctcttcttggcaaagacactggagaaggtagaagcacaacaactagcgattcttactgcccagactgagatgaaggctgactacaagagaagtcagaaagagatgaagaatcttatcatggatcaaattgcgaccgtgataagtttgttacagaagcaacctttggagccgacacaaccatcaaggtcggcacctcaatcatcgccaacacatccatcagactcggcagagccattacagacgatacatccatcaccgccgagagacgatgatgatgatgatgtctatctagaagattggaaacctaactgttgggttttatgccctaaataaaactcatttcaatataatcagatttgcttattaatatagatcagaaataacatttaatgtt

SEQ ID NO: 265644 - DNA, 698 bp, Cannabis indica
tatcttcaaatagaagaagaccccgttttgatccccatccttttggtggtcctggccggagaaatattagtacttttagagagaggaaaagccaggaaagaggagtggtagtggttatttttatttacctaatggtgacattattaagaagaaaaagggcaaaaaacagaaggtgactcagaaaaagctgaagaagacaatgatgtcctatgtaccaaacatgtcacataataaaatgtgcttattatttacatggttttaattgattgagccacatatctcattttaaaaagttgaaaaagaaggccacatattgatcaacctattggttttggttaccatttttctttcttcatgattgacaagtgttacgttataacaggtgttagaaaccaaagaatccaacctaaatttactttttcattctttttcttaagagtagtgattattacaatcttctattataattttttagttaaattttacgtttaaaataacatactgaaatatatattttttttgaattgttacggggtattcatgattagtttaggtcatcatttaattttattttttttaaaagacaattagttcaattaatatactaataaaaaaaaaataacaactaaataataacttgtcatttaacgactaggtatatacggagttctaaaaaatataacttatgtattactgct

SEQ ID NO: 265645 - DNA, 646 bp, Cannabis indica
cttattacacccttcctcgtctccgggtgcttaggtatccaccgtaagcctttcctcgtttgaatctcgcctttaactctaaggctatgtaattttttcaaaaagtaataatattaagaatcgaaaatggaaaatggcctaggacccgattctgatccatccaagccgaacaagtttaccaagcaggtcgagtttttgggcccaatatgcaaaaatggtaccctagtgtagaatatttctaacaaaactgcctaatttgtagaatcaaaactgctgcctaatttgtagaatcaaaacacactctaactttaactaacaatatttctaacaaaacagcctaatttgtagaatcaaaacacactctttaactttctagacttatgtataacatttaataccaatctaataaagccattgttacaaaaaggaagttcctcccctgattgattccataggttaaacacttgctctgattctgaagtctgaacctgagtgagtactggtaatttgcatatcccgccactactaagagctgataataaaagaaaattgataagttgttttgacttgtatgaaaaatgccggcatcacttgtcaagttacatatccatagtttcaggtccagttgaagactttgatttcttat

SEQ ID NO: 265646 - DNA, 865 bp, Cannabis indica
tggaggacaagtttagaagatatcaagtgggagaattagagaaacaatctggatatgactcagacgaggagcttgagccatatcatccagatataatgaatacccattttcctttgggattcaaaaccccgtatgtcatgtcatatgacgaaatcactgatcgagtctcgcatttgaataacgttaacacaataatgcgagcgagtaatgtgacgaacaattacgctgtattttgttccccacctcgtttgttggagcagcgagtagctggtttaacaagtttacacatcattcaataacctcctgggaacaactgtctagggatttcaagaaacagttccaggctgctagggatagacgacccaaagcggcctcgctaaccaatataagcagcagctcagtgagacacttaaggcgtacttaagttgttttagcacgggttgtgactagggttagcaatttggatgacaacacacaacttacccccttcaggtggggatctctactgatccattgaccgcagggggcgcgttgtgggatgacttacaaggttgttcagtaagaagcatcactgagctcaatgaaagggttcaggtattcgttcggaaggaagaagcccgaaaaaaaatgaatttgttgaaaacaagctcgggaagcaaaaccagcaatgtttcaacaagtaatgttttccacgagaattgataacttaggggcttctggttcgaagagaaaagacggtaccaaggaaccgtcgaaggataaaaagaaacagaagaagcatagataagtacatgctagtgtatactatttatatcaagcttaatgaaacttgggagaatatttacctcgcacatgagcagaaggt

SEQ ID NO: 265647 - DNA, 602 bp, Cannabis indica
aaaataagtggttgaaataaagtggcaaaaatctaactagaaattggtccactttaagtggtttaaataaagtggcaaagatctaactagaaagtatatacatatgcaagctaaaatgcgattaacacaaaattattccgaacctacaatataaaaaaatacgacaaaattacaaaattaattatttcattacttactagttataaaaaatagtaacaagttacttagttactaaatcatacatatattatatataatcaattatatcccacactaattcatttttaaaaaatttatttctaaattaattaaatccgtccaatgttattctcattcacaataaatatatattacttagaatatatacaatacaattacaaattgtatttacataaaaaatttacacacaatatatgcatacatattcaataaaatacaaaaatacatatacagtagaacctctatccaagaatacacttgggaccaagtaaattatattctaattgggaggttataactaaatagagttacactaaaaaaaaattaaaaccaaaaaaaaatcaatgtaacaataataacaataaataatcattaataatata

SEQ ID NO: 265648 - DNA, 900 bp, Cannabis indica
agaaaataacagagtttgtattgatgaaattagagaaaaattacggtttcacaaatattgggtacttatgccgctaaaaataaacattgggattataccacttataaacttaaaacgttagatacttataccgccatttaccctaagtaataattggagagaggaacggacccacatcaataattaagctagattgcacaatcccactcagatcacgttgtgttttttttgtactgtaaatcctggtcttctacttattggagtgagtcttggaaacagagcgccatttctaatccaatcttatcagagaagagatggtagatggtcacacacacaatattgtgtcccttgattcttcattccctttcctcgatggcttctttgaagctcatcacgctcattctttcactcatgttgttcaatctctctgcctcaaggtaccactaactaactctttactcttttattttttatctcatttatatattatgtatgtatctatatatttatatacgatatcacctagcataatttgtaatgcattatcttcatcagtcttagtaactgtgatacagattgtccacaactccaaatattctgtcccatttattatctttctctgtccctaaccaataaaaacattacaaatcaactaaaatgccacattctcttcaataatttagggtgactattcaatggttacattaaaaatgtaactatgatagttatattttttttatgacctactataacaaattactaacaataaaaattctatttttagactcaaattaattatatacttaaaataaattaattttttaatttaaatatttaatatgacattattcatagctaatttttataaatattttttatttataaagaaataaataaaat

SEQ ID NO: 265649 - DNA, 739 bp, Cannabis indica
gagtcaaaacagtgttcggagaaaccccgagaaatttttcccctgctgtaaccggtcgaccggttctggtacaccagaaccaaccggtcgaccggttgctgtcacaccagaaaaattctgggttttcttccccaactcgaaccaaaaccattacagacctaaattgcatttccagaacagttcaatataccaagtacaacatatccaacacatcatttaatcacaattcaccatttagctcaaaatcaccatctcacatgaaaattaagctcaaattgcttaatcaaatacattcaatctaacacagccattaaaattacatgattcaaacttcaatacaccccaaaacagacctaaaaacaccatcacaacccaaactaaacctacagccacgaaatcccaaaaccctcatccaaaaccaacctaaattagtgaagttttcaatccccaaggaaaagaacttacctccaaagcttctaggatgatcttgggtatccaatctgctcaaaaactgagagaaatcaaaatgaatcccctggttttggctagctctaggtcacgaaaaagagagaaggagaagagatgaggcttccttgccttggaagttttctttctaaaatgaggtttttccatcccttttcttttcatttctttccttttataaataataggcaacagtaaaaaaaaaataaaagaagaaaagtcaaaaataccattgaatttactaatctaccccttt

SEQ ID NO: 265650 - DNA, 938 bp, Cannabis indica
ccagcaaagttttccaactgataacaatcaggtaagtgaacataaccaatctgttgctgattttgaacttactaatattgatgaaagtattgatgaagatcaggaaccaaatcaacccttacccgaatcacaaatgcagcaaaacaatgagcctgaagttcctacccgtgtggtttcaacacatccaatgatgactagagctaaagcaggaatatttaaacccaaagtctacattggagagtcaaaatgggaagaaaagttgcaggagccgattaatattcaagaagctttagctcataaaggttggaacaatgctatgaatgaagaaattgttgccttaaagagaaataagacatggcacttggttcggaggacagctgatatgaacattgttggaaataaatgggtctacaaaatcaaattgaacgcggatgggtcagtccaaagattaaaagctcgccttgtagctaagggcttcaatcaaaggccaggaattgattttggagagacatttagtccatgttaaggcctctacagtcagaattattcttactattgcagtggctaagtcttgggatgttaggcagatggatatcaataatgccttcctaaatgggcagctagaggaggatgtttatatgacacaacctttgggttttgaggacaaagaaaggccagattatgtgtgtaaactcaccaaatcgttgtacgggctgagacaagctccaagagcttggtttgacaggttgagaagcacactacagagttggaaatttgaaagttcaaaggctgattcgtctcttttctactacataacagccactgacataatgtttgttctcatttacgtggacgacataatcgttacaggcaacaactcagagaaactgagaaactttactgcaagattaaatcaggtgtttgcccttaaggatctt

SEQ ID NO: 265651 - DNA, 597 bp, Cannabis indica
tatactcggtacactggtcatactccagctgctagtcatactctagcctgtaccgatgtgacacagtcggatggttcgaagccaacatacatatctaatgtaatctaacaggcttcctacatgcacgctaaacatgtaatatatatatgcatactgttatactaatcttacctcgattccgaattcaggtgtgccggtcaacctgactggaacgaactgcgcggcggtttacaggctcctaaaccataacaatcacaacactataagtgatacgctaaatcacttcccggggacttaaactagaaactaaaagtttccctatcgataaaaagcatggcaataccccaaataacataaaaacgagaaaatctagggttcctgaaaatcacccaaccggcagaccggttgcccaaccggaattccggttctgggaatttcagaaccccatccggaattccggatgcacaaccggaattccggttcctcgcagaaaaaaatcaaaaattcataactccatcaattcgaacccaaagcaaaccaaaccttccagacctgttctagatacccctaggaacaaatccaaagcataaaaaccaa

SEQ ID NO: 265652 - DNA, 1244 bp, Cannabis indica
ataatagacttgtcaaatgtgacatcttagcttaaaactatcttcttcgattcactattccaaagtcaaaaacctttgactccttcattaaagcctaagaaaataactttctttgatttaggatccaaattggattcatttacaaggaaatatgtaggacatcccacttttctcgcttagtttaatgaattgacgtcctttcaaaaaaaaaaaaatcataatcacaaacaagtttccagaccatacctttttaggtatcttcccatatagtgcagtcataaatagtctgttgatgatgtgggttgcatatgacaaagcctcgacccaaaatgctttgctcaatttagattgatataacatatatcaaacttctcaaccaatctacggttcatttgttctgccatgctattttattgtggcgtatagggtactaaaaaatgtcttattatcccttcttcttgacacacttctaagaaaggatctgatttgtattcaccaccactatcagatctgagcctcttgatctttttgcctgtttgagtctcgatcgttttcttccatttaaggaagacatttagaacttcatctttgtgtcacatggtgtatacccaaacatatctagaggaattattaataaaagtcacaaactatctttttacctctatgtgaagcattcttgaaaggtccccaaatgtctgtgtggatataatctagagttcccttagtaagatgaacaacaatgccgaacttgacccttgtttgcttcccaacacacaatgcttgcagaagtcaaactttctggtcttggcacctttcagtagacattgcttcactaagccttgcaaagcattctctctgtcatgcccctaagcacacgtgccaaatgcgagaagaattagatgtcttttcttcataactgctagagacaactgctcttcttgtaagagtactcccatctagaaagtttaaattttcttttcgagtacctttcatcgctgcaaatacacctcatacaactttcaagtttttatcttttaatgttatcttgtaaccattagaatcaagaatacctaaagaaataagatttttctttagtgtagtctcttgaaactctaattatggattaatgtaatttttttttggttttattcttcattatgatgatctatgtaatttatgtttaatggttgatcaccatttatatgatttaaatttttgattcaaaataagtgggaattaaatat

SEQ ID NO: 265653 - DNA, 779 bp, Cannabis indica
tattattttgcttatcatacattcaatctacacttagtgcaaattttatatttttaattcaattcaatccacatagtacttaaatctaatccaattcaatctaatccgcaaaagtatagattgaatcgattattttagaatgattactttttcatatttaataatttattatttattaaaaaatatttgtgttcacataactaacaacaaataaacacttttgaaaaataacaacaacaaaagaaaataaattattgtttgtggtgtttagttcagccattttatgttttatcttttgctgatgtgttaccaactgttttgacagttggtgcccaaattcgttatctcaacaaacaaccaactttaaatactataaataaaccttgtaacacacattttagttaagttgtaaattcagattttaggaataaagagagtgaaaaggaaggatgtataagggaatcaagtgtagctgatcttggttcccatttgtgaggttcattgtaattttttctcatcctgtcttcattgtattcaacacactcttgtactggtttcaacatcaataaaggtctatgtttttcaactattggtgttaatttttctctttgatatgttctttaggttgttgggttggttatttttgtttcattttgattgttgcattgtgttcttgattgggttgttgagagtgattaattcactaccagtggtatcagagccgagagagatcaaagacatcaagaacctagttttgaagattaagaattgcaaccatg

SEQ ID NO: 265654 - DNA, 907 bp, Cannabis indica
acttttggaaaaaacctggggtcataccatcaagactaggagatttatcaagatacatattaaacagagcacttctaacttcttcttccaaaaccggcctaagtaaagacaaattctgatccacggtgatcgaaggagtaatctcctcaaccacagttgagtaatcggtgacatttgaagtaaataacttagtgaaataattaaccataacattgggcaactcatcctcccaagtaacccaattacccacatcattcataagtcgagttattgtattgtgtttctttctagaagtagctttagcatgaaaatacttactgttactatcaccttcttgaagccacagctgtttagaacgttggcgccagaacacttctcgttgattcatagcttcactaagattcagttcagcctcccgaaacttctgaacggatataacatcccgccccttcttccaatactggatctcccgcttacaatggctaatttgttttttgaaattgcctgtatactcacgcccccacgcttgaagagattccccacaatacgagattttcttcataacatgctgacttgcacacaactcccaactatccttaacaacctggcgacacagcggttcacgcaaccaggcattttcaaatcgaaactgacgaaatggcaccgtaacagaacgcactgtcggttcaagaagcagctggcaatgatcagagacagaaacttctaaattatgaagctgagccatacgaaacctttggaaccagttggaacaaacaagggctcgatcaagacgaacttcaacccatgaatcagtgcctctcccacgctcccaagtataaggatacccgattaactccatatcaacaagatcacagtcagacaaagcttggttgaaaccatccaccag

SEQ ID NO: 265655 - DNA, 2235 bp, Cannabis indica
agtaccaatcaatccatttaagctctcttcaattgtgtaatcccatacccacacagcctcagaatcatcccacttgaccttccccaggcgatgtgggattatacagcttacctggtatttctccttacggatcacgggactactgactgtcacagtaagtggtcagggtctacgttttggtttgggtccgggttcgacgttagggtcgtgggtcgtgggcatgggtcggggttcgggtctggggtcaaggtttgggtctgggttcgggttcaggttcaggctggggtcagggtttgggcccggtgtttggatctggggttgtgtctgcggtttggattcgagactgggtctggggccgaggttcagggttggttccgtggctagggtccaaagtctagggttgggtctgaggtcgggagtttgtggcctgggtctgggtctcaggtccgggtcaggtatcagtgccaattcttagttccatgtttgggtccaagttcgattttggtcccgagtccagatcccaggtcggagtcggtggtccaaatctggcacctgaggcaaagccccgagttcaggtctagattttggtgttaagtttgaatttggttttgagtcccgagttcgggtttggtttcaagtccatgtccaaatttagagtggattcatgtcgtcatatggtatagaatattgaaattaatgtttttagtaagaaaaaatttaaaaatagtttttgaaaaatattagtcaaacactattaaatttttatgacaaaaaaatgatatattcttatttttggaaatacagttttaagaaataaaacagacccaaaccttccatctttttgccatctttggagtaagaatccatctgttttgttaagtttttataaatatagcaaacatgttaaagactatattttatttgaaaattagctataaattattatattatgaaatgtactagattttgtttttctaattataaataaaatagaaattttacatgaaaattcatcactatattattatttttttaaaaaataaatacttcggttaaaaattatttatcaaaattaaaggattgccacaaacattatggtgacaaaaagtaacaaactacaaggttaacacttgctggtagtatagtcactagtatattattcttaagtaaaaaaataattttttttttagcttgcattaagtaaaaatataattatgtaaagctaagtaataaatataatgaattagatagtggttcaattttttcttaataagttacagataacttgttcatataacatgcaataaaaaaaaaaaaaaaaaacattagataacttgtaatccattcatttttacagataaatgtaattcattcatttttacagataacttgttcatatagcataatacaactattccaattagatggggaaaaaacattagatataaaaagaaatatatattttttttgattaaattgctgaattaacctcaaaggactgcctggtaactaacagataataactggtaagcttagtgtggtttatatcaaaagagaaaaatgcatataaaaatgtaggttttataaaaatattaaattttaagcgaaagtttataattttattttattgtcatgtagaatttttataaaagtaccgtctttttataaaacaattgtaaaacaattgtaaaacaattaaaacaatagtaaaacaattaaaaaacaactgtagaacaactgtgaaaatttaacacaatactcagtataaatttacacagtattgttaaaaaaaaatacagtactttttaaaaaaattacacctcacagtaaaaaagttaaaattttggccgtaaaaatcctataaaaatcattaaatatggaaattattaataagaaaaaacaggttttttaatccttaaaaagtaatgtaagaaagaaaaatgtacactctaatacatgtttttttttaaaataattacagtagtcctatatttttcattatttgacataaaagtgatatagctaatgtatttttgcaattattttttactctttaatattcaattctatttatttggaccttgctagaagcataagaagtccatatgtccaattttttatggcccatactcaggtccataaatttagaaattcacaaattggaattatgaatgaattcatagcagcatactcagcagaattgagaactagctagtagtagcaaataatccaaac

SEQ ID NO: 265656 - DNA, 811 bp, Cannabis indica
aaaaaaaaaaaaacagtattcttcaaattataaatttcaacttcaatattcaaatacaattaaaattatcaactataaagaattaaatactataaaatacaatttttaaatgtaaaatagttttaacattaaacgtaatttatagattatattatagataattttagtaaaaatgtataaatcagtttattcgagttatttaagcatgttagaataatattcaacttgcataatatatttattaaatggattttttgctaagttatttatgttatatttttttgtcgatttattcagtttaatttgagcgttatagtcggattagacgatttgtaaagtaactatagagagtattaaaaatgtgtagaatgatattcggatctaatcctaactgtgtaactgaagaaatgttatataaataatatttggttaaccttaaccacagctaagtatgatttataatttaaataatatttggttaaccttaaccacaccataataaagagtttatcaattaattaaaattaaaagtgggccggcaaaaagcacaagtcttccagcattgggtcctcgttgtcgggccacaaccccgcaaaatctgtggatcttaataaagttaggttgccttacccacattctaattctattatcattattattattattattattattatttaattttaattttcttatttgattttggtcatcttgcctattgatcactatccatacattatgcatataatacgtactatcataaatataagatgaaataactcttttttttttaatcattttatttgggaaa

SEQ ID NO: 265657 - DNA, 710 bp, Cannabis indica
tctcaggggtaggagtaggtctcatcgaaatgcctgattacttcgtttgcaaatctttgaacaaagcaaggacaggatgaagtcggaggaaactcgcaggaaaaaggtcaaggacagggatggcatgcaagtctttggacgaatttaatggtgatctttgacgaagaagtttaagggttttttcagactttctaaaatggagaaaataatgcaaaggtggttgcttttctcttacccatgatagtggctttgttagattagataaagatttgatcctatgggcatgattcaaaacggaagtggaaaagatggtcatttaattttgatgtaccttaaaaccgcacaacagccaaaatgagaggacatgcgtcttttcaaaaaagaggagcatggcggaaatagcctttgtaatcattaaacactactacaagaaaaggccttttatcccgagtttttaaggctttttatccccgttttcgctaaataaaaatcgggatgtatgctagtgagataaaggtatttaaaaaacggggataaaagggatactttttatcccgcttttttcatgaaaaccgggataaaatgtacccgttttattccacttttaatgacaaaactgggataaaagggtaccttttatcccactttttatgaaaaaaactgggataaaatgtactcttttatcccactttttctataaaaactggcat

SEQ ID NO: 265658 - DNA, 1254 bp, Cannabis indica
tgaaaacatagaaaacaagcgtaattatgtcctaaaacgttgaaaagcaaacattattgcagtccaaaacataggctaaaaatagcctaacagaaggcctcacggatcatgaaccagaagggcacaagatcccaatgtcataataccccactcgtccccatgaacaacaactaagatagacaagggaagtttcatgttgacaaggaagacccacaaaaccaaggtgccgcaacttctagataggtgcaaccgaatgttcaaggatcaactcataggaataatgagaatccaagtgaacaacccgctaatcgatcgactcatcctcctcagcaatagcgaggtccccagaggaatgaaattgacaacatgtatacttatttgagcagagaccgtgtagacaacatttttgagatgcagaggtcaactcaaaatgatcctcgaggaacacgacgatgggtgggtcaaggaggaatcaagggaaaagttggtcatccaggtcacgtacatgggaaaaccctccacgaagggaagaaactcctcaatgtgagtatcacaatgagcaggaaagtgtcagtgatttgagaagttaccaatctaaaagtgtctcaccaacaagatcggtgagttattataacttgagacaagagtggtgtcatgatacacgagatgaaccagaccttcgagaaaaactaaatcaaaggcattggatttgcatgaacaattaaacagaaatgctctagatctccgagaaaggctaaaccgaaacacacctaatttttagagcaaattaatcaaccggttgatgattcaattcatctaaggttcattcaattggaggataagttttgaaggttccaagacgaagagtacagaaagtaacatggatatgactctgatgaggagcctaaaccttttcatccatacatacttaactcttacttcccaaagggattcaaaaatccccatgtggctccttatgatggaacaactgacccagtagcatatttgaatagttataacactataatgcaaacaagaaatataggaaataacttgcggtgtatcttgttcccaacctacttaactagagcagcggacattttgataaatttactaaacattcaataacctcatgggaacaactatcacgagatttcaaaaaaaaaaaattctcagtagcgagaagtaggaggcatgaagcttcatcattgactaacataaagtagcaacccggtgagtcactgaaggtgtttt

SEQ ID NO: 265659 - DNA, 1042 bp, Cannabis indica
ttcattacttgtttaatgtgttatttagttcacatatttatttgatgatcatttgtttgatttataatatcttccaaatccttatcacattgatattcttgtttattatgatgttaacacagtgaaaagtaatcaagattatgtgattaaatgaattcttatgatttatcagtacacaaaatttaaatgatatgacaatctacaatatagtttacttgcaccttggataagtgctatgtcctttccagggcactggaaaagtaaatttggattggatgtatggagtatgcattagaatggaccgatattgaacttggataagatacaataaacttaccgtaatatctatataattcaatatcacctagttgatcttagatcaaatgatctcaatcctgagatggttagattctagttcaattgcattatttatgctcttcaatttgttcgttaaagtcgaccaatggatcttctcgtgacatatagattaaggacatggtagttcaattgagtgggagcgctaatcatagatacaaaatctatagcttctatctggacatagaagtaaaatgttgatttcgttcaagcttggcttaatatagataaatgatggagtgcacattttaataattatattagttactgaaacattatttataggtaactaagagttttaaggataaaatacattgaaaggtagaatggtaaaattgtccctactcgatgtagatcatgtataaaggatcattgattattaggattataacaatagataattcatagcgtatctatatcgtggaacatatagagcgttttatacaattaagagtgcaattttgaatctatagtggcgcaaggaggaattaataagttatagaatttacttggtaaattctagatctacttattagaagtttgattatataggtccatggtccccacactagttgagacaatagtggttgtaggactaagttatttggttttaattaatcaattataattttaaaattagactatgtcttatttatgaattttcact

SEQ ID NO: 265660 - DNA, 2770 bp, Cannabis indica
gtgtactagggaattgtggacgagtttcgcataccaaagagagaaaatcctaactcaccacagtttataccttcatggagattttcaaatggaatgtttgctttagttctctcctttggccttttgatcactgcattaagaagtcgaaaagcaaggtcatggagatacggctctggtatgatgaactccaaaatgaagtgcttatgaaacattttctcatattttttgtttctaagctaagctggttgagtttttgaacaggttggcttagaagcctagtggcagactatggtgtgccactaatggttctagtgtggacagcagtgtcatacataccatctagcaatgtcccaaaagggatccccaggcgactctttagtcctaatccatggtctcccggtgcatatgataattggactgtggttaaggcatgttgacatttatccaccttttgtgtttgttttaagccattttcctctgttttttttttgtgtatttattctcaacgtttgattgcactaatgatgagtttcatttcaaaatgacaggacatgctcaatgtcccagttatctatatcataggagcattcgttccagcaacaatgattgcggtgctttactactttgaccatagcgtagcatcacagcttgctcagcaaaatgagttcaacttgagaaagccttcttcttaccattatgacctacttctcctaggatttctggtacaaacacattaaaaattaaagaccaaccctttaatatatatgttgtttgttacattttcaagtgctgaattctacttcgtttggatgatgacagactttactgtgtggtctgattggagtgccaccatcaaatggagtcatcccacagtccccaatgcatacaaagagtttagctactctcaaacaccaggtactacttctctgctatttaacatcagaacaactacatctcttttattttgagttgatcattaattatttctcttttgcagttgcttcgtaacagacttgttgactcagcacgtagaagtattaggaaaaatgctagtttaggacaactttacggtaatatgcaagaagtttatcaacaaatgcagacccctctgatttatcagcaatcctcagttcgggtaattaagctttctgtttgacatttatggtctagtacttcatttaacatctttataaagatcaacgttgagtgtagtgtttaacaaggtcattatgcagggattgaatgagttaaaagaaacgacaattagtgcagcttcaagcatgggaaacatcgatgcaccagtagacgagacaatttttgatgtggagaaagagatagatgatcttttgccagttgaagtgaaagaacagcgtgtgagtaacttgctccaggctacaatggtgggaggatgtgttgcagccatgcctgtcctcaaaatgattcccacctcagtcctctggggatactttgctttcatggccatcgaaagcttgcccggtaaccagttttgggaaaggatcttattactcttcaccgcacctagcagaagattcaagtaaaacacacatcataataattattttaattccaacttttattcattcgcttttgtctttaaatatttggtgtttggcaaacagggtgctcgaggactaccacgcaacattcgtggaaacggtgccgtttaagaccatagcaacattcacaattttccaaacagtgtatttgctcatatgtttcggcctcacatgggtcccaatagcgggtctcatgtttccactaatgattatgcttttggttccggtaagacaatactgcctccctaaatttttcaaagggattcatctccaagacctcgacgccgccgagtacgaagaggcaccagctctgccttataatctcgccacggtactcatttttcatttttttttctaaacatttgctattaggcaccagcatcatcacaattgacactttaggaatatttaaccattttccataattaaattaaaagaaatgaaatatatatatctacaaactaacataaacttatcatggcaacagggatcagagattggagcgggggcttcatatgcaggagatggtgaaattttagatgaagttatgacccgaagcagaggtgagttcaggcgcacgagcagttctaaactcacgagctctacgtcgacaccagcccacaatgccccgagagctttcgagagcccgagtcaggtggcgcatgggtacagtcctcgcgcagcaagggagataagaggagagccaagtccacgtgcaggcggacgagggggagggtcgacttcgagtccaaggccacctaacctgggaaagagccctctaagcagtaatactaccacgccacttaattaaaataaggataatcatattgcacacataaattatacacaaatttaatccacacttacgtaaagtaattttaaccaattatctatctttatttaaagatggatctatttgttaaaaataacttatcacatgagtatgtgttaaatttgtatataatttatgtgtgcactaataattactctttgaataattaataggttttacctatttttaagctctaagggctaagcaagcttggattatgttgtgagttgtcgtttttcttttatatgttttgtggtttattatatgatgatcacttcttcgttgtataaagtcctttggttgtaactaatagttattgatctttatattggtatttcttaaggagccaaatcttctgttc

SEQ ID NO: 265661 - DNA, 706 bp, Cannabis indica
tgtatttatgtatgtagaaaaactgtctgactgactttcaccgccgccaactgcacgtctaacccacatcctgttcacaggccaaagggcaagtcagtatatcttactcttcagtacatggtagcagcattagatatttaaggaaacttaaatggagcaggaagggtacctcttaaattaaatttccaaggagatgtgaagcagcttcatgaacacacctctaaagcgagtcactgttgtaaatatggtgataaagaacaaaagctcagtcagatacattgtataatacagtttttaagaggcccaccatcatgtcatagaaaacatatagaaacagaaaagcctaaacaaagttcaagagacccaccacttccaggggccttcgacatgttggtgatggaacaacaatggctggacttcgattcgttgaaacatgatactgacaggaatgtagatctgagaaatcatttcttaccgaacggtagacttctgatcctgtggtagcagatatctccaaagttcctttcccttttcttaatgcagatctaccattgaccccacttgatccatctgcagaaccagttgctgactaaagcaaacagaacaagaattagctattcaatccagcaaatggaaagagacagaataacaatgctctcacaactggttatttgtttttttaaaatataaatttgttaattcactc

SEQ ID NO: 265662 - DNA, 849 bp, Cannabis indica
aaaaaaagtcactcaataattttcataaaccaagaattctgttatatatatacattttttattcaatttttttttttcatataatataaaaaatattattaccaacaaatttaaaataattttacaatataaaaaataatatttaaataatatagtccacatgcgtataaaataaaataaatcacgcgtataatacatattttgaattctatttttggcgtattaaaattttttaaattttttaaaattttacaagatgtcttaaaaacttataacatacatgagcatgagaaaaaatttgactaaaaattattttagataccaaaatacttaaaggtacatcaatacatttttttaaggagagccttgtaaagttttccagttttatttacactcggtaaagttatacgtttcacaatgcgtctccttaaaagggatgtattgatacaccctctacctgtttcgacatctagaagaatattttagtcaatttttttcatattcgtataggttatagttatttaaaatatctgacaaaaatttaagaaatttagaataatttacaatatagaaagtaatgtttaaaccgtctatttcacacgcgtataaaataaaatagtcacgtgtgcaatacaatatttaaatcatatttttgacgtgttaaattttttaaaatttttaaaattttacaggatgtctttaataactataaagtatatgaccatgaaaaaaaattaagtaaaaaattatttcggataacaaaatagatagggatgcatcaatcaatcatttttaagaatgtgcatgtatacactccaatattaaaaaaattaaacttaaaataatttt

SEQ ID NO: 265663 - DNA, 569 bp, Cannabis indica
ttgggtcttagctcacgggtgctctaatgtgcaagaaaagataagatgattttcgatcggccataaatttaagggctttagcggtgcgttgtacatattctagccaagctagaccacgagggttgggtccaacagggaagtgtatagaaatcctattttaacgcttaggtcagcttgtacgtaataacttgtaattttttgataaaaataattttatatgggatcctagacatgtaattttaatattttattttaaagtaaagtatacttttattataagttatttattttttaagttaaatatattatcatcacttggcttatagacaccaattaatgggattaacatattgtaatcacgtcacatggtgatcctataagtaggacgttacatatatgactttactctagttctggaacaccaccaatcttttttattgattgaacaagaacatagtacaatacaatcgagattgattctctataggattctcacaaagtatttttctctcacactcttacccaataaacagattcttcatacaaaatccaagcctctctctctctct

SEQ ID NO: 265664 - DNA, 1352 bp, Cannabis indica
gatagtttaataagatgattaattgatcatgaagttgatcataaaaaactgttttcaaaatgttgaagtaataattaataatgtatggttgagcgagataccaaagtcaagacaccatccgccgttcttcttgtacccattcccaaactcggccaagttacggttagtattgatttgattatgggcccgtcaacaccatcattatacctttataccatacttttcgagctcaattaccaaaaactttgtatattcctgtatatttttctctctctctttccaacctaaaccaatataaaataacagctctttgatccatataatatgataccaaagttagctttggaagataaaagctatctacgactcctctttatgttttttccattgcctttttttttttaaatgcaaattaaagcgttcagcactaaacccaattgaaaaagaagaatttgaaagagacaacgtttcaacgtatataaattctcatactttcaactgattaaataaataggaatagattaattaaataagacttttttttttatttttcttttctaaaggaactttagggtggaataatgttggcttgattaacgctttatgtttgtcttgaacacatttagctgtagtacctttttcccacttgtgagtttgtgagcgagtgattagtgtactattcttttctccttctataatgttcatactatatctctctctctcatctcccattttatcttatcttctgtggtggaacctccttggttgtgctaatttgtcttttatgctatgaaaaagaatacatataatgtatataatctaaacaaaacaagaaacattatttttcttttgttttgttctgataattaattatatcaaaattattatcgaacctggagagtgtaaagcgaaaatatgcttgtaaagtttattaggttttgagttgatttaatatatatatagttgctattaaaaaaaaccgctaaaacttttatgcatccactcattatagattatacaggtacaacattttaatatatccaatcaacacaaccaaatgcaccttcttatttataactatattattatttcacctcctgtttcgatgtgggcatagtgaccagattccaatctctctcactctctctcatacgtatattttacttctgtaattgtctgagataaaagattactttaatataatgttggtcctggaaaaatacttgtgtttttattcgctaaaggtgaaaagctaggcattaacattcatataaaggagtagaagtagaagggaaatttgattttctatacttagaaaattaaaaaatttgattcctaaaccaataatttaa

SEQ ID NO: 265665 - DNA, 843 bp, Cannabis indica
actcatgctgaacttccaaactcagcttcttctcatagtttgccttttgtttcgacatgtccttttgaaaggagtccataagtctggcgaatgagtacttcccccaaggaatctagaagaagaactggagatctttgacatatctaagtatgctagtcgtaatcaaagtgttagcctcacgacccagtaacactacctcaacaaacatgcacaagccaagcttgtacacatcttccagattctaaaagtttgagaacctctcctggagtgcttctgtcttcacactatcaaatcagttgaaatatttgttgatcaactggtctaaccccgagcaggcagcctacgtagccttctctttttctatttgacccgaggtgaagttcatgcctgtaatgagtgcaaactcaaccactctaaatttgagctcctttcggccaatgtaaaaacgcatctcttctaccttcttaatattaaccttaatcttgtgcaacattacttagtgaaataataccaaaaaaaatgtgagaggtacgaaattcaaaaaattaccgaaaccgcatgcttttgccatctcattcaaatttattcctcaaacagcatcttgatttttgcaaaagtaccggtacctctatatatcacgcgaccattaaaatggtcggatgttggaactatgagtcgtggagtcatctgaaaaaatagataacaaaagcatatggtaagcacaccatcgacgaaatatagataaactatcgccaaataaaagttcctttacaaaatcaaagatgcatagtaactgaatttgtcgacaaaatattaacatcttgtcgacattatctcaataaa

SEQ ID NO: 265666 - DNA, 635 bp, Cannabis indica
aagaatcgccgaaccaggaccatagaactagactaggaccgtgaccaagacccggacccagacctagaaccgaacgcggacctagcctcaaacccaaattgagacttgaactgaggcccgaaaacagtcgtgtacccagaccgaaactgagactcggtcctggacctaaatctgaaacccgatcccaaacacacacttggacctagatagggatccgcatacgaacccttactcagactaagacccagactgggatcgaaatgcttgacctagatcgggaccgagatcataacccaatccaaaacttgcacccccactcgggaccttaacttggacctggacacgaacctagacccagatcggggtccagacctggacacaaagctggacatagacacagttccgaactcaaacccacacctagaattcgacccatagctagacccgaacccgaacccaaactcgaaactacaccaagatcagaaccaagtacatagacccagaactaaatccagactcggacacaacctagaccgagacccaggacgcgaacccacacccagagcctgatcaagacctagactaaaatctggacccgaacccaggacgcgaactccgaccccaactcaaaccca

SEQ ID NO: 265667 - DNA, 902 bp, Cannabis indica
atgtgtaaacacctgaggtgtgatggtgccaaataaggatatcatcattgtagaaaaaactcaaaggtaaggtcaagattcggtccatatcaagctgggaaaaccattgttgcagcaggggttcattccattagcgatcatccattatcaagttttccacaaccccattcatgggtcctgaatgctgaatcggaaagaaagaatcatgttcaggaaagcaaggatcaagtgcacaacgaaccaatatccataaatcttccatcttaaacctttcaaaaaagcgattccctaccctaaatgatgcctttccaagtcaaagagagaaaacaaccatgatgtgtctcaagaaaatcattattgggaaaataatgactctacaacagttttcttaggagggaatcagaattttccaagaagcgtcaagctttcttagctagtaaagcttgattaaaatgctcaaaagatcagaagcccatacccccatctgttttcattttacatagcaggtgccaagcacgccaatgaatttttgaaccattttcatttgagcctatacggatgcacatggggatgggacaaatgcgggaaatacattccctgccccgtacccgcctattatatttttccgcgtccccgtcccttccccctatatttcccatcggggaacggggcggggaattcccgttagtaatggacaccataacggggacccgtttattaaaaaaaattcaaaaataaataattatatataatcaaaattaatatttgcaaacattaaattaaaacaacataaaattaaatgtattccataattgatagtcattaagataaattctaaaattaaaagtccttcaacgttaaacttaaaatccataaacataagcttaaaacataaacataaa

SEQ ID NO: 265668 - DNA, 776 bp, Cannabis indica
tcagaacccaaaccaagactcggacctggacatgaaccccgatcgggtcgtggactcgaaccgggacctaggactcgaacatggatgggggacctagaccgaggacacgggcatcagaactaggactgagacccaagccccgaccccaaactaggatcctgacctaggaccgggaccaggacttggggccagaagtggaactagactgggacctgagactgtaatccagatttggacccagggcttggaactgacccgtagtaagtatttggatctaggacccatacccgaactcaaacccaaacccagactcgggccctgacctaaacccagacccgcaccccagacttaggtccgagtccgagactgggtttgagtccaagaacaagaaactgactaggacccaaacacaaacccggaccaggatgcagaccctaatcaaaactcagatcgggtctcgggatacgaacccgaacccagacacaaacttggacccagaccccgagccaggacccagactgggattggagactcagacctgggcccagaaaccacacctagattggggacccaaactcaaaattagaaccaggatcgggacccaggatagggactgggaccgaagaccttaccccggtctctgtccaaaacttggacccaaacaaggacacagaccggcacccaggatttgaatcggaatgagactgggacccaagattgggattcagatcttgacccacggcccagggcttggacccaacccgtagtcggtgtcc

SEQ ID NO: 265669 - DNA, 974 bp, Cannabis indica
aaaaataatcaattatagttaatgtaattcttaaaaaaaaaaattacattatcataacctactattattgattaataaaaatataatcatcataattataatattattataaatattaataattatgtggagggccatctgtactactctgggcattcaggaagcgactgagaacagtatgtatttggggctcccgagtgctgttggcaggaataaaaatgtcatctttggctatttgcgggacaaagttcagaagcggatccagtcttgggacaataaatttctttctcgtgcaggaaaggaagttcttattaaatcagttgttcaatctcttccggcctatacaatgaatgtgtttctcattcctgacgggatttgtcaggacattgagcgagctattaccaagttttggtggaggtcgaacaagaataaaggcatacactggctcagctgggacaagctcacgaaacataagagcaatggtggtatgggatttcgagatttaagggacttcaacttagctctattagctaagcaaggatggaggcttttgacttgtggggatagcttgatggggcaaatttacaaagctagatacttttcgtcagggtcttttcttacatcgaccttggggagtaacccgagttatatttggagaagtgtgtttgaggctaaggagttagttcgggctggggttcggcggttggtgggtgatggttctaccgtcaatattttggctgagccttggcttcctgatgagatgaaccctttcattgaatctgtccatccaggtcttgtggggaagtcagtcaactcttcaatgaaagtcaagcaggttgaatgggatggggaagtattagctgatctgctcactgctagagatcgagctttggtgtggaagattccgcccagtagtcatttgagtactgatttgtggtactggttacatgatgcgtcaggggttttcactgtta

SEQ ID NO: 265670 - DNA, 2085 bp, Cannabis indica
atggtctaattaataaattatataaatggcaattttatttgataattaattataattattaaataaatagttttggcatttataagattgaattggaaaatatggtattattgaaagaagaataagtgattgagaaaagtagtaaaattgtaactagagattggtccctttaagtggcctgccctagtgtttattttgcccattattttattcttttttaatccatataattctaccctaaccccaagttaaaacagtataaaaggaacatgatgctctcactcatccaacttttgacaatttgactattgccttcaacgtagatgagagagttctttccttagtaatttcagcctccttcattattcttccatattcgaacccttagtgaaagagtgtcatgcccacacatagaaagtcaagtactcaaccatagtgagtaagacggtggtaaccaaacctgaaggtgagaaagagatccaggtttagatcttgataatgctctgcgacagaaaagaatcaagggctagagatcttgaacggaaggagtcattatatttcgcagcaatcatgtaagattttcttaaacccttatgtgtttaattttattgttatagagatattcatatttaggatgttaattaacatacttgtcagtaaatcactctattctcaacagttacaatgagtataagcactgtattctcttcttgagcaagtaagttaagaatctcgaaccctttgcatgaaggattcagtgtgtatttatagattagtataggtcttacttagttatcctttccctctaatggggaatttacagttaatacataaatttaggcttatttgacaaagcccagcccatgaggcaatacgtgtatgttgatgcagagatctgatcatggtgctagttgttcataccgtgtcctttgattgtgggtatttaatgtagtattaatttcttaatatttaattattcaattttattttttacaatgattttattctctatccgagatttaaggaaaataattttttattctgtgcgaagcagtaaatagggaactaggcctagctttcggatacacgctaggcagctcttgtaggtacatggagttggcactcttccataggctaattagacttgacggaagctcatttggcgaggcacgtggttgttctcccggaaggacataacaattgggcttagcccaatttatgttatttgggccaactgatgggctttaagcttctatttaaaatccacgtatgccatacggaaacatggataacaagctcgaataacacaattagcttaaatcttaatcatgccaatatttagatcgaattaatttatgataaactaagtggtattgacttaaaatattcaaagcatataatcataattattttctaccgtaatgacgtcactataattatgaataactatgttcacgatttaataatttttatatattagacatataatcacgtaaataaatatgtgaatcaagcgactaattaaattcaaaatattatttctgaaatttttgatttaaaataatattaaaatgaatttatattttatttaagtcacagaatccaataataccaaacttttaagaaagacatgaaaattatgcacatgataaagtaattttaagaaaattaataataattagaacttatctcatgaaaatctttagatttttgaataatatcccagtcgatcattatagttccacctaattcgagtttaattgtggagcaaaaaatcaactccttattattgactaatttttgtactccatcaatataaatccttcaccataggaaaagggatctgatcaatcttgtatgcagaaactctactaaaatcattgtgtattctctttgtattcaagatactcacttgaggcttcttgtgatcttgtatacaaactcaagaatataataccacgaaaaaggaaagtagcctatttacatcgaaattacagttgaacctctacaaaaatctaacgtataacaccctactagtttaggcgtgttatcgtgattttatattaactgtgcagctcgttgcta

SEQ ID NO: 265671 - DNA, 538 bp, Cannabis indica
ccgcgcaaacagtagaacaaatcaaaaaaatagagttgaggttcatctatataactaagggcattttaggtattaacatttataaaaggccatttacttcatttttgaaaaaaaaatagacattaaccttcattagtgtgagatttaaggctatttgttacaatttcccaatattatgctccttaaaaaaagaaggaaaaaaaaaccatgcctccattaagggattaacaggtaaaaattgtctaatgttttaggtttctaatgttttagtatattatattttattacagaagtactaattactctgtcattgtgacacgtgggtgagtggacgaaaagggaaaattttttttaattaactaaaaaggaagttaataagcaacatgtaataagaaaatagttaaagatatctcaatctttaatgactattgatgaagtatattctacataatttgatttgagtaatgctagctatacattcaaataatacactaattgtatacaataatgtgtattaaataggggtgttcattggatc

SEQ ID NO: 265672 - DNA, 2223 bp, Cannabis indica
gtgcaacacactgtttgaacataattttcgacatgttaaattttttcaaattacttaaaattttgcaggatgtcttaaaaactataacgtacatgacaataagaaaaatttaattaaaaattatttcggatgctaaaacagataggagtgcatcaatatatctattttaagggagtgcatgtaaaattttccaaattgttatatcatatgtaatttaaagatggatattttggcgtgtccatatcattactgggcaaataaatattcatatatttaagaggatttaattttttataatttattttcatagccaatttggcttgtaagttattttaatgttgtatggagggtgtttggtttgaaaaagacagatgacatcataattttctagcaggcttggaatacatcttgacaagcacgttcttgttcaaacttcatagtgatttgatccacttttgctgctgcatttatttttgttttcttccttggaatagagctaataattcctaaatttattacaaatattacttgcaaataacgagtcatcaaaatatacaattttatgacaatatggtcggagccccgcttgatttcatttttctagtgtttttgtgctgaactaccgtatctatttttctcattttattgtgtgttatttgtatttgtgttgtttatcactctcttgaggatcattttagcaggggaagatttttatgcctgctaagttgggataacatttgcagaccctcttctgcaggaggccttagaatccgcaagttccatgatattaacttctgtctgattgctaagttgggctggcaacttgcgacgaatgggaatttgctgtggtgccaaattatgttggggaaataaggtttacaaggtggcttttggggtgggaagattcctagaaatgcttctcgagtggctcgtggcatctggaaaacgagggattttatacaggaccatagtatttggattattggtggcaactcgagggtcaatttgtggcagggatcctggtcttgtgctgatggagtttgcattaacccaggtgatctcaatcctggtgtcgtaagtggtattactacaggggatttattaattgagggggagtcttcttgggataggagtctaatcactagactgtttcggcctgatgcatgcaaccaaattctatcttccaatatctctgggatgtctgacagggattctttgaagtggaaatcctctccttctgggaatttcactcttaagaatgcttactgggaccttcattctagagtgttctcttcggatatggattgtaagtttctttggaagctccccatgcatgatcgacacaaactcttcctttggaaatgcttaagagaatgtctccctttcagctctcggttgggagttatatttggtaacgtcactggtaattgcgtcttgtgcaatggtgagggctctcactttgatgttcatttcctgtctcaatgcccaattacccagggactttggttggccagcaaatggaagttgaagattgaggatttccctctacactctggtgtagtggtggttaattggttatctcgctatgcaacttggtgtgggggaagtttggaagatagggatgaattttttatctttgcgagagttctctattataatctttggttctttagaaatgacacctatcataaccacacccaatggcctcttactgagatgattaagagggtctcactggaatttcagtcccattggaaatgctatctggatactaagtgttgcacataaggtggttcgaatccgatacagtcgagatgggccttgccacgaccgggaagaatacgagtgaatgtcgattttgccaccaacaacggaataggagcggtgggagttgtggttagagagctaggggcaacattctatcgctctttgcgatgaaaaccccgttcctttctatttcgcatggagagttatgggcgatcttgcggggtctagaggtgatctcgcactttggctacactacggcggacttgttctcggattgccaaactgtggtgattgctctttcaaaagcaacctctccccactggaatgttcaagcgactttttctaaaaccttaaccttaatgttatccttgtctgtttctccgatttggattccccgtactgccaaccatgctgcacaagtgctggctagttggggtactaaccatgattgtaagg

SEQ ID NO: 265673 - DNA, 575 bp, Cannabis indica
aagtattttgttttaaacagtgaaatatcatgcttagatagttttcaataaagaagtattttattgtctctatcttattaaattgttttatacggactatcctaatgtagggttgtacaaaaaaaattgtaaaccgcccaagccgaataactcgcccaaaccgaaccgaaaaaaccgataaaaattacaaactgaaatgacccgaaaaacttacaacccgcccaattaaaccgaataacccgaccaacccgactttggctttttttttttttttactttttactttttattatatgtaacataaatgattaatataaaattatatacttaattgttagttttaaagtcatatatattgtgttgtgctttggtagaatttgatatttttaatttatctttttaatttttattgactttgaaaaccaaaaaaaaaaaaaaattaggcctgtttaggcgggttaacctgaccaaactgcctaaaccgttggtcgatttacaattttttttaaaaaaaaaaattgggcaggttgcacttacattttagcaactcgaactttagattgggttagaaaata

SEQ ID NO: 265674 - DNA, 1249 bp, Cannabis indica
aaaaaaaaaatgttaaaaattagtatataaaatgattctcctaacaattacagtgtaattatattttaaatactatataaaattataaagtattaaaaatatagagaaaaatttttgaatgaaaaaaatatattaaaaaatattatatataatttaataaggaaaaaaaacgtatgtaaggtgtatataagaaattgataataataataaaaaaattagtgaagacgtaaagaagagaataactaatgagagcacccttagaaacgaaaactatgtgctacttgagaaatttttcttcaaatttaattaattataaatataacataaaaattgaaggaagttttttatttttaaattttaaaactgtttttttatatatattttaacgaaagtttatataaaaattcacacactaattaacaaaacaatttaatttgcaataaaaattcccataacaatttatataaaaattattagagtaatctagactataaatttaaaaataatatataaaatagtttttcaaaattatattctatttctaatctcatgcaataaacaagatattttgggttggatggagatctgtaattttccataaattggaaattggaagatgtgatcatgattgatgagtcacctcttaggtggtccctcccccaaactcatcagtcatcactgattaatggtcctgcactgcatgcattacttctactgtgacacacgtacgaatgctaatcactcaaaatttcttttttgttttaggaaaaggatgttctttgaacagaaacaaaaataacaagattcagggatcatcaccaatccaaatatggctacttcctcaactaattggaaccacaataaaactcaaaaatgaaatcaaccaaaattagtcaactaatttggaaccacaataaaactaaaatcaaagcccatgtgatgtgtacctcaatttttttaattaattgaacgtgtatcatgtacatttatttgtatactgcttttctccattttttatttgtagaaatataatattaatgtgattctttattactgggtgcttttcaggaaaacaaaaattgtttaatgttgctttcatctacagttttggtattttgatattccgatcacgttctcacaaatcttatcccaaatatagtttattcaaattttagatgaggttgttgttaagatttttttatgtgttattgtaaaagatatttgttgttcattttgttttatgttgtcg

SEQ ID NO: 265675 - DNA, 580 bp, Cannabis indica
tacaataatatctctgaatatataattcttagatagccttagcttatagcgtttcggcgtacaatctcttggattacagtttttccgatcccttgcccagtgaacattcctcactatttatagggctggaaacttgaggaggaagagtttcctctctcgttacaatgcgcataaacagaaagatcgtgtgatcaatgctgaatgcaaggatcgtgggattgaggctgaatacactgatagtgggatcgtgtgtatgccacatccactaagttgatccctgagttatagggattgagctggtgactcacgatgcgtttagctgaattcgctaagtgttgctcattctgcacggctcgttgagtattccattatggacatgccagcgaggcatcctcctcggcatattgatccgaacaggtgctctaagtagtgtccacgtgtcaccattctcgtgatgccacgtcagagtgccaaatttgggataacatttgcccttaagtctgtacgggacttccgaggttgcgtgtagacttatttgtatggggacacgtgtcgaacatgaccgtttgagactcgatgt

SEQ ID NO: 265676 - DNA, 697 bp, Cannabis indica
tataaaaagaggtatgtttcaaataaatatagaattagaggtaaatttgattaattgatgaataaaagaagcatttttcaacttacccatgaataaattcagtggagaactattactgacacgtgtaattgacccaagtgttcgaccaactggagaaactttcctaaaaaagcctaatcagtttgacaacagctgaggcccaataacaaatatctgaggcccaattaatacaccataaccattaaccacgtgttgataatatgagggatattagataataatagataggttaattagtatttttgccccctgaactttgatatctactaaattatgcccttgaacttttaaggctattgaaaatgccccctgaatttttgagattgttggatttaaggacttttttctaattttagtaaaaaagtctaacatggatgaaagttcagagggcataatttagtgcatgtcaaagttcgaagggcatgatttggtagatatcaaagtctgggaaacatggtttaatacataaacaatcattgaaatagtaaaattaaataaaattagacaaaagtcttaaatccaataatttcaatagttcagggagcattttcaatggcattaaaagttcaggggggtaaaaaatcctaattagcctaatagatattattaacctttaggtattattataaaggggaaa

SEQ ID NO: 265677 - DNA, 807 bp, Cannabis indica
ggcatataaacccctggttacccaccacaggcacaatggtgctaacacttcctcaacaggggcagccggtgccaattgccttaatcgacgcaactcttcctcttgacgaagtatgacacctcgcatttcttgaaacatctgctgccagtcagcaggcggattagtattgccgacccccacattatcccccgaactcagcggaggtgcaggcggtgacggtggattggtttagtctacaccaggctctactaactcgccctgcggtctagataattgtggagggtccattttacaaacagcccagtaatcaacaatcccagtgagtttaagcactaataccacacttatgcacttattgccttaaaccctaactcaactatttactccatataaatatacactcaacatataacatttaaagcatggcatcacataacacataaatactctagatgcttgcgtactgcctaaaatggaaagcggtaagtaaacgatcacataaacagtaaagtatttactctcaatacttactgcaccatgagtcgagcttgtctctaacaatgaatgtacatgttcggccagtctactggaagtttaaaaaccttggcgctctaataccaaattgtaatgccctcactataaggcacgttacccaagatacttaagaaaccctaatcccctagacgagattactaaacaaaaagcgcgggaaatttaaactttaaacaataatagaatgaaaataaacacttgtaataactataactccataaccaaaatcacatgttttgggatccaaaaatattt

SEQ ID NO: 265678 - DNA, 198 bp, Cannabis indica
atgaaatagcatgaaaaatagaagaaaacaaaaaaaattacacgatgtacggatggtatgcacagcataccaccccacaaacatcaatcaatcatcacaaaaacaacatgataccatccaaatcacaagtaaatcaattaccatggctctggggccatttgttggaatttattttaccagaatcttagatctactcac

SEQ ID NO: 265679 - DNA, 908 bp, Cannabis indica
gtaattaaatccaaattccaaagtacacatgaaactccagttaagcttagaaaacaagaaaacacctgaagaaacaatgtgtcatacagagccataagactattttgtccaaccgcagcacaggccttcccatcaatttcaccttgtggtttttggagatcagcgaaactgcaagaattttacttatcaaaactaactgaatacttcaaaagcgaaaacaacagcaatcatcaaattgagagaaaacaagagatacctgctgttaaccaatttcctgtatctaagtctttgacgaccaagaccaacagcacctgatgtcaccaaaatgacttcatacccttgagaattcagctctttaatctgcaagaaatttaaaaaaattaacataaaatcgcatttttcaaactgcaagaaacagtaaatacataatatagaaatgacctgttcacaaagggcacctagtcttccaagcgccaatcttccatcagctcgagtaacaaccgcggttccaaccttaaaaaaaaaaaattaataataaagcacaatatcagaaaatcaaccaatcaacaaaacaaataattatctctaattttattatttttttttaaaaaaaaataattaattaaaaccaaatatcatactattcataagttaaattaacaaacaagtttcaagtatcaaaattattcaaacccaaaagtactctacttaaagctgtaatcagtataaattaatatgaaaaccaaagtatcatttctccattttcaattcgaacagcaccaaatattattaacaaaagtaaaaccgaaaatcaatgaaagaaaaacactcatctttgcctctcaatttcaacgtttaggattaatggaggtagaaatttagggttcaagtgaacaaaagacgtaaaa

SEQ ID NO: 265680 - DNA, 742 bp, Cannabis indica
ataaagtgaaccaaaacatacacaaatgaatgaaaaatacttctgttactttattgatattaaataatctggattatattgaaatagaattttatttagggcataaaacccaacagaaagtcctatggagaaacagcgtggttgaggaagctacttgggagctagagtctgatatgcgagaacaatatccagaattatttgagagggataattgtaatatccgctaactccaaaagggtatttttgtaattttatttagctgagagtatttttattattttacatatttatggatttaaatatgtaggggattatttttttatgatgatataatatttgatattattggcatgtgcataatgcctaataaatatatatatttggatattattatatgggtatattattatattattataaatattaatattattattattatcattaacgttattattattattattataattatttctttattattattaatgttattagtattattattattggtattaatattattaatattattttttaaaactgtatatacgagtatacacggttcggttcggtcgaaattcgtggaatgagaattgttccacttcggttcaaagcgatcttttgcttgggtttaaacacgatagaaattaggtttgagttctatttttgtgcacccagaaacagagaacgaacgagagagagagagagagagtgaacgtatacggcgtatacgata

SEQ ID NO: 265681 - DNA, 517 bp, Cannabis indica
atcttgactcgggattcgggtaacagggcctggaatagaccggtagtcggtgtgtagatctgggactcagactaggaccagaacccagacgaagaaccaaacctgaaccgagacctagacctaggacccaaaattagaacctgaacaagaatcgctgaaccaggaccctagaacaagattaggaccgtgactaggaccctgacccacacgtagagacgaacacagacctagcctgagacccaaaataagactggaactcgagcctggacccggaccggaattgagacgcggacctggctctaaatctgcgacacgatcccaaacacagacttggacatagatagggatcccgatacgaacctggactcggacaaagacccagactgggatcaaaatgctagacctagatttggtctgagatcttgaccaagacccaaccttggacccgcactcgggacccgaacttggaccggacccgaacctagacccagattagggtccagacatggacacaaac

SEQ ID NO: 265682 - DNA, 1089 bp, Cannabis indica
ttttcattctatttctttatttgcattttaaagtattggaatgaattctaatagaatgttatttctatcattttggtggaatgactattctattttaaaaaagacggaaagaccattccaatgtaacaaagagaaaaaatttaatgatttttatcaatttttttatgcattttaaattttattccattcttattcttaattctattcccatttttattcttatattttcattcctcccaaccaaacgccacctaagtactagctatagcatttttatgagttcattgcattgtatactatgagttaaagctgttgaattttatactgcagctccattatgcgccaacctgattgctctcgaaagagccagcatgtgatcgtgcctaaaagtaccgctgttgtaattgagaccgcacctgcagccacttctaacatgcctgaacctggtgtgcagacctcaaatggtagacctcagcaggcaatggaaacatttgctgctccattttatcagacaagattagtagaagagacagcaacactaattgagagaatttataatttgggggcttcaaagttcagcggttctactagtcctgatgatgctgaagagtggatacagaggcttgaagagatttttgatatcattgattgctcggacgagcaaaagctatccgtcaccaggtttttgctagagcgagatgcttttcattggtggaagggggtgaaactttgctatccttatccatcaaccataagttgggtagattttcgacgtgagttttatgataagtattttccacgatcctatcgcgatgccaagttgagagagtttttgcagctgacacaaggatatatgagtgtaagacaatatgaggataagtttatttcattggtgagatttgcccgagctatagtagcgaatgaggtcgatatgtgtaggaggtttgaggacggtcttcgaagggatattaggatgatcgtgactgcagtaggttggacagagtttcgcgggcttgttaactctgctgagagagtagaactgtgtatttctgatcatcaaagcaaccaggaacagcagcagcagcagca

SEQ ID NO: 265683 - DNA, 658 bp, Cannabis indica
ctttcaattttaatgtagtataatttagtttgatatattttacttctaataactaaaaatcttttaaagaaacttaattattgatctaaccatggtagggtattcttgatgggttatttttattaaggatatttatagcaataatattcaatttttttttgttgtactttaatattcattttttttctttttgtagtaataatacaaaagattaatattttagtgcactttaatacacaatttttttttggggtaatattacaaaaaaagtaatattattttactacaattaagtgcaactggttaatttttgttgtcaaaataatcacttggcatcatatattaatacttttttaattaggctatgtttggtagaaaggagggagagtaggatagatggagagtgtagaaagaatagagagtaggaaggatggagaggatatttgttctcttttatgttgtttggtattaggagtatatgtggaaggatgagagtaaaatagatattaaaattactattttattatttttaatagggtaaataccattttggaccctctgttttgcaaaagttgccaattggaccctgtgttttgttaaatgacaaaatggaccatgtattttctaaaatagtacaaataggaccctgaattgattt

SEQ ID NO: 265684 - DNA, 547 bp, Cannabis indica
atagacctaatccaccttttggagataactacctctccgccatgtaatagggttccaaaccctgattcataactatcacacggtctatccaatttactaaagattctggctgccacataagaatgtgtggccccagaatcaaacagcactgaggaatatgagttattaaccgagagttgacctgttacactgaggggctggcatctgcatcagcctgtgtgatggcgaacactcggcctagagtggttctcgccggagccctcggtgcctctgatcggagctggggacaatcccttttgtaatgtctgggcatgccacactgaaagcatccctgacctctgcattcaccctggtggtgtcttttacaagtggggcactcaggataagaaaaccgggtctctgcaccaccctgacggctgcctctactctggttccctcggaacctcttgttctgccccgagccatcggatgcagtggatgttctcttcttttggtccacggccgaaccactacctcccctgctaaatcctgatgcaggaggggtagg

SEQ ID NO: 265685 - DNA, 738 bp, Cannabis indica
acagctcttcttatacattattttttggctataaaaaagtggacttcaatagttttcaacaagcaatcaagaaggacgaaaattggagataaaaatcaatcgcgaaggctttttcaactgggttttcaacattcttttcttctctattttcttcttctattctaaattattatgtgtgaaatttctacgatgaacatgagtagctagacaattcattagggtctagatggagattgtttgatattgatttttggttttaatgtgatttaatttttcctcaattttcatgtattctatttcattcgtacttaattacgtttaattttctgatcaccaattaaatgtttatgattttgaggcaaaatctgagaagtgagtgtcgattatgctacagtgaaatagaatcaaattttgatgtaggacgagagtacctatagtttggataacttatagggtttttgtgtttaatgcctgttacatgtttcatttatcacgagagtagaaaatttgcatataattgaggtttatatatttgagaacactataaattactttagtaaacctgctattgcatagaaattggtaataggaataaaatcatgttaaaccataatcaatagatacaattaaaattgaacgccctaacttttattcattgttaattcccttattaatttacctgcttcttactttcgctgtttttctgattttattatctcttaaaattttatataacca

SEQ ID NO: 265686 - DNA, 774 bp, Cannabis indica
cttttttcacattaatggatggttcccattctttcatcaccacaggtctacggttaaaaaatatgtatcctcccctaagtacttcatctctatattcaatggagtgaaaccgaattatgtatataccataggaaagtaatccaactctctcaaccttctcagaccacatccttctcacaaaaccctcaaaaactgccaatgggggattagctcctaagacataacaaacaattgagggtttccaaaaatccacttcctcttgtatatcatcattagtaatcttcaccttattgcacttaggaaataaacttttaacaacagatccagatctgagaacagggggattcgaattcgtaccttgtgcgattttagcagagcactgctcagatgcctccaagaaatgggcgaaatccaccctaatctcctcctgttgcataatcgaccttagagaggacttcggagtcaaaggatcaggttccagcgtgcccggaggtaatcccgcagctccgtcgaacgaatcgtcatcatcaacatcagaaaaatcgatgggggctacacctagcaccgcatccatagttttggttttcctaacatcagaaacagagttaggacctttcttcttcaccggcttcatcagatttcctttcccacgccctcgtcctcttgtcttcgccatggctccagcagttgctgcaaggagtcgagagagagagaaaagttgcttgtaactaatgagagttggtgtgttttaattattgggtttatttgttaacg

SEQ ID NO: 265687 - DNA, 530 bp, Cannabis indica
tgacaataatgctaattccctttgctaatccatattctaacatcggtcattacaatatccccccgtaataaggattttctccccaaaatctaacttgaatagctctggatattaagttcacgtgccagactctaattcccaggtggctttcctccaccttgctctccttccaaagcaccttgaccaaagctatggtcttgtttcgaagaacattttctttcctagcgaggatctaaactagttgttcctcataggataagtctgactgtagttctagggcttcataactcaagacatgagtcgggcctaaaacacatttcctcaatattgaaatatgaaatacattatgaacaaccgagaacactattggtaaggctagccgatacgttacctgcccgaccttcttgagtatctcaaacagcccaataaacctagggcctaacttgcccatctttccaaagcgcctaatacccttcactggagaaacttgcaggaaaacatgccttgctgcctgaaatgtaatgtctcta

SEQ ID NO: 265688 - DNA, 807 bp, Cannabis indica
tttttagtttttaattttttttaatatcataattttaaaattaataatatttaatgtagtgataattattgaaatttaaaagcataataattatttaaatataaacaaaaattactattatactttgcagtagtataataaatttaatttaaaataatatttaaaatttaactaattctaaatatcaaaatttgaaaataatttttaataaaaaaataaataatatgaacagatttattattaattgtgtttaggtttaacgaattatatggatgctaacctttacgtggtaacatctaataatttgtattttttttatttaaaaaaaaaattcacccaataattcctcataaccaaaaattctgttatatagccacattttagaatagatatatataatatacatgatatatatatagcgataaaaatagccaatgataactctacaattagacaatgaaatgaaaacaaaataataacaggttacaaattaaagaaccaaaaatttctataatacaaccagttaaataggtttgctgtaaagtaatattgtgttgtgccaacattataattataaatctatacaagaatgagataaaagaggctttgaaagctccacgatgccctcctcttaaccatatatatctataaatatatatataaatatatgaatatacatatatttgggccataaatataaatgtaataatatatagtgaaataaatattattatttgtctatgtgtgtatatatctttatttttatactaatatgacttggatgtaattatatttttaatttttatt

SEQ ID NO: 265689 - DNA, 576 bp, Cannabis indica
tcatatatagtgtaatcacctctaagttatagttgttcttcattctcacctatgaagatatctaagcaatatccctatttacgcacatacaatttgctttagttaatctatatatgaggattctgttgcgttactgtgattgctgagaggatggtggtggagcatttaacttaattggtcttagaattctttaatctatgctgtcacttacagaataagcactcattagtagttgtttatctttcttttttctccttttcttttttttaatagggttctttatttagctaaattttaatacaaaaataagcaggtgatagcatcagagaataaagcagttcaatggactactcctctcggacttcctgttattcaaccataccggcaattgggcagacatcttgtaatattctaattttgaataaccttttagaatttcagttttagttaattatttcctagcattttgaagctaaactgacaataacttggggatatcagattaaaacctcccttcaagtgttgactttacgtcgagaaactgcaaaggtatctttcttctctctctctctctct

SEQ ID NO: 265690 - DNA, 1593 bp, Cannabis indica
tggtcctaaacccttgctagaaccttagacccatgacccagacaaggatccaaaccctgacaacggacccaaacctgaacccagaccatgactgggaccagacctggactcgaacctagaccgggacctagactaaaaccaagacccaaaccaagacctaggaaccagacgcagatgggggacatagaccagggacccaggcctcggaacccaaacctagatctaaatccgagattcgaacccgagccaggacttggcttggacccaggaattcaaagtcagacccagacctagaacaaaaacctgccctgggccaaaatcatgacaagaacctcgacatgaatccatactaggatcgaactcgaacctagacctgaacacaaaatcaaacccgaacccgggactcgaacttagacccaaacccaaaatgagacccaaacctagacctgcaccaagacctatattcgaacccagaccgggatcggaacccaggacctagacccggaactaaaccctgacttagatcgagatcaaaaccggggactcagacccgaacttggaccaagacctaggaccctaacccacagccgtagcccgatccggacctgaacccaaactcggaccagcactcaaacgccaaacagaactcgaaccacgacccaaactctaacccaaactcgaactcagaatcgcaactggaactagaatcgcacaaggactaggaccaggactaggacaaagacccagacctgaacccaaacctaattaaaaacgtagaccgagacccaaacccgaatcgtgactaggacccaaacccgcacctagatcgggaccaaaaacctgacaaaaactgggaccttgacctaaaatcagaatagggacttgggcagcgaaactaggaccgggacccaatacccgaccctagaccttgacttgaacctaggacccaactcgtgacccggcacccaaaatggaatcaggtcgggacctgagatcgggatcaggatctggaaccggggcttggacctaacccgtagttggtgtctagatctgggaccagcctcggacccgaacccagacgcggaccgaaacccagcaccataccaaaacctggacccaaacccgtaccctgtgacctaaaatttgaaccgaaactggaagtagactaggacctgggaatgggactagaaccaggacttggatctggacttggaaccgtaaccagacttggaccatgacccggaaccatagtcggaccatgaccaagactccaacccagacctagactcgaactgggaaccagccccggctccccacccaaacctggactcaggacccaaacctggacccgaactctgacccaaacattgaaccaaactcgggacacaaaacttgggtcgggacctagaaccgcaccccaatcgcggtcccgaaacaaaacttgcacttgggaaccaagacctgaacaagaacaagatcgggacacgtgacagggacctagatctgggacttagaccaggactcgaacccagtccacgacccaaacctggaccctgacctagacccgtgacccaaaattggaacctgaacaag

SEQ ID NO: 265691 - DNA, 656 bp, Cannabis indica
aagttttcactggtgttctactattgttttactggtgttctactattgttttgagttattctgctttgtgttttactggtgttttataaaaacacagtatttttgaaaatatttccgtgtgacagtatttttgtaaaagttaacccaaattccagtattttcgtaaatttccctataaaaagaggtatgtttcaattaaaaaaaataaaagtaaatttgattaattgattaataaaagaggcatttttcaacttaccctcgtattttatgggtatagaacatagtaaattagtaattaggtaattaaataaagggtattttcattttttacacttcaaaactagtttttttttttttttttttgctatttctacgaaattttacataaaaactcttattgcaactagcgctgcaatctaaattgtaacaaaaaattgtatagaaactcctattgcaactagcgttgtaaccactttagaaactacaaaccataaatttaaaaaaaaattaaaaaaaataatatatagaataattcaaccttaaaaaattaactgaatagtcctcttcattaattaatatataatagtcaaataaataataattgtgcatttcacacgtgtgaatgatgaagattttgtgttggagtactattccaa

SEQ ID NO: 265692 - DNA, 1362 bp, Cannabis indica
atgctgtagattttgttgttaatgtaagctttttagtgataccaaaaatcttattatgtattctaaggttaggtatttgttgcagtaatcacacaaaaaacctaccaaacgagtccaatatgggcaaactagattccattgtttctgaatccgagggagaagaagaagaaacccttcaaaggtcgagttcagaggaacccagaaatcccgccaataatgatggaaaagggaaacaaggcggcgcatcagagtacgagaaacagaggctatcgagaattgcggagaacagggctagaatggaggctctgggtctgtccaaaatggcttcgtctttaatgggttcggctcagaaatcgcggaagggtaagggcaaagccaagcttactgaaaaggacgatgaagattataagcctcaagaggaggaacccacttcttctgccgatcgggaagagaacggagatgatgatgaggaggattatttgggtccaaaatcttctgtgtcaaataaaagaaaggtactttcgtgcccatatacacttaaatcttcctttgaaaaaagaacaaaagttgtatacagttcactagttctttgagttgatcgttctagcccatgtttgttgatcttgcgtttaggtgaagaagaaagtttcaaagtctaatagaaaatccctgtggaaaaaatttcgactacttcagattacatggatgaagatgaggcattgaaactggtacatatcgacatgttaatgaattttaacataatgtcagccaaaaccacttatttttttattcaatcaaaaaagaaggacaaaatgcagagtaataaggaagattcaagaataaatatgaagaaaaaatcggttcgttttcttgtgcagtagtatcttataatacatttacatctattatattctcattttgctttttatcctatcgttctcaatttcttcaactggtgaaacagtttgctagtcggctgcagatgactgaggatgaactgctagtccatttttaccagtttgatggtaaagctaccgactttattgtgtctgtaaaatgctgaatgccatccatgatggagtttgaagagaatgaacttaataccaaagtactaatagtggcaaaatctgttgaatgatttgacacagataattggaagggggggattacgataaaagatttagaaagagtagccactgcacatgattttacttggacagacaatgagttggctgatatgattcgttgctttgatagtgatggagatggaaaggtttagttaatgctacgctagctttgagtttcttcttttctccttaactttttaacttaaatttcattttgtggtctattgcagctaag

SEQ ID NO: 265693 - DNA, 1243 bp, Cannabis indica
aaatagatataaataatttttcataattaaacatgataaactgctaatttccaaattaaactaagcggtctttacattaggtacttatgccactatttaccttaactattttgttgtcctcgataatcgataattaataagaaaattaaaagtaaaacaaaatttcaaattttacattattgataattttgtgaatagtgtgattcacccaaatacttgttatcaccctgagatgtaattatattgtatatattactttgaaaaatttctttctaagttgcaccaaaataataatttgtaattatttattattgaagaaaatactacacagtaatgaaaaattcttctatagattaaattgctccaaaataatatatctataaccttaaagatgatgcatgaagtagtgataaaatgctctaaaatcattttaaaattattacaatgtattacaattattacaatagtcgcgcaacataataatatgcaatcctcatttttgtaattctcattatattataaaaagtaaaattacatatgtcttctctccaattaattcagttaattaatttttcattgagagaatcaatagtaaaaataaactaagtacaagtataactataatgtatgacagtctttgatttctaggtttgaaattatatagtgagttttattataaattttttatttttttttttaaaatctatatttataatggaataattcaaataattatgtataaaaatttatagttaatgaattgtttaatttatagtttatgtatacagtgaacttatcgaggagaacaatcgttacctgttacctttgtacaagtgagatcgatacggtgagctataagtgatgactacaagtgagttatggttataataattggtgagatgcaatgagacaaaatgtgagataagatgatggtaacaatgaaggagtgatattcaataatgacaataactttaaaggatcagatataaaaacaactcattatagagaacactctaatttttctctataatatggatttagataatataattttactattattatatattaaagttatatttttattatcgtactaaaaaagttaaattaactagacaaagaacagttatattgcttagttaaatctaataaaaaatttaaagaataagagaattaaagagaaaatatatatatatatatttggaggaaatttagagcgcatatatatacattaatggtataa

SEQ ID NO: 265694 - DNA, 905 bp, Cannabis indica
tagacttgtgacgtattgatccttggattccagccatactaactcaaaccagttagctaaataggtccatctagcatgtcggtctctaatcttataactgaacagagggaatggaatattggcttgttaaataatttttttccagccaattgatgttgaaagattttgaccatcccttagagttttttactgctaacgatagactcatatggcatcactcatcctctggaacctacactgttaaatatgattttcatttagccacaacattggaagagcaaaatacttcttctatcttagatccaaaccgtgattggtggaagtttttttggaacatgaatttaccaccaaaaatacgtatttttgcttggaaagtcctacacaatgtgcttcctgtagctgctgccctttttaagaaaaaaaatcattgattcagctacttgttcactttgtacttcaaattgggaatcaattggacatgctctttttggttgtaagcatgctaaaggaattcagaaggattcaaaattctcaattgacttccataaagctcagacaatgcataatggagactacctgcaacacctatcttccatttacaatcaagaagattttgagctgcttatttgtcttatatagggaatatggtcagatcgaaacaaggtctttcatggtggacaggcacgactgagatcttcaatcattgcatatgtaactggttttcatcaggactatacccatgccaaaacttactctacaccagctgctacaacacaacatttggccattcaaccagccaccaatatcaggctgcagcaggcagttccatggtctccacctagaattaatggtttcaagttgaatgttgatgcaacaacgaatttagagcaaaaaaaaaaaaaaaa

SEQ ID NO: 265695 - DNA, 1176 bp, Cannabis indica
gtctttctcctggattatggtcaatcatgattgcacttcaatgaggcacacacatttgttgtttgaacatatgtatcgtttctctcataatgtatgtggtttatccactcaataatatctgaaatacaataagtaatagtatcctctccactttcgtttgctatatatctttagctttcttgtgttaaggtttcagaaactgctgaattttttttctttttcttttggtctttgactctgtagacacactttactgaggtataaaattgtatatgcggtgaatagtgttgttaccaaaactaacaagataatgtttcccctttttctttctttctttctaatattagggacaaatcactttcatggtgttgcaaattgcagtagaatcaccctagattacaaagagattgttaaaccttggatttatgatattttcaacttaaaaataaaataacgtttgtatcgtgtcaatctcaagataggttgagtttttggaattgaagacattagtggctatcctattattcggcataaatgtgcttcatttacttaactcgatgctgttgtagtttcatttatgaagaaatttatgctttctaacttcattggcttgcaactgttttacttagtgcaatctacacggtatagctttgtgtggggttttagaaatttttgagcgtttgcagttactttaggagcactcagactcaatacgggtataataaatgtctatgttagtggtaactatggctatatatccaaaatgatctcccttgctcttcgagccattaatttggtagtggccagtgggggaagctgaaatttcttctctatagaatttaatgctgcttattaacaatatcgatctttccaccttgaatccaagacaagtgggtatttgtttttattgtctaccaatggttgttattttagtatctaccaatgagaaatttacttaattttgttatttcttttccccataaactttgcttaagaacatttaggtgaattttttattttgttatttctttttcataaatacctctcgtctttcctcggtttgttaatgctattaagcttataatacaaaatgaaatgaaagttgttaatacaagggaatctctagaccataaatcatcagcccttttgtttattagtttttttttttaaaacttt

SEQ ID NO: 265696 - DNA, 625 bp, Cannabis indica
tcaagagtgaaacctcgatctaaaataagatcatagtaatttctttcgagagagatcagagtattcttacttactcttctgacaagtcaatactacaaaaaggaaagtaggctattactagctataaggggtcgaacctctataaatctggtgttttctttactttatgctctttgctttcttttatttgattattctaattgttttaattaagactcgttgtcgttggctaaaagtgaggtcaataatttgtttttgtaattagctactaagcaaagtttttttattaattttttttttaactgtaaatttcattcaactagaccaactcagccttaacaatattagcaacatcaaaagggagattaaactccaaaaaaaatataatcagcatataaacaagatgctctagtcataagatgagcaacctgattagaagactatttgacaaaacgtaaaagaaacatccctaaaagaagataaaaattgtttacaatcctcaacgacaccaccaaaagtggatgacaaaatattcaaatttctaacagcttgtaccaataccaaacaatcagattcaataatactaacacctggaaatcgtgtttcaaccatgataacacttcct

SEQ ID NO: 265697 - DNA, 1379 bp, Cannabis indica
tactattttgaaaaatacaaagtttaattgataatttgttggagattatatcgaataatgacgatgtcaaaaaagaaatgaaagcatggaagcttgtgaaaaacataataagctttcaatattctgcaacttttggtacatagttttcatataaaacattttgtgtatgtgatttcttatttttgactcatgtctcaaatgtttgactgttgtatttatttattaattcttaagacatgaggcaaattttattaactatgttaatccaacaaacacaacaactataatcctataataaagattgagaagtttatttgtcaccaaattagccaatgccaatattgtttccaggaatgccaacgggatttgtcgatttctcctcccgaaatggtagatcaaccgaaattgttaagtactcgcgtctttgaagagacggttcaaacaattgacggcggcaaaccatgactgataaaacttcttttgtgtctttcgaagcttttggatccaaataaataaaattgcatctaattaagagatgtttatgtgtagagagctaactcttgtgcccaaatccaacaagtaataaaatggtcaatggtgaggagactgatattcacattgttaagtatagcaaataatatattaacaacaaaatataaaacttgaaaaattaaaactatccagtctagtaaggtatagtacacaataaatacttattttatttattttagaaatattttaaagatacacactaatacaatacacaaccaaatagaagttatatatatagacttttcatggaccaaacatgtaaataaatattggttgataataaaacttacatctttctctcatttatgtagttattattatttgttaatatgtaaaataatttaagcttaaagtatcaaaccagaagaatttaatttcttgtggactaatttttcaacacgttccactgtagccgaattaagatgattaacccaatctccaacttctccttttctgaaataactttattttcaaaatacggcatgaattttccatgtttattcacatccaactccttcaattttttcaaactcaaagctccaatatgtcatcaattatacctagtgcctcttcctccaaagaaaaggaaatcctacaaactcagccaaccttttcacttgagttttagtgtcctttttcaactcttcatacttgaaaacataacctttggaggattctctacactttgcttccaatatccaagatatggctccaaaatggcccataacttcctcaccattgcaatatgcatccacaaactcctctaaaagtccacttgaagaacaatggtcgagatgactcactatcatcagcttgatttgacaaat

SEQ ID NO: 265698 - DNA, 508 bp, Cannabis indica
tattaaattttaattccaatatgaataaactaactaattaattaaaaaaaaattataactaattaggcaagattgcgatattcaatttcaatcaccaatgataaaataacgtaaatgtaaaactactatatttatagcttagaaatacaacaaacacatcatctacaaaccatgtgagacttttgctaaaaagaaaaatgaaatcacaaaattatactaaattcagtaattctaataaaatagataaaataggtgaaaaaaattataagatgccacctcacctactatatactttcctttatattaatatataaatttacaaaatttatattaaattttaattccaatatgcacacactaataaattcaaaaaaattgtaacttattggacaagattgagatattcaattttaatcatccatgacaaaataaaatgaatgtaagaatactttatttatagcttagaaatacaatacacacatcatttgcaaaccaggtgggacttttg

SEQ ID NO: 265699 - DNA, 771 bp, Cannabis indica
atttttaaatttaataagattttaaatgaaagaattattaaaaagttattgtattatttttttttaatcaaaaacgtatttattaaaactagtaaaaaaaatgtataattttgaattatcttacataggttttcaaaatttaaaataatattaattaaattaattttaagagaaacaatatgataataatattatatattcattttaaattactaaaaaaaattatatcaatattttagaaaactaatatttgtatttaattagtaattaaattattatttagcataaataattttatattattcaagtatttttattttactattttaattatttattaaataaaaatatgataaattattttattatatatttatgatatattattttattttattttataatttaattatttttattattcattttttttagaattatttatttattattatatatatattttaatgtaatttttttttgaaaaaaaaaataaataaataaaatagtaaaattttttactttaaactaacacacaaaattaacttttagcattatccaatcttttccaattcaattcagtctaatttagtctaatttaatctttttcaatcaaatcctaacttccaaagccagccatatattacatagattgaaatatgggaaaagtaaccacttggggctagctcaagtggccataggtgggtgtgtgagtgttggaggtcctgggttcgagtcccaggtaaaatatgttgtaatatataaacgctt

SEQ ID NO: 265700 - DNA, 723 bp, Cannabis indica
aaattacaatccgaattcatatagcaactcacataaaaactaccagaataaataccgaacaactcaaatcgtaaaaacaaaaaaaatattaaaaattattatataaagtcattcccttttatatttttaataatacttatatttcaaattatagtatatgttaaacttaaatttaattaataaaaataaaattttcctcaattatatataattagataattaaattttagggcttttttatttatatttcaaaatagtttttttttcgcatttttacgaaattctacatagaaatcctcatagcaacggataacctagattgcaactaaaatccacatagcaaacagaaattacaggagaaaccagaacaactcaaaccgtaaatttgaagaaaaaaaaatagtatatgagataatttccctaaattttaatagtaaaaaaataattaattaaatttaaaaagacaattttttgtcatattaaacaatactaaaatataacataatattatgaaacaaatttacccgtaaacaaattagatgtaaatatcccatgtattaataataatatcatatactaggggtatacaaaattgtattcaaattgtatacttgatgaattcgtgtactttttcacatgcttaagtataaatttagggtgcgtttggaaagccagaatgtaattagatttgtgtataattggaggtaattacacaatttgaca

SEQ ID NO: 265701 - DNA, 494 bp, Cannabis indica
agaaattctcatccactttctctttctctcttcatcttcttattctttcttcatattattttataacatatgcaaaataattaagtgttacaaatctaataaaaacatttttattatataaataaatttttaatatatataaatctaaaaatgaaattttaagatgacatttaataataaattcaatctaattataatttaacttttagcatccaattcaatgaaattgtaattaattatctaagggctcgttgttgtattgtattaatattatttaatacaatacagtgtttgatattgacttatattaactgattgtgtaaagttataatatatttttaatacactcgatcctaataccaactatgggtccgggtcccaggtcagggttcggagtccgggtctgggtccgggatccggggtctgagtccgtgtccgggttcgggtcctggtcccggtctgggtccgggttccgggtctaggtccgggtttgg

SEQ ID NO: 265702 - DNA, 695 bp, Cannabis indica
catgggctttttcacgatcatagctagaaatggagtcaaaatagtattagatatttagatgccactatgtacatataatatataatattagattcacactacttacactatataaacaagttgctgcattggtcaaatggcaccattaattaatttccacgaaactctatcggttgcatgtatgtgtgtgtggatttctacaagttgagtattattatggatttttggttttgttggcgagagatgagggagggaccagcagcagcatccaacgcatatgacaactgggccgtacgttctgcgtattctatttatatatactttgtgtaattaaaagttgacatatcattatttcaaagatacattgtaattttttatgtttaattataacatttaaatcgtgatcgaagagtgttagaattatttatttgtggactaatataataccataatcacaatcattaactatgtgcccaatatttattcactaccataatgggatggttaataattaataaatgtattagaggcacatgggagcaccctaaaactataattggcccattaaattatagtccaccattaattatactcattaccccaataagcctaatataaccccttagggttaagtgttgtatataaaaagggtaatatgtgtttagtatgagttaagagagggtgtgtggtgaaaa

SEQ ID NO: 265703 - DNA, 897 bp, Cannabis indica
ggtaagatgagtttgggagaatgaacttctgatcttaggagggacattctagcaggaaagagattttccattctaaaaatggatctcaccaaaaaaccagaggtttatgaaaaatgacaagcttgaaccgcccttttatacacaaagttcaatgacaagaaagctaaagattgtgaaacctaacggttggaagatgggtagagtatgaagagacgattcataatgatcctcgaaaccatacaaccgccaaaattaaggatgcatttttctaagaagattttgcaaaaatgcctctgtaatattaaaaagctcttttgaatatgaatcaatgcaattgctcatatggaataactcattaattacataagagtcagagtatatttttaactcgctgactgtaaggtcctaggcgtatattagcgagaaaccacatatcgctaaatgtgaaaagtgaggcaccgaagaaagcgacacgtatcaaccgtgaaagtccttagcgtgcaatgaaaaaactaagtgtaaaagactgatcggctcaaagaataaataagcgaggtgaccatctcgcaatgggaagacttcctatagcttcatccagctaaagggagcgaggtttacaaccctggcaagtcagaagaattccttgtaagtaatcacgattgacacaagacatacatcgtcgacctcggaaggaagaatgaccctatttcgctattgggatcactataatcaagtttctgtcgagacatctccagatacaacaattaaagacgtgtttaatacacaatatttttgacccagtaaaagcgagaaaatcacagctacacgattttcaaatcataaaccgcatttacactacatgatatgtaatctgttgctccagaattcgcccaaaat

SEQ ID NO: 265704 - DNA, 713 bp, Cannabis indica
taatgagcttttagttataagaatattcgatctccattgttgatcctacatggtttaattgtttttcaatataacctcgagacgcttcgtcccccttatggatggttattcgttgaagcatttgacatcgtaacgataaatttacgaagtatgaaacaatggttgaagctcaaaaaataagaataatcttgattctcgtctaccgggataatattggattcttattttgatcgaataaaaggttgctagaatggtgtctattttagatgagttgactactctattcaatgaatgattactttgactctcgcctaccgagacactgtattagtttgttggaaaccttagaaattaattaagatatgatagtttaatattttcacatgtctttgtgacttgctaaatacttaataatttctgaattgtgtataaatttatattgaaccatgttattttttgttattaattgtactataatttcgaatcttcattgttggtataacttaccttgttatttttaatgcgacaaatctcaaaggattgtcatccattagacaacataatagtgttagatctcgatagataagtatttgtaaatgcaacatctagttgtacatccaaagatgacaacttagactagtatttacaatatgaaacaatgaagagatttaataaaataagaataactttgactctcgcctaccgggacatcg

SEQ ID NO: 265705 - DNA, 1974 bp, Cannabis indica
aaaaaataaataaataaattgtgagcgtggtgtgggtttggaatttcatttttatggaatggcatgtttacttaagggagtaagaatcaattataccaattcttcttcacttgtttactgaattttgtaataggaggtctacttaaattaggaagaaaaaaagaaggttctcctcctatttttatagggaatgtctttccctttaacttactttatttctatttttattttattaattacaaaattaaaagaaaatatgtttttccaaaaactataaataaaaaaacaagtatatttttaataatggcaatttagttaaattttaacatttcgattacctttttaagttatataaacaaaattaaataattctgattttattttcagacagtttagtaaacaacataataaaatattatttctaattattttatattttaaacttattcatatctctcattgactattctgatttgagatacaaaatagtaaacgtgtcatcaaagtataagtttgtaaaagtatgactttttctctgaaaaattattttataaacttttttaggaaaaaataaaaaaaaatagtataaagtaattggttactcctctgattacctaaggatacctcattatccttacttgacttttaatactttttttaactttttcttgaattttttttccataaaattacttttttaaaaaaagaaaaaccaaaatcttagttgcatacttaattttagagaaatgctaaagagcatcagtggtgcctagcaccctcttatgtgtcaatatcgctattggtctaactaagtatcgggtcccatataatttaatataatagtttttagggagtatcgctaaccaatcgcaacgcaacatatcgagaaggtgctaggcaccactggtacctaatagcaatgctcttaattttatattccttaactgcaaatgacccgcacttatatgcagtgcaaaatattattaataccacagttaaattattaatttatatattaaaaaaatataattttttaataaacatactcataaaaacataaaaactaataatttatagagaaataaagaccaaaaaagagacatcatttatcatcaacatgaatatattttggcatacaagaaaattttgtagtctaatttttttttatgatcgtaaacatttttacaatggtgaaaataaaatttactaggtaagtaattgcttgaactttattttcgatagtataaactatttaaaattttctaaaaatttataaattatcttaaatagctactacacatgcgatcatacaaaaataaactaaaaagctcttagccgaaactatatagggtctaccaaaataacccttctactacaaaaatttccattctaatactgcatacatagcagtgcagatattgcagtttttttaatctttattttgcttaaccacaccgcactacaaataaaattaacccaaccaaaccatactagattactatgtagtgcagtgggaataacacagatgtcgcagttaagcagatattctgctcacccgtagtacataacataatggagtaaatttgaaagggaaatttgaattattatgaatgttttaatacaaaattggtttggagaacatttagtgtaggtaatttttaaaataggatcaattttcaaaaacccccaactagccttctcaaaatctcaatctctttctctctccacttaaactctcccacggttctctttccttcatgcccgattccagccgcctctcacaatccgacttcgcccgaaccccagccacctcacacaaccaccacgccgtcgcccagtcgactccgaccgagacccacccactatccgaccgtcatcaccgccacatggaggaggagacccacccaggttaaccgcaccatatctcaggtaattttttaaatttctcttttaaaatttcagatctgagaaacc

SEQ ID NO: 265706 - DNA, 1006 bp, Cannabis indica
acgatctttctgtttatgcgcattgtaatgagagaggaaactcttcctcctcaagtttcctgccctataaatagtgaggaatattcactgggcagaggacggagaaattgtaggccgaaatgctataagctaaggctatcaaagaattatatattcagagatattattgtaagagctataagaaaaggaatcttcttccttattcttaagtcaatacaactaacgaggattaggctattaccgaactgctcggggctgaacctctataaaatttttgtgtcttattattgctttactacatattcttattacgacatatcgtttatcgcttatcaaaaagactcattgtcgttggctaaaagcgaagtcaacattttggtgctttcattgagagaagaatcacagatcgctctttcgacacgatggtgcaaactcgtagaggcctgtccgacccagcaaactcacagacgctggatccgacgttgtaggacccagggagttcgagggttccacccgctatcaatcctggacagacgggaagcgtggtgaatgatgggacaactcctgttactgaaactgcgcctggtgtgcaagagaccggaaacaacggttccgcacacagccaggacgttcctaacatgactgttccaccaggcatcaatgcccagacaaccatcggagacgcgaccaaattacaaaacctccgcgctgcgctcggactcatgcaaggtcacaacaataccctgcatcacgatcaggaagaattatgtgtcgcagtaaacctcgcatttgacgaacagaggcgtatgttcgccgagtggagggacaaagagatggagacctaagagacggcctaaacagaagaaggcaaacagactagcagaatactacaacgaacgtgcagtccggagcccatactcaaatccccgctcagaaagacaatgacgtggcctaacctgaccagaatgccaatcaagtcagcccaaccgtacaggcccagctcgac

SEQ ID NO: 265707 - DNA, 1926 bp, Cannabis indica
accacgaagtgcagtacttaaaagtactctaaggggtatccgggcacagggtgactggcaatctcacttttcccattgggataagtgtggtcccattgaatcctgtgagttgggagtcgctgggtgacaaatccctatctgtgaggcctatggccgtgaaggcctctttgaacaacaagttcacggagctcccattatcgaccaatacccttgccacaattttgttggcaatgggggtctctatgaccaaagggtcatggtggggaaaacgcaccagtttggcgtcctcttccgtgaaagtaatgggttgatccatgagtcggggcctttgtgctggaagttgggtgacttcccacacttcgtcatgttttaaggctccagcatagcgttttaacttttttctggtggttcccccaatatgggatccaccggagatcatggccactctcctattgggtcttggtgggagcccatggacctgctgagggattgctcccccggggggtgcaaggggtgttggtgctccgggtgcaccctctcatgccccttgaggcgatgggccgcctactgggaccgggttgagatggggtagccagttcttaatccattcatacaaatgacccaattggattaagttttcgatctcgtccttcaagttcttgcactcattggtacaattaccaatgtcgttatgatattcacatctcttgttgggatcccttcgcaaactgtccctgtacagtggaggaggctttcggtagtgtgtattttgccttgtggcaaaatacactcgctcctgcgtgtccgtgagctccgtgtattgagtatattgaggggtgtacccccttcgttgtcacttatcctccgtctggttactaccctttaaggacctcttgcttcgggagttttgaggaggtccttcaggcttacggtaggagcagagtgagacgggacttgaccgctcatcctcgaggggttgcttatgcgattcccaaaatatgatgatgcgggagccaattctaggctcatttgaggagtggttgggggtatggctcccgagagctaagctccgggtacatatcttgataccccagtgggatagtatcccccgtaagccactatctggaattcctctagattgatgtacttttgaactctcttttggaaattgtggaggtgggttgctccctcctattgtaattcgttctagaatggggtccccgtacggatcccagcttgaagaagtgcaagctgttgttcgtcatccaccttcttggtctttgaagcttcctctttaaacctttttatgaagttctttaaggtttccacgggtaattgctttatgttagtcagggcactgacttcgaggttaatcttccttgcagcgataaactgcctctggaagtttacttgtagtttgttccagcagtccactgatcctggttccatatttttgaaccattcctcaacgaaaccgcttaatgttaatggaaagcataaacacttggcatcattgctgaccctcgtgattgcgattacccggttgaaacgggataaatgatcacttgggtccgagtcccaggtgtatgctgtcatctcaggcatcttaaaattctttgggagctctgtctccaatatgtgccgcgcgcatggctctcgatcctcgcaatcagaatctgagtcatcccttttttgcctccgggagacccgagaaatgtccttgcgcattgttgccaactcagccaaaattccttcatttagtgtccccgcggagaccgctggtacatgtttcttcttgtttaggtgatctcgtagatcaccgtgtttttcgttgattttttatcttaagtcaactggagggtatctccggtttttccttcctctctctctgggctagtggtgtacggatacactcttttggtcctc

SEQ ID NO: 265708 - DNA, 666 bp, Cannabis indica
ttgcttgtttttcgtttgatactccgttcaacactcatcttgtgtgttgtctttagtagatgaacccaggtgagtcttgggaccccaagcatcagatcgaccaggagcttctccaacttctgcacgaagtccaccctcgtcttcgtgctaactctccttctagcgaaggaaactcttctgactccgtactcagccataggatgatggctcgtacgaagaaaaccacgcgtctggttgaagcttctgaccttcaagtggctcgactcgccactttgcccgacgccgaacaggatttggcagtcccgatagaggaggaccgtgagggggacgctgaagtccacgaggttgaggagctggacgaggtgcgtctgggcagtcctcccgctgcagagggagagtacaatgaagttgggcaaccagtcgatgctgacagagcttgccgaggcagttccccataggaggcaaggtgccttgggagccaggtgggtaagtcctccgtcgaagattttggaggcacgcctccgcactctcgacaaggatggatacctgggcaagctggactgctacattcctgcccacgacaatcgtgccacaaaccctgagaaggggatgtgcgcctggtcgggggctcacggccagcaaggggcgctgatgcccttgcataag

SEQ ID NO: 265709 - DNA, 2613 bp, Cannabis indica
tattttcaaatttttgattaaaaaaataaaagaccatttttagaatggttactgaacaagcccaaaacatttaattggagtgtattaatattttgggtaaattgcggcataaatacataatgtttcagattttatacacttaaatacctaatgtttatttttggaggcaaaaataatcagtaggtatttaagtgtacaaaaatcagaaacattaggtatttatgccgcaatttaccttaagatttttaaacgttttttgtttttctgttatgtaagtgaaaatattttggattttttttcttaaaactgtttttatcttttatttttataattaagaatgaaaattttgaaagtaaaaataaattactttcaatttttatttaagcattttcttttcaattatatattctattttacatttttattcactaatatttaagacccctatcatgcaattaagccataaatcaaactcagaagtcaaatctcgattgcagacgtgaaacttggatcccagcccccgacccccgtcacagaccttgacctcagacctagatctcaaacctcaactcctataaccgttagtagtcccgtgacccgcaagaaaaaatatctagtaagttgtgcaatctcatatcacctggggaaggtcaattgtgatgattctgagactatgtaggtataagactacatagttgaagaatactttaataaattgatgttactatctatatcaacaaggtgcatcatgttttcctatggcccatcacataagaacttcaaagttaagcatgcttcacctagagtaatcttaagattggtgacctcctagaaagtttttctaagaagcgtgcgagtgaggacacagcatgctacaaacactcgtgttagtttgcaaggccagctgtcaatccaggaagcagtcagagtgacgtactcctgtataagagccattagtccgtgggaagattcccaatggaaaattgaagcggggacgttacaaatggtattagatccttgacctagccagatttgtggtcgacaaggacgtcggaccccttaaggctggggatgattatgacaatcaattgtcctgtgatctgtaagggaaatactggctaagttgtgcaatcccacattcctcggggaaggtcaagtgtgatgattttgatactatgtaggtataagactacatagttgaagaaggcttaaatggattgatgagtacctatatcaataaggtgcatctttttttccgatgatccatcacgtgagaacttcaaagttaagcgtacttgacctggagtaatcttgggatgggtaatctagagtaatcgtgtataagaaccattagtctgtaggaaaatgcctaatggaggcttgatgtggggacgttatagctcctgacctaaacttggaccttgacccccaacctatacccctgcataggacctaaacttggaccatcacccgaacactagactcaaactttggctctaatacttgtaccatggacctgaaaccccgaccaaaccccgaacccaaggtagaaatttccaaaaaaatctgtcagtagtccctaaagcaacattagttgaagtagatttgtccccatgaaatagtgaatatataagtcagttttaaaagaagttgttgcatgaattgcttttaatttcctacatgtattacaatatataattgttattctcatggttatctgttagttaaattaacttatgttgatggtgtcttcaagctaagtttttaagccatagaatacaactaagttcagttctaagcctttaaaatttgtagccctatgtatagaactgattgatattagaatattttctattttaagaatagaatcaacgaattaatttaagataaataaatctaatttaaacacaattaattggttgatattataaattttgtcagattacgatttactaaatatttaccaaacaatttctaaagaaaagactatagaaagcaattctttcttatttatggaataatttagttgaacatcatttaaagttttgctagagtaggaaacaacatgaggtattttatatattcttttccctaagacaactccaatagcataatcaaaagcatcacacattatttcaaaaagaaatgtttaaatcaggaggtcaaacagtgggtgtagtagttaacatagtttttaattttttaaaagcaatatggcaatcacggttgaaaacaaatgcattgtcattcccaagtaaatggcacagaggccgtgaaaatttgttaaagctgtaacactctgtccaatagggacgccacgtgtgtgcaatttaataaaatacttattttacataatatataattatactaaaagtgtggttaattaaattttaataattaaaaattaaacatataaactatatgttaaaagataaatggtattaaccacggggtcctcctgtttcaaaatattcattaactggtttaatagtatttttacaacataaactttgtattcccaaaatacattcaaaatagagcatcttgtttactgggtcatgccactgcggctgatatgtacattgctactacgacctcgcactcatggctgct

SEQ ID NO: 265710 - DNA, 1054 bp, Cannabis indica
ttgttagaggcaggaatgtaacagtctagctcagctagatagccgccctggtcgagatctcgtaaacgtgcctcagtgacttcggacagagggctcacccacctcgcgcccaaagcaccctgcctcctgtgaggaactacggcagtaagttcctcagtgacctaatccacgtcctcgactaggacgtcaccatctgcatcaactggctccccagcctcattgtatcccccaaagtttgggggtgcagcctcctcctcttcctcctcctcggaaggactaccaggacggacatcgccctgttcctctatctcctggacctcagcgtccccttcaaagatccccttcctcatgcacaggtggatcctgttcatcgctgggcaaggtggcttgctgggccacgtgagggtcagatgcgtcgattttacgcattatctgtttgttatgagccatcatcctttggttggatgggaaatttgaattaaaatgttcgttgcttcaagagggcggactagaacaaagacgaggatgatcctcgtgcaagagttgaaggaggtcctggtcgattcagtgtttgcttccccaaaaactcacatgggttcatctacaaaagacaacacgcgaaatgagtgtttggtcgggatatcgaacattaaacaggaaaataggccgaccaggagtagtcaacggattaaagaatgaaaatattcgacgaaaagtcaaaactcaaaagttttaaattttcgcgagtttgggcaaaaaatttcatgaagcttagaatgagtaagattaacgaaaggcattgtgcagttcaaaaagcaagcattatgaacgacgaagttgcacgaatcgttacaaaggaaaatcacagagtttctaaaccgagggttttctacatatcttctacagcaaagttaaaattgcattcacaaaataaatgtgcaaagtaagagaaattgagaacttactgaaggatcgatgtctgagttcaggttatgcaaagctgaacgaacagttctcgtgaaaatgagtttgtgaacaaatgctcgatggtatt

SEQ ID NO: 265711 - DNA, 619 bp, Cannabis indica
actttcctttgacttgtttatccgtctagatcctttagtttccttgtcatgaaatgccatagcgtttcgggacttgccatgatgtgttgtgtattctctttgaactattacaggctgttttacttatagcttcatacttgaaagttccacttcggtaccctgtgcgctttggttgctctcggtcatatattattgactatgcaccatcggtagagcctacatcatcggctgatttgcaatcgaatacatctctttcgacaaacataaagcaagtggaattccctctttttttagatggtcacgacacaacaagaactgcttacgccgttttcttactaaacaaggtgcggttttctccatcagatctttgcttttgattttcactttcgtgtattatattagttggctattaaaattcttaagcaccctttttggcttgccatttttgaggacattgcaatggtttctgatagttcaaacaaaaccccatctggtctaatttaacaaatgggttactaaaacaaaacatcgatagagtactgatatgtgcacacaaaatatgtattaaaatactatactcagtaacgtgacaataatttctactaatctcatctaatta

SEQ ID NO: 265712 - DNA, 538 bp, Cannabis indica
cttgtttttcggtagcccatcacgaaagaactccacagttaagcgtgcttgacttggggaaattttaggataggtggaaacactcgtgttggtttgtaggttcagttatcagtccatgaagcaggcagagtgacatactcgtgtataagagcccaataaagacttgaagcaggaatattacaatataaataaatttataagctatatatatattattaagatatgattatttttatatatgaaagtattataattttttttaatatgtgacttaaaaaatatataattaattacaatttagaagatatttttatttataattagcctaaatgaagacttaatttatatataaataataaattagagattattcatgaataaaatatttttatataaaaattctaaaaataatatattcaagaataacatctaatcttactaaacgaattaatatttttttaggtttattttatatggggtaaatactattttggaccctctgttttgtaaaaattactaattggaccctctgttttgt

SEQ ID NO: 265713 - DNA, 552 bp, Cannabis indica
gaatatacttgtgattacaataaatttttcttggcagcagattactgttccaaccgaggactgggcttgggatcgcttagctcaagcacaataccttcaaaacactgcccctcgggaatccagtgaaggagcatcccgaggtaatcaatgtggttggtcttctactgtacttaggactgaacgtaatacattagtcaccttccaagactcctgccttaattttatattcgaaattcccttcttgtggaccgcattgcttataagtttgacagctggtatcctagattccacgtccaagttaactatcacgagtcatattatggtatagatcaatacggtactatggaagataggacaggtcacatagatgcaagctgagatttagaaccaattgagccttttgatatattcaacagtacaagctgtagggattttagtggatattatggtccagctctatcccttcatctagtgatagctttccttctagtgattttggtaaatcccttaggtggaaaattatatttctccctttttcatcggcctttttaa

SEQ ID NO: 265714 - DNA, 544 bp, Cannabis indica
ttccaactgctcaattttttactcaccatactcaatatttgcctcctactaatatacctcctgttgttgataatgagcaaactgatacttcttcacaaactgctcctttgcattctgcaacatcgggcagcagctcatctcagcaattaaatacaaatctgcgagcttcagctactgctcctatgccacataatgatgtatcacaatctccacatactgttgctactgttccagcaagaactcatcctatgacaacacgatcccaacatggcatctatactgaaaccacaataaatttctttaaataaaaataatttaattctaaagaggaaagtaaatttataaataattaaccaaaaaaaaaaaaactaaataatgtttatatatgaataccaaaaatactatttttagtgatattttcactaatagtccaaacaaaattactttactaaaaaataatatttaaatacaaattgttattaatttaattttactcacaatatattattaatacagtagaacctctatccaagaatacacttgg

SEQ ID NO: 265715 - DNA, 401 bp, Cannabis indica
aatattatcattcatacacaataagaatcaaaccatcacacattttcataagatgaaatccaaactactactggcattttccacgaataaaaatcagtatatagatatttggtaatataaaaccattataccaataatagaattcacattcatttaatcatataaataatatataaaaaacctcataaagcaaccatcttcataacatcacagcctaatctggcaagtcgatgctttcatctgataatcttgtattgcattgcctaatcaagcaggcccgtcccatagcctgacacccatatgtcgcataactacatcacctaatcaggttagcctgtgctaaaaacctgcacccatatagcatataattgcatcacctaattgttggaaatttattttac

SEQ ID NO: 265716 - DNA, 740 bp, Cannabis indica
tcatcttcttttggtcttttagtgcatgatgttcgtgcgttgcttttatctttagataatgttgaattgtgttttgtcaaatgatctgcaaacaagctagctcactgcttagccagagattcttgtttctctccaagtcgtgtacttcagttggagaattgttcctctgaagcacgttctattatttttaacgatttaattagttaataaagataccgatttgaatcacaaaaaaaaaaaaatagtaacttctttatatttagagaacattattcatattactttaaaaatattttattaatatttttatttttaagtatatatatatatactaatattaatagtatatataaaagtaataaatattaaatgatacagagaataaattagagaaactaatatagaagtaaagtaaaaaaaataaaaaaaaaaaaaaaaaaaaaaaaaaaaaaaaaagaagaaattttgataatatattttatagaatatagtagagaatagagatgctgatacgagtgtttaataagaagaaaaatgccaaaattatgtagcggattcttcacattttacaaatgcacaaactaaaatggaaattagtggtccagtagttcaataatgacaattctaaaaattaactggatttggtaggatgaatgaaccagaaccagcacatgccgtagattaaccatagcaccaaattaacaaaccaaaagcattgattacaacattctaattaagtc

SEQ ID NO: 265717 - DNA, 226 bp, Cannabis indica
aattctaaatatgacgattgtattcattgtctgtgtgtagattgttgtaatgtatctaaatggaatattacaatgattaaggaccatgtgtatttacgaaatttcaatagaagttatactaattggtattaccatggcgaacatttacctgatgaaaatggagtgagcgataaatgttttactcaattttagctgcttttaatgatatcttaccatttgccaactg

SEQ ID NO: 265718 - DNA, 782 bp, Cannabis indica
ttagtgatcttatcattatgtaaactgatttggctttctttcttgtttttgggataaaatatgaaaacatcaagtatttgtaagtatggtaccaattttagaggcactatactcattggtaatgagcataatgtcatacaatttaaatatcctaatagaaataggagatattatcaaaccaaacaagttgtgtattgaattaaaaacttaacacagataaattaggagtactattaaaaattcggataagaataatttaaaaaaatatatgttttaaattttgtaaagatatttgtactacagaaaataaaattttcgtacatttttgagaccttatgaaattaaaaccctttcgaaattttttcactcatgcagatagaattcatcttataaaatagtatcaaaagaaagctattttgtaaagtaatatagaagtggacaaggtttagaagtcccattttgcaaccccatcaaagcttaatgttcatacttgaggaagtgtaataagacattagtaagtactctagttagcaagtaaaacattagttgcattctcctttgaagaattatggagtttttgactatgttaggtatagggaaaaaatgtggaagggatagaaaataagtttaaaaaattgtggtagatccttattatttattcttctcagtgtatattttcatgttccttctgcatctacactgagatgcctatttacccttgaacctttatactacaataaaatcttaatataattatttctatattttatattacatatgtt

SEQ ID NO: 265719 - DNA, 1723 bp, Cannabis indica
tgtcggcttagtttcgttatagtatcttatttgtttgaccattaccatttaggttgtgacgctaagttgggaagaccaacattgaatatctctttttgatttggtattgtttacgtttttttctgctccatatcgaaggtcattattatttggttttccttggaaattttactgattctgttcttctctttctcttgttcattacagatgagactgcaaagtgggaaaagataacatacgtgggcattgtggggtgcaccatttttgcaatttacaacttatcaaagggtcacccccactacgatgagcctcctgtgagtttacttctttcactttatgaactttcttgttgctgtacttgtcactttatctgttcatatattggtcagttgaatcaatgttttttttcgttttttgtaccaatggagatctgtataatgaagctcttttttattatttctttttcttccattaattgaatatttacactagataaataccatttaccataccagttacacatttctcttattttaaggtgtaagtcatagaatatatagtttataaattgatttgatcaattttgatttgcaatgtctatgatgcttattgaagaaccatttttttgcgttatacaggcttacccatatctgcacatccgcaataaggagttcccctggggtatgattttgtcatcgttgtttattcagtactcattttttctttactgtgcctcaattcccaaatgtgggaagatatgcactgtggtaacatgaagcttcattttgtttgtttgttaaatagtgccatatacgctagaatatttcaacaatgcacttatttttattttgtcatatcaggaatttatgttcattttttttatttacattgcacggttgtactcacatcctcttaatatctgtatgtggcatcatattgttgaataacaatgtagtgttgttgtttatggattaaatttttggtaactgttaacagtatcttaggtgataaacattatgtggattgtttaggaggtccactctccagttgaaagatactagtgatcatgcctataagagtgatgttatttaagttgattattttggtgttaacaagttgtgctcccggataaggaacaatctgtagattctaaaacacgattcttgtagatttaaaatgccatggtttttgtgtctagtctgttcatgaatcatatggaaaatgctgtagattctaaaagtctgaatggctggctgaaatgaaggataattcaggatattttgtgcatatattaatgcactttatggttcatcattctacacgcatgtactgcatataccagttacttgtatacttgttttgttatctatccatttaactaagatatcttcatagcaatctccataactcctgttttcggtttgttagctttactaatatctatatttgatttgttttatgttgcgcaggtccagatggccttttcgagactaagaatcaccactagagtaatttttggttcatttaaaagcgattccatgtgaaactcttttgattacattgtttgtcagataaattggttgactttattgcaaatttctttggataatttacttgctctgtataatgtatggttctggattagagcctggcaaggcaatcctttttatttccttcctgtgaaggatttaataagatgaagtggtgaactctctattttctg

SEQ ID NO: 265720 - DNA, 775 bp, Cannabis indica
tatatatacatatgtgttcatatattcaacatatcatatttgtttatatataaatgctatatacaaatatacacatatatacatttcatgtttatatatatacataccgtacattttttttaggtatatatatatatatttatacatgcattatacattctgaatcaatacattcatatattaatatagattgttctaagcatgaaaactcattttaaaaaaacaaagaaatctccaaattttctggaaaaagtttttcggacccgaaaatttttggtgattttaaagtctttattttacgtattttcgatgcatgaaatctatatgaatgtcttaatttttgcatttagattcatttggaattaatttggagtcttttggtcgtcgaaaatgcaatttctgatcgggcttgggtcgggtccgttggacccgcgtgactgaaaaacaggtcaaaacgacccagtttggcttaggaagatggcccaaacaacgtgtcgttttccacttagtggaaaaacgacatgtcgtttttcatgttatattggttgttgtcgtttgcccaaacaacgtgtcgtttttcgtagttttgggcagcccttcagggtaaaaaacgatgtgtcgtttttccctctgtgaaaaacgacaatgtgtcgttttatacatgcatttttagcgcccgtcaaaatggaaaacgacgtgtcgttttgctttttgcaaacacgacatgtcgtttatgctctgcattttcccaaaaaaaaattccgaattttttata

SEQ ID NO: 265721 - DNA, 631 bp, Cannabis indica
ataaattaaactaaaaaaatattatgtttacttaaacaaatctacattttttgataaaaacaaaatatgttcaagtttgttcgacctttaaaatttagtttttacaaattatatttttaatatctaaatgaattttttaataaaaaatgaataattttttatatcgcgtaattagttttaaaattttaatttatttatttttattttcttaatcattcaagataatttttcttaagatctaaattaaatttttaagatttactaaaaaaatgttaaatctttcccatttttattttgaaggggtacgattgatagttgtcaaagtttaaggggcaaagttactaattgacaatgacatgtcatcatttaaatgaaataattagacgtaaactaacagaaagattaaatttctataaatgtaatagttcaggggattcctaccaaactttatattttaggagccaaaattaatattatcgaaaattgaggggaaaaattgctaattattctaatgtataaagatatatagattgatacatggattttatgtgtaccccacattttaaagtttttagaaataaaaaattattatctcattgttaggacaaagtatttcagagagagaaaagaa

SEQ ID NO: 265722 - DNA, 691 bp, Cannabis indica
tagtaaaaattctaacatggatgaaagttcaaggagcgtgatttagtacatatcaaagtttgaggggcatgatttggtagatatcaaagtctggagagcatgctttagtacataaacaattattgaaacaataaaattgaataaaattagacaaaagtccttaaatttaacaatctcaatagttcgaggggaatttttaacggccaaaaaagttcagggagcacaatttactacatgtcaaagttcaggagaaaaaattactaattaaccaaaaacaaaattacattaacacacccttacacttttatataattttgaataatttcattatcaattgtgattggtttaggatttgaaagttgttttatgtttttaaaaattaaaatggtagaggttcacataagaattattgattgattgagtattttcaaaaaaaaaaaaaaccctggtaatctcgatcccctctctctctctcagccatcttctctttctctccgataatacccaatctcaagaccacctaggtgctgtcgccgtcgtcgaggaccacagaccattgacccaagtgtcgtcaccgtcgtcgaggaccaccgagccaggcaccattgtcgaggaccaccgagctaggtaaatctcgattttaatttttttaatataattatttacgtgggccaataaaattgtgccacgt

SEQ ID NO: 265723 - DNA, 777 bp, Cannabis indica
cagtacaggtggatgtatcccattgagcggtcaatgtctgtgtacaagcaatatgtcaggaatcgtgcccgtccggaaggctctattgctgaatcttttgtggttaatgaggcattaaccttttgctcaatgtactttcgagaagtggaaactcgattcaaccgtcctgaccggaacaatgacattgtccaaaacatgccaactcgacaattttctgtattcaagcatgttggccgacccctcggtatgaggacagtcgacaccttacccatgcaaagcaagcgtaaggcggagtggtacattttgaacaattgcacagaggttgaaccgtatatcaagtaagtataaattccataaacacaaacacacaatagtcgacttcatctaaaaaattcttaacttactaagtgcattatattatatagtgagcacaaggagttgcttcaagcaaggggtgtaggcaatattgagacagtgcaagagactgagttccctgaatggttcaaaactcaagtaagccttgttgcctctcaatactcttaatcttgttctcaataactgttcaacttttcttaatttaatatttttcctgatatgtagattaatgaactacggttgagcaaccagggtgcagtgtcagatgagttgtatgctatcgctaacccagcgaatgcagcaatttatttttatccagggtgcatagtgaacggtattaaatttttggtcaaggaaagggatgataaccgcaaaacacaaaatagcggtgttatggtcccc

SEQ ID NO: 265724 - DNA, 3431 bp, Cannabis indica
attttctttttctttttccccttctttgaagtgttttatataacaccaagaacagctttaatacttagtatcttacataagatttttacaaacatttttatcctaattccaggagcttaaacaactatcagatgaactaaggtctgatgtcatcttcaacgtttctaacaccgggggtcacctgggctcaagccttggtgttgttgagcttactgtggctcttcattttgtcttcaatactcctcaggataggatactatgggatgttggtcatcaggtttcaatctcactctatgtgtttccataaagaagtattaagaaaaagaaaggaaaaaaaagtggaggaagaagaagaggtatgtttttttaaatatgactgactttttattgattttgtagtcttaccctcataaaattctgactggaagaagagataagatgcacaccatgaggcagaccaacgggttagccggattcactaagcggtctgagagtgaatatgattgttttgggactggtcatagttctaccaccatctcagctggcttgggtaattttttggtctcatctatgcattaaagaacctttgatttgatttcactctcaaaaggttacaataactttagataagaatgatacagtatatggaaaggttacaataatttttactattccatgacagctttatcttttgaattttttgtatttgtttgtgaataccacatgatatggtgaaaattctttctgattttataggcatacatagataatattgactcatcttattttaagttagctactaatatcatatgttaaatttcttcatcttggtgtaggaatggctgttggaagggatcttaaaggaagaaagaataatgtagtggctgtcataggtgatggcgccatgacagcaggtcaagcttatgaagccatgaataatgccgggtaccttgattccgacatgattattattcttaacgacaataaacaggtttctttacctactgcctctcttgatgggcccataccacctgttggagctttgagtagtgctctcagtaggctgcaatcaaacaggcctcttagagaactaagagaagtagccaaggtaagtaatcgatagaatcgaatattgtgaggcaattctatcatcaaatgattgaatctaaactgacttgtttctgaacaatatttttttagggagttactaaacaaataggtggatcagttcatgaattggctgcaaaagttgatgaatatgctcgtggaatgataagtggttctggctcaacattgtttgaggagcttggactctattatattggtccagttgatggtcacaatatagatgatcttgtttccatactagaggaggttaagagcactaaaacaacaggtccagtcttgatccattgcatcactgagaaaggaagaggatatccatatgcagagaaagctgctgataagtatcatggtacatatacactccactataattgctgaatctatcttttagattgaagtatgaaggaatataatattaatgagataacacttgcatatatggctgcaggggtggccaagtttgatccagcaactggaaagcaattcaaaggcacttctaacacacagtcatacactacatactttgctgaggctttggttgcagaagcagaggcagacaaagatgttgtggccatccatgctgcaatgggtggtggaacaggcttgaatctcttccttcgccgttttccaacaagatgttttgatgttgggatagcagaacagcatgctgttactttcgctgctggtttggcttgtgagggccttaagccgttttgtgcaatttactcatctttcatgcagcgagcctatgatcaggcaagtcaaaggtttcttccatttccatcattgcttgcattgtagtaaattggcatatttatgttaaaaacttctgggtttatgccacaggtagtacatgatgttgatttgcagaagttgccagtgagatttgcaatggacagagctggacttgttggggccgacggccctacacattgtggtgcttttgatgtaactttcatggcatgcctcccaaacatggttgtgatggctccttccgatgaggcagagctcttccacatggttgccaccgctgctgccatagatgacagaccaagttgtttccgttaccccagaggaaatggaattggtgttccattacctcaagggaataaaggaactcctcttgaggtagcttttcgcttaatctatgttgtcttgagacaattcttttcaatatccaaaaccaaaacacttaattgtatgttttgtatgtaatctccattcagatcggaaaaggcagggtattggttgaaggggagagagtagcacttctaggctatggaacagcagttcagagttgtttggctgctgcagccttagtagaacctcacggtctacggctaacagttgctgatgcacgattttgcaagcctttggatcatgccctcattcgcgaattagccaaaaatcacgaggttttgattacagtggaagaaggatctataggaggttttggatctcatgttgctcagtttatggcccttgatggccttcttgatggaaaaacaaaggtacatagtaaacagtctggccttttccattgaattgaactaacaaatattaatactatttctcaatattatgcatatcacacaatcaccatactcaactacttgaatttgaaacttaattttgcagtggagaccaattgttcttcctgaccgatacatcgaccacggttcgcctgctgatcaatatgtcgacgcgggtctcacgccacctcacattgcagccacagttttcaatgtactaggacaaacaagagaggccttgaaggttatgacaacatgagaatcaagaaactgatatagaagataagataacaatttttttacacatttcataataaaaagtaaaaaaaaatatatatatgttgacgtgatgaataagtttattgtctgtgtaaagatgattagcatatagggcaatgtgatccttcttctaatgttttaaagttgcactaatcatcattttaaaatgtagaaaagtgggccagacacaaataatatgaaatatacacatgaatagaatctctccttaaagagttagtttttgttactcaataaaacttatttgccaaagaaaaatgctaaaggctaccagtagtgcctagtaccctcctatgtgtcaatatcgctattggtctaattaagtatcgggtcccatataatttaatataatagcttttagggagtattgctagccaatcataacgtgacatatcgagaaggtactaggcaccactaatgcctaatagcaatactctttgcgaaactcgtattgaaatgtttgaccaattttctcac

SEQ ID NO: 265725 - DNA, 677 bp, Cannabis indica
ggacataaacaccatcttcctcttcctccatcaacttgtattgaatccactcaagtgactcacccgaaacctccactctccttttaaaggatcaaacaatagaaactcggcaccttgatcctccgcctttcttttcagcgtctctttgtaaaccaagagcatcttcaaagtccataaaatccattttcccataccccactttgcaaaccacatctgttaacaatctgcttctagtgatgatgcaatcggagaaatgcaggggaaccagtaccggcgtcttccatctctatgcccatcatcaatcattgcaagaccttcctgtacaatcaattttttccaaggcttgtaagtcacattgttaccatataagggtttttctttttcatttttttatgaagttaggaaagaaaatggagaatggcaaaacaaagcaaagatagcatagaaagaaaaacttacatctagcaaagtatctagtgcatctgttgcacgaccagatgtccaagagagccgcctttccacttcatcaatggtaacaaaaccttgagcctatagaaaaaataaaaataaagtgaaagtgattgtaataatcattctggctgaaagaatgactggtaattatagactgatcctttgtgctctataagatcatccactccacccttcgagctatttaa

SEQ ID NO: 265726 - DNA, 838 bp, Cannabis indica
ttattaattctacataaataaatgtatagaatatgtgtatatactttattgaggtgtgattcttatatagaggtatactttgttaacacgggacttagaaaatgtataactaattacaaacttaggtggcgtttggtaacactttttttaatcagttttttgtttttaaaattagaaaagtgaaaatatttttgtaaaacatgttctataaaactgttttcactttttccattttttaattgagaattaaaattttaaaacaaaaaaaatcacttttaatatttttttaaaccgtttttttattcttaatcaatattttgaattcccatcagacccggacctaaatccctcccacgaccttggcgctgaactcggcctctgaatcgaacccgaatagacctgacttaaataaaatcaaaaaataaaaatgaaaataaatattacagaacacacttttgttttttatttttgaaattaaaaaataaaaatagttacagaacatatttttatttttcaaaaacaaaattttacttttattttgtgattaaaaaattaacaaacaaaaatgttaccaaaacggcaacttactttctaaatttaaaactattttacatctgaaccctgaaaaaagggagaagttgataagtgccccttttataattgaattaactaaaaatacctgcagaataaatttagttaaaatataccttcttttataattgaattacccaatataccctcaaatatctatcaaattcttttcagtcttcaatgcagccacttcgaattccaccatagcaactaaacgcacgcgctctgcagtctgccatagccatcg

SEQ ID NO: 265727 - DNA, 756 bp, Cannabis indica
gggacatgttttcctacgagtttctcaggtgaaaggcattagatgctttggaaagaggagcaagttaagcccaaggttcattgggccatttcaaatacttgagaaggtcgggcgagtagtgtatcaactagccttaccattagcattatcgactgaacataatgtatttcatatctcaatgttgaggaaatatgtttcagacctgactcatctgagttacaaacctgaactacagtcaaacttatcttacgagtaacatccaatttaattcctcgacaggaaagaaaagattcttcgatactagaccatagctttggtcaaggtactttggaaaaacaacaacgtggaggaagccatctgggaataagagtctggcgtggggactcaatatccagaactattcaagttagatttcggggacgaaatccttttaacggggggataattgtaatgaccgcattttagattatggattagtaaaggcaattagcgttaattattgacatttttataattacacatgaatttattatattatgggtctcatttttagaaatgggtactagagttataatttctttattctggatattttaataaactctaggggtattatttgtattatatacgaattatgcaattttttatgatttttgctcggcaacgacgggaaatgcgatagatggccgttagagtcacatgggtaagtctaaaatgtttttcttagtggaataaatatttgagatgaatagaata

SEQ ID NO: 265728 - DNA, 3681 bp, Cannabis indica
cgtcgttttcttttaccgccactcctttcttctccttcccaaattgataactaactgatctctgctgctttttttattcagtttgtctccaatgtcgatggactcgtacactccattgttggagaagacccgtgttccccaaccatcacttcagaaatttgccgtaattactatcttctcgaagctccggtctgcccccaagtacctggactctgattccgagcccggaagagatgctatttctcagtgtctacactctgcatccccggctgtcgtcgatcagtccgttcgagagttatgtcgtcttgttatggacactcaaattgatgtttctcgcgggttgcttgagctccagtctgctcttgaaggatgtgagcctcgatttgttgacctcttcgtaaaagggttgggctttcttgttcggctagggattaagaagaacagtttcaaatggagattcaattctcctactgagaaccacccgtttgttaaagtaagaagaactttgtgtacataatgttattatgctagtttaagtattgcgaatcacttgaatatgcatactgaattttgttcatgaattgattacaaattgtgatttatatttgacttaagcaccgaaccaaagttggcagttggccaaaattaaaccttttgaattattgtttcataatactgcaagtagctcagtcagtgcttgattgttgttggcttaagtggaaattgaggcattgtgttatgttggcaggttctctcaagccgatccgaggctcaatctgaactggttcagcaggttttactgttgctagcacaccacaagcagttggggatggttgaaatttgtgattttttgagaccctttttgagttattcaatcttaaggatacccttttcggattctgcttcctctatgtttgcacggagtttaatatcatcgatggtgtctctgtgttgctccttttctcttgaggccatttctgtctttaagctgttaacagaatgccttcagtatagtctttgcacaaattcagaagtaagtgcagttgttactagagcattaatttgtttgcttcccaggagaaggaaggactggtttaatttaccatagacttttcatttttaaaatgctaataatttatttatttcttttttaaaatcttcttttagggttttaggaatttcatttatttcatggaacttttggtggatgcacatgttgtggtgcttagacatttggctggacaaggattggtaagtttaactttgtaatggagacattttcatcttgtgctgtgttattgtattcccttactcttaactcatattaccatgtttgaagcataagacttattatggataagcttccaagagcttttgttttcattcatttatcaaatgttgtatcctttcttggcagctgattgctgaggctcaactttgcagtttggaactgttagaaacacttctttctgtatgttcatgtcataggtactcctattggattgagcccataactgaggtctccaggcgtttattctctgttcagaaagaacttgggtttcaatacatgcacaaattatcttcagctactttatccctatttattatccttattcagtcagagcttgatcatgaacaactttcagtattaaaactcctccacttcctctttaaatggaaacatgaaaatggtaagctactatccttagacatctgcacttcaattttacttataataactggaaaatctgaaaagaatataattttgctgaatgtctggaaagagtattatgttccgctaaagtaccttcttttctccaaattttctttttttaaaaaaagattaccttaccaatttaagtattatggtctaatgtgcactgaactgtgttctatttaggctgtgcttctcaagtaaatgccacttttttttttgctacttctaattacttttactatcaaactctttcattctcgtaagatctattctgcctgtcaatttcctacttctgtcgaggagaatctttgctttgatgcccttgtcttttttctcattgtatttagcttatttattcctcatttgcttacagaatctgttgctggccagtcatcatgtattctaagcgaggagctcttgttaatatttcctgtcatcagcttgttgtcatctccatcaaaacctgtcaaaagagcagcaactgattttcttagcatgttagagatactgttgatagaacctgttatatcaactaagggcaaaccaacgatggaaagggaatcgcccccaattagcacacttggatctgtcatttttagacttatgcagcatcagtggtttcaggttttcccctcccactcgaaaatgttaatattttacaagtgtcaatttttggaaattaagttttgttattttattatcaaactgttgtgctcgcagacgtgaagttagaacttcttttctctatttatttcagttcttacttatgttttttttaatgagaaattaaaataagggaagttcattatgattgaagcttaaatgaatatttttgttctgctacaggatcacaattcatcatccagtttctttttaagattttcttccagtggtgaaatcgatgacaaagaaatacatgatctaccaagattttggggttctcaattaagacattattgtttaaggattgttgatagaagaaaatccattctaccgcttgctccgtctcaagaagtttttgtatctggtaaaatgtttgaatacctggttcttttgtccacattcatatacctaaaattattgaatagttgttcaacttaattctttgaaagtgatatgatttggttgtattgcatttaatcttccccattatttgtttttgtagaaatgcccttgtttctctctgctattgctggtgttttgttgatgcatccatcattagggggtgttgctgtagattctttaaccgccatatccatcatggatcctaaaatgggaactcaatttttgctagcaatcttattttacaataacatattcactaagaaggatgataccagccaaaatatgttggtaagtaactcttctatattctggacttggtgctaccactggttatttcatttttcctctcagctctatgattttgatgggtagtattttgctcattcatttattctgcagctaaaacttttaggcatgcttcctgcacttgcatcacattctgggatgataccactgatagtacaaaccatattgccaatgctccagaaagactcaaaaccgtatgtactgtgataaccataatatttacttccatttgaatttatgtttgcaatttattttctcatgtcctacaatctatcccctattgctaaatatattctgtaggtttaattgtccttttcttcttttgtaataatttcattaatttacttaattttgagtttttttttaatttattttccagaacattatatgcaacagccatacgtttgctttgtcagacctgggagatgaatgatcgtgcctttgggagtttgcaagtaacatcccgtatttctttctcttgattcaatcttctgggtttatgcataatgttctgttattgtgaccatttaaggcacaaagtagacttgactaaaccaaaactaatgctgttggtttctcttgctttttgtgac

SEQ ID NO: 265729 - DNA, 4945 bp, Cannabis indica
tgatattaagttacaccaatagcgatattacacatcagaaggggtggataagattattattaagaataatgctatgttttgtggtttatacagatgtgttctttccactcctttagttactgttgttttgttttggttttgattatatactcttaaagtttattatattgtgtaattaaagtaaaagtaactaaactaaccttttttgttcttctaactcttcatagttttatgcttgaaacttcatatgaattggacactttgggttaatttgaatttcagatttctaccatttgaatatgttgtaaactgtgtagttctttatacccttgtgctgtggatgcctattcattggaaatggatgcacctgttaaaattgtgtttagtgatgtagacaacttttttcttaactttttcattgggtatattccgttaaaatacaagaatttgttaaaaacacaagaaggttaggttagatagacatttatttaataggttaaatactatttgattttatttcttcttgttatttaagcttttgagtgtttattttgcttctgttgtatatctaatcttctttctctttcatcaattaaagtttgtgagaaccattttccaccttttctcttacagcatttgggcatgtgtttctgttttcagggatggaaagtggtttccccacaaatggcactatgtctatattgtgtggtcaagggacatgcttgctttccaagacattaacgagacagatgtcttttaaactaaaatcagaagctatgaagtttgacctttgccatggtcttgtttcgcatcagccttttcaggtatgtaaggaaagaagatcagaattttatctttgaggaatcttgtacattattgtgtttgtgtttgtaaccacggttttcctccgccataagtgagggttctcctctcaatatacttgggaggaggtcactcatggacatgtggcctctgtctctttttcaaaagtatgctttctctctaatcttttgtccaaaaaaacaaagaaaactttaggaagccccaagtgaacaaggataatgtctcagcataaatatatttatgaactgaaatgggatttaatgaatacgattttcctgctttgaactgaaaaaaaccttccattctgtaaagcctatgatacctttataccataacaaacaaccaaaagagataaaggttttgtttgtctgtgatcacattttaccagtgttgtcatactgtcacccttaccaatgtcaggaattataatatttttagttatttaagtatgatttttgctctttgattactaggaaaatgtagaaagcctggctgggagagtgaaagctctaatatggtattatgaagtgtaaactcacaaaagcttgctgattcagacttgaatggtgaacttatctaaaagcatatttggggtgcaagtcataccctcacaaaccaaccaacccagtttttgtcttagtcctggctcagactttttctttaaaaaaacaactctcaagtggaacttgtgagtagtgtttcatttttacccaactacttctgtaaatattttctcattgatggaattgaccacttccaatttcatgcaggttttgacttgtaaggaactctatgttgggggctcttcacataaaaggcgcactttaagttattcaaaatgctgtaagtgaaggcatccttattatgcaatttaagcattgttttttttttcagctccatgtgctagtgctctgttctgttgatatttttgcttttgtcacttcagaacacaattcattatgaaattttaagttgcttgtctactataaaccaaaacattaacatacagcatattaaagattgtgtgaaattataatttcatttgccgaaaacaatgacccttggttgtttgtttcttctgatagtagcacgtttaatgtgccaacctgtttcatttctcatcatagctgtgatgattgctctggctgcaaatcagttgaattaccaatgattaatactatttgagttgcagacacaactaaaaaaagttacattttatgctactcgtcagcaaatcccccattttgttcttttggtggcttccttaggaggctataaaaagtaattctaatgtgttctttactaatagcttgaaaccatattgttacttctgtactgcataatcataccaaagtgtcattgtgattttttatttccctttagtagtaaattatactatattgctgtgtggttagggatgtagtttgctctcacaaggtctggtgttcaagttcttgttacatttttactacttctcaaatattgtagggatatgaggaagcttagtttaagaaaatactgtaatgtagttaaatagtttgatttaatacaattatctgtgttgctcctcttaacaattttgtacttatcaatactattattattctccatttcttatacagccgctcacaatagatatcattccattccaaggaagcatgacattgtatcatggtgttattctgataaacaggagaaacctaacataccactttttgatgtgacaatgaaaaaacaagataagatccccaggcatgtaattatgagatctgaacttaccggcacgggcattcctgaggctgcttccccattaacaggtttttttctgataactttgttttggcgcaatttcctgataagaacctgctgccaatttcttaagcagtagcaaaataataacaagaaccaataaaacagtagcaaaattaggaattgtatattgaatgtatgagatagttacaattgatgggagcccttaggctcctttgatgcaaagagtgactactcataccttgcatatcattctattctccactcaataacattcataatacaatgacagttatacccttccctactaaccacggtgtcttatcatttcctttttacaatctgtagttccaattctcatatgttttcttactaatattttcgtaaaatgcagatataagtttgcgctccaaagttcgaggcatttgcttctatgttgttacttctgtagttgcaattttcctatttgtggtgatgctggtggaacatccttttgtactcttgttggatagataccgaagaaaagctcattattttattgctaaaatgtgggcaagttcaacagtcagtccatttttcaagattgaggttgagggattggagaatttgccttcgccggatactccagctgtttacgtctcaaaccatcagagctttctagacatatatactcttctcactcttggtagaacctttaagtttatcagcaagactagcatatttctctttccaattattggatgggccatgtttttgttgggtgtgattcctctaaagcgcatggacagcaaaagtcagttggtatttctttcccttttaatcctaattgatgatgtagtaaaagtgcgaaaatcatttgttctttaaaccgatatttagagtttcttcgaactgagtgcccatttttttatacatgtaggactgtttcaagcgctgcattgatcttgtaaagaagggggcctctgtatttttcttccccgagggaacacggagtaaggatggaaagttaggtgcttttaaggttagattatctctgctggttgtggttgttcgaaatttagaaacattcaagatatacttcttttgatgatctgtgaaatacatttagctgttatgagtcactgattattttcagagcaagatatacttctttgcacataactttatagaagaggataaaatggtttagagattcttgccattttttctgaatttattttcttccatttatgttgaaaatgcagaaaggcgcattcagcattgcagcgaaaaccaaagtgccagtagtgcctattacccttatcggaactggtaaactcatgcctccgggtatggagggtattttgaatactggatctgttaaagtcattattcataagtccatagaaggaagtgatccacaagtactgtgcaatgaaagtagaaacataattgcaaatggccttctcagtcatcttgcctgagatactcattcactcactctttttgtttggtctgcatgacttgatgctaacctcaaggtgagaatctgaagttagttcctaatggtatattttcgtcttggtgtctgtggccggtatggtcaattttggttttgtaagactagtacagttcgttttgtttttgtatggttaatttagtttgaattgtattagttttgatagtgtaacgatattgtgattatgttcataatgagaaaatttgcggctaaacttcgtatgtttcaattgttatacatttgactctttttttttttggcaaaaccccttcgatgtatttcacattgacaaatgaactttgttgaatcttcaagaatatgaacttttttcgatctgcttgaagtgtgtttgctttctcccgaaataatacttgaactattttctcccgtaggcttgcactttgttctcctcctttgtagaattctttgaagattaaagacaattacaaaaagattaaaacatcagaggtatagctgaacaatctaacctctaaacaacaacaacaacaacaacaaaaaaaaaaactcttttacacaatatgaaatgagatacaaaaggactcaatcaatcctagtagccaatatgagaatttatagtcaacatattatttttttttattttaaaaaaatcacaattatttattttgtttatataatggaaaaaaaaatcaaattgattaaattattataataaaattattttttaactactatattttaaaggatatatttgtctttttatttcgaatttgataaaaaaaaaacgttttaattttccaatctcgtaaattttaagtaggaaattacactctgtactctttttatattgttctc

SEQ ID NO: 265730 - DNA, 529 bp, Cannabis indica
atttcgttgcaggtttttattcaattttttaggcagaagcagttgctttactaagaggtttgcagtgagcacgagatgtgggactaccagttgaaaggtttttccaaattcactatctctggtctcagctttggagagttggacactgtagaatgaattagggttattttttctaatattaaaattttattgtctagctttcttggatcatctctctcatgtcagccgcaactttaatatagaggtttataaattggctaagcatgctcttaaaataaacaatgaactttcttggatgaaaaaaacccacctcttgtgtaactttcgttacttttgttattttaacttttatcgattacaaaaaataaaaataaaaaataatactgccaaaaccaagagaaattagcgtacctaaattcaggttctacatagcatagaaaaaactttatacggtaagagctcatatggtacgttatattaggtcgtattgtattgtattgtattatattaaattggattatatatcata

SEQ ID NO: 265731 - DNA, 719 bp, Cannabis indica
agggaatcatgctggtggagtccatgagtgagtaagaagagtttgaatctgcttaagctgggccactgatttgcattttgtcaagaagaggaattaggatttgggataagcttgagttttgtatgggtaatgttggttttaacatttaaagcttgtggagaaaaagctaggagagattgatcattctccaaaccaaaggacgattaagtaagttataaaccatttcttaataaactcatccataaatttaaaaaacttttttattataaatttatgacagtttgagtggaagctatcccaacataagcttattaattagctcttatttaggctgaaatattaaatattgtttttgttgctttcattaataatcctcactattgtaacttcaaagttcaaaggaaaatgagtgtgcatgtttaatgttaataagagctaaagtaatcccatcaccaaacgaaacaagattcgtagaaagttgtctctaatagaagcaaatgtggacttcttttatttatttattatttattattttttatgagaattagaagcaaatgtggactttcatagttgaaatactagctctcttttgtttgtgaaccactcttccaaaaaaagatggtccgtggtctaaaattatagaaaacatgtaagaataatttttatttaaggaaatctatttctatataaagaaataaatttctatttaaggaaataaa

SEQ ID NO: 265732 - DNA, 706 bp, Cannabis indica
acaacacgttaaaagaattttgaaatctatgtttgagcattatttgtaattttggatttaaatgaatttgagtgggtttaagcttctaacatttttgatccgttgatttatgttattgacaaagcttttgagtgttgatttgatgttgatttcaatgtttttacttcatctcgccagaattaatgatttttttttcagttgttttggtattgttgtgatggtcctggccgtgggtttgaaagatagaggacttgtttgtgatttacggtatgtacagtataaaagaaaaaaaaaagatcagggtaatatttttgtaaattttgccgtgtgacaatataaatataaatcctacccccaaaatcctgtatttttgtaaaaaaatctatttatatttgatattaagaattttattcattggattaataatttgtgataaattatatttgtaaaaattaaatatatgataccaatcatgttgatcaacatgtattgtaacataaatatagtcgacatacgaacacaacagatcagattaaaattgagatttcttgatacgaaatataaatgagtctggttaaaattaacaaataaaacatgtcaatcgacatacaggaacacgaatataacatgataacacgaatttccacccgggttggaaaccaagagaaatcaagaactctctggagtttactaaggcatcatcaaa

SEQ ID NO: 265733 - DNA, 802 bp, Cannabis indica
acaaagaatgattttttttttctttgattttctttttacattacatttgtattcgagttatattatttttatagtagtatttttttgcaaatctttttgtttgtatttttttttttcaaaaaataacattgtttttactttgttttaatatagcaataatataaaaataatgtttaaaagtttaaattaaaaaaaaaaatttaaaaaaaatgtacataacacttactagttacagggggcggccctaggcataggtgggctaggctcgtgcctagggcccacacttttcgggggcccacaaaaaaaaaaaaaaaaaaattaattaggcttttatttaagtaaaatttaagtgtattataagctacaaatatttatagcttagttggttgaggtggatgacataatgtcgatcatgggttcaaagcccataacactcttcttttatatatatttttttatatatttttaaaggccccaaaatttaattcgtcttgggcccatatattttcagggccggccctaactagttaccaagtcaaaataaaaaaaaaataggcttttttatttttacacttcaaaacaaaagcccctattgcaaacccaaatgaggcaattacattgtatacccactttacttaacttgttttaatttttacctctattttttatatttttttttagatatacctatttttatagatgatgtccctattagaccttttaagttatgtaaattataggctagacttaagtagagagtaagggtatattagacaatctactcaaaaaatgggtatatttt

SEQ ID NO: 265734 - DNA, 778 bp, Cannabis indica
aagaagagagtggggggaagcttgcgcttatctcctccggccaagaagtctagaggcggtgagacaactttgtccagagagaggacactagccaaagaagttattgatcttttcgaggagccaaccgtcgtagacccttctgctttgaaaataactaagtccaaagactctcgaggagggatctcagacaggcccgagcagtcaaagggcagatcctagctggtcaagagcggataagcagatccgggctcctgccccacctctagtactgcatccagagactaagagaggcaaagatatgctcacccattacatgactcggtcggtccttgaggtgaatgagcaactggctagagctgacaatgacctatctctagagctggtgatgggaggagtcttgaaggagtttatgagggtaagtctttcttgatagtttccttttatccttttttactaggcttagattttaatgttttttctttgtgaaaaccggtctgaagatggcttatgcttattcccgagctaagttgggtgcgtccaagaacgctgccatgtctaacaccatgagggcggaagtagacttggccagaaaggatgctgataaagccagggttcagcttggagctgtctgaatggagctgggtgaagtcaacaaaaaacttcttgccgccgaaaagaaggtggctgagctgactaaagacctccaggcttctgatcaacttgaagctgccattgcctccttgtcaaaagaagtgaacagtctccaagaagaaaggga

SEQ ID NO: 265735 - DNA, 684 bp, Cannabis indica
ttagttgaaagttgttaggctcgggtttgtgagttgttttctaacctatttaaacaccaattgttatatcatttgtaagtaagagagagttcatgtgagtgagagagaaatcagaatagagagtagagttgaagagagtcaaagaagaagtcttttgaaggagaagaaccatggtactcatggtgtctcaatattgctcgatcatggtgttttgagagcttatatctctctgtgtgtatctctgattgaagaactcttagttggtgtttgtaaacaacattacatagtggagaaactccttgggggagaactggaataggactcacattgagatctgaaccaggataaatttcttgtctcaactttttatttttctctatttttatgctttgattttgtctaatttttgtgcattttgttttttggttttgtcatctggcctgtgtgcaatgcaatgtgtttgtgtgtgttgagattgtgttgtagggatttataacactcttaaattatagagggtaccagtggtgcttagtacctctagatatgtcgctttgtgattgggggtagcaatacaagttattacattaaactatacggaacccaatattaagtgtaactaatagcaatattgacacataagaaaatacaaaataccatttgcatcttttagtatttctcaaatta

SEQ ID NO: 265736 - DNA, 548 bp, Cannabis indica
ttgaaaagatttctgtgtgacagtatttttataaaagttaacccaaattccagtatttatggaagtgtcccaaaattatatcctataaatatatagttggtttgtctgtcttctttgggtaccattgaatatgaattattagactattagtctattagtcttttgtcaccatcatcactgatcatcaccacttttattttttagctttttaatgtactatacgaaaaaatatcgtagataatattccttaaaatattctttgctcattgtcttgctttttgatacaactagaagattgttgtagctgcatgtgtttgacttaagtaattaatacaaaattatatttcacatccattcgtagctcgaccgagttaatcaaactaacacaatcacagtaatagttgttggaacttcttctcaaagttaataaattttaacaaaatgagagtatcctaatgtgtataatagaatgaatcgtatgtggaatataagcctttatttacaaaagtatataataaagtttaaccttagtactttgggataaggct

SEQ ID NO: 265737 - DNA, 601 bp, Cannabis indica
ggtgaagacgactcgtcaaacggatgccggccaaaaaatctattcaaagtttgaaccttcaaactttgacttgcaatctcgagttaacggtagcaaaaggagcagcgccgctttgattgaggtcaccgttgagtgagaagtcaatgctctggtgcgtgggttcagtgttagccgaactagggtcgccaacgattttaatgtgtgtgagagagattaagtgagtgactataggtctctattttttattttattcttttgaccaaagatttacaaattaataattataaagcgtcaccttataataagattagtattaaaaattgagcattgctattcgacaccaatagtacctagtacttttaggcatatcaccttacaattaattggctagcaatactctttaaaagttattacattaaactatatggaccaatagcaataataaatagaagagtgttaatcaccactactaccttttaacatttctcataaaaattagttaactttggtggcccgtaacaacttctgttgcgctctctccatagtaaattaactagggaaatttgatttttttatgcttacatttggttaaacttttttt

SEQ ID NO: 265738 - DNA, 1248 bp, Cannabis indica
aattaatttactattcttttaataaaaaaataatattttcgcatcttttatttctttcttgctcttatttgtgtcataaaatgttatttttattacaaaattaactcaacactacaatattttcaaataaaaatacattacattaatttcataaaaatattatataaaattaatttaattttctatttttacactaacaaatatgtatttttgactacttaacacatctctcaactagcttatttcctagcaattcaagcagatagaaaaaatattacaaaggtgaaagattaaatcaaattcggcaaaactaactaaaaaaataaaatatttataagaactctagaaaatactattaaaatctatattagatataattctaaattttgtgtgtgcgctttctaaactatattctttgtttatttgataaaacaaataatatcataaaatcttttgatgtaaaaggcctcaactccaaatcttctcgagtgatgaaaatattaaaaaagaaaggaagaattttcactcttgaagttggaaatatatatcaattgatacttgttaagaatttatattagaaattttaatgttagataaactttttggatttcattacacaccagagcacaaaaaaaaacaacatgaattctctcttttttttatagctaccaatatttacgaaataaactatagcaatttgtttattatcattattttagtcttactatatgactataattaaaatattacttttgtattatttatttacttattttaacaaaagacaacatatataaataaaaataaataatgtagtaaggttttctagcatttattttaaattgaaatcaagctacatggataagaaatgttgctctttagttttttttttttttttttgttactcttttattttcacatgtttttttagaaagaggcaacttgaaagataagaaaattaattacaaaattacataaactgactcttttctaacaatactacccctctagtaatgttatattcttaatttcaaaatattttgattttaccaactcaaaatatcaatatatgttcaaaatatcgttttctcaattttcacctcttacggaaaaataaaaacttaaacttaagattttctcaattaaaggtgttaaaaataatcttgtcatatatgtttggtttgtgtataaaatatctctagaattacttcttattagataaaatagtaccaactaatttctcaaaat

SEQ ID NO: 265739 - DNA, 773 bp, Cannabis indica
tgtcattatatatttaatattaaaaaataaaatcaaaataattaaaatttattacctttaatggcattctttacaaaattggtggggactcccttattttctaattttaataatgtaagtaaacaaaccttaccattgatttctattacttattagttattagtaaacatgccagtatcaataattacttctaaatttttttttaacatattcaaaaatgatagagcctcttattttattaaataataattcagatattatttttcattttaatggtacgaaatgatattaagtttaataaaatataatatgatagtaatctaattttttatgaccatacaaattacatggttttgtatatgttggtgctgaaaattagtttgaagctgattatatttaaagaaaaaaacaagcttagggtgtattttataccatatgaaaaatagaaggtatgatttgttatttattaaaatagagagtctgatcggtaatttttttaaaacataaagagcttgtttggaacatcgtattgtattgtatcatattgtataatattaattaatacaatactattatgttaactactcacttacattaatttgttgtgtaaaattatactatctttactataaacccgactaaaatcgcagtccttaactttggcgctggactctaagctcgacttttccaatctcgatccccaaccacaaacctcaccttagcccctaacccagacctcgaccctggccctaaccttggatcttgaacttgga

SEQ ID NO: 265740 - DNA, 661 bp, Cannabis indica
aatacatgaacaaaaaaaaaaaatttatgatatgtatttttttatttacaaaaatatttgtgcaggaaacataataaattgtatttttttagtatatttatatttaaattatagttgttatgaacttatttttcatgttatttttggttttataatttatgtatggttgatttagagttgtcgtgaggttcatttcaggttattttttagttttttctttattttttgctgaacaaaatgtatttttatcattttaaaattttacaaacatatttttgtgactaaaaattttaagccgtaaaattgtaaataaaacatatataaaaatagtattttgaaaattttcctttatttaataaacagatttattatctttttcttaattaagatatatttgtacttccttttattactattttggaccaagtgcccgatctggaccccttactgcctgaggaccaccatctaactagacacgaaccccatcctcagctgaatcgaccctcagacctagacccagatttgcacccagcccacagatatggaccttgaccctgatatagatctattttttatttgtgttttaaagttttattttttataaagaaaatatagttataaaacacttatatttttaaggctaattagcaattttttcctc

SEQ ID NO: 265741 - DNA, 986 bp, Cannabis indica
ttcagtaaaattttcctgagctttcttcttctattgatttcggaccagcctccctctttccttcttcatattttcataccttgagtgatagagtgagttcccacacacatcaagtggtatctcaatcatagtgtgtaaggctgtgaagaatccagaatcaagagaaggacattcgggctcagatctttgtgatactctgttacagacaggatacaagggttagagatctgagtggaaggagccattaatatttcgctgcacccactgtaaggtttcctaagctttatatgtgtttatttacattattttagaaattcatatttaggatgttaataacatacatggtaataagtctagatcatggtaaaacatattccaacagatagtaccacctatgctgaaatagtggataaggcactgcgggctgagggcgcagtggggtgcataatagagtctcgtgggactccgattgttggcggggctcctaaccctaggctttagcaggggaggtagtggctcgaccgctgatcagaaaagaaaggcatctactgctactagggtagaggctatcgccacagttgcttcaaaacccgatacacttaccctgagtgcctcaattggaaaaagcaccatctgggggagtgtaaagggcaggggtgctttctgtgtggcatgccagggcattacataagagattgtccctaactcagaactgaagcaccgaagactgcagcgaaacccactccagcaagggtgttcgcgataacccaagctgatgcagaagccagctcctctgtggtaataggtcagctctcggtcaacaactcttatttctctgtgttgtttgactctggggccactcattcctatgtggcggccagaatttttagtaaattggatagaccgcatgatagttatgaatcaaagtttggaaccctactgtctggcggggagttagttatctccaaaaggtggattaggtctat

SEQ ID NO: 265742 - DNA, 862 bp, Cannabis indica
aaaaaaaaaaaaattgataaaactttgtgattctaatacacgcgattttaaaattcttacctattttaattttttttaattattgatattgaatttataaagtattgattgataattttatttttttttaaataaaaaactcaattttaatttttgtctaaggtttctaaaccgcttgagccggtcctgctcctagtacacttatgtgagaagaataatgtgtgttaaaaataactgtgagtagtaattacacaatagagtaattatattccattttaaaatatagatctatttaaatgtcaagtagtatttccatatgaattctcattttcatatttagcaagcgagttaataattacatagtttcataacattaatctaaaaatagtaatatactgtaattatagttaatttttataggatcacaagaattggagaatataattaaaactctttaattacataattaccatgtaattctttgattgaacaagtacgtcaaactttataattactctgaattatactcaattttaattacacaataattttttataggggcccaacatctttgtaaagtttgcaactacacattgtaattgtataaataacattactattatccacatattttatagctggagatttaagggtctcattggttggagagtttggaactaccctaactaaatcaactttcctttttcaaaagtttgacttaaaatttcatggtaatatttagggtgcgtttggaaagccacaatgtaattggctttgtgtgtaattggaggtaattacacaatttggcatgtttgtctgaccatgtaattacactgtaactgtgtaattggaagtaattgag

SEQ ID NO: 265743 - DNA, 1043 bp, Cannabis indica
gggagttggtcacgacggagaactgtcggaaggccaagctgatctaggggcatcagtcggcggatgactccaacctttccaagtcatctgcccaaacgtgagggttccgatcgcggagaaggtactacgggaggacatcatcgccaaggcggaagataagtaccagaagtacctcgttccagaaggcccaggagcgaggcttagtaaataaggcccaggtggctgccggaaggccccttcgtactcgggagcccggtggagagaaggatccccaaaccaaggcctgcggtccaggtgccgaatacgggggctcacgatgccagaacttctggttctggtaagtcccctttaatgatacattacgtccctcctgtccgtgagtatgctagccttaggcctataggattcgatgaacgtctccataggtttaggatgccctccactcggtggggggatcatgcaaaggagtattacttctctcacttaggcgattatttaggccggtcctggatgggttctggacctccaatgcccgttcccttggactcttcagcctatctgtcttctagctggttccgtctctcggacaactatctcgggaatgatgcagccagtgttaagattcgggactttgctagggccaaattagagagtcagggtagggctagcttgattgctttttaagtgtacactgctttcacagatattctaacacaacccttttctcttgttgcagcagccgttcccatggatgagatcttggccacccttgctagagcccacagtcctgatgtttcccctcctcctacttcttcccagctggtcacccccgggaaagcttcttccagcgccaatctgaaagtggacgaggaggaggtacttcttgaggaagctgaagaaggtgaagaagagaaaggggtacttcctgaggaagttgaagaaggtgaagaagagcaagatgttgctcctgtgcgcaagcgtaaaggcaagatggtagaagaggagctgtaacaccctaactagcataggcgtattacgtgatt

SEQ ID NO: 265744 - DNA, 920 bp, Cannabis indica
catagatgcatgcatttatagagggtgttgcatcatgtaattggcttgtaaccaatgacacatgaggggttgtccacttttggaataagagataagagagtcttgttcatttgattagggagataacattgataaaaaaaattaactagtatattggaaaaaaaaatgaaatatttaaaaattgatttatgtttatttgacaacaaaaaatatttttgtttattcatgaaaaaataaaaatgaatgacacaatgatcatcaaagaatataaatgagcaatgagcagatgtcatgaaagttgtaatagacaacaaactatattaaaaatttggaacataaagcacattggttaataaaataagtggtgaaataaaaatagaaccaacacagataatttttctagtggatccatctaataagataacataatataatgaagaattggatttaatattatgaaataaatcaagatggggaaacatatgatatgtagccctaatgtcaattatcggttgagttttgaaatataattgttcttacagaaaattagaaatcataggctaagatggtggagtgggagaggtgtcactgtagaatttatgagcaaggaaagccataatctgttggcactgattaggtgtgagagtggaaaatgggtcttaacttcctctagatttatccttagcaacatcatcatttcctccagtaaaattggcaacaacttttccttgtggagccttatattttgagttgtgttgttttctttgtttgggaatctgctatggagtctgtgacgaggtggatagccattgaggcaataacactttgccatagtgtgaccattgagtccacaatgaatacaaacaagctttggtctctaagactgaacatctccaacaaactcaccagttggaggggaa

SEQ ID NO: 265745 - DNA, 967 bp, Cannabis indica
ccgttatcgatatatggaaacataagtatgtgctggaggttagaaataatttttaacgacatgtagcgacatgtaacaatgtaactgatgacatttgtgaatattttttagctacttacaattttagcgatgtttatcgatattgtttgcaatatgtgtccatagttttagaaatagtgtttagtgaagtagagaatgacatttagtgactagtagaaatgtgttacgatggagttgtcgatatctttcacaacatgttgtgatatctcttgcaatagttattgacatattttatttctgaactaattttttttcatttttgtttgcagattcaattatatttgtagttgtactgtatgatggggcttggacagttgaaagtttcaactggatattcaataaccaaaaaagtaagatattgatatttgaggttgacactaatgtacaaaaattgcatagaattttgtatgaagagttgaatatagaccctcttgtgtatgaactgaaagtagaggtgtgttacatatacaatgaaggcaataaatactatggaggttttagtgaaagacagtcaagtaagattgttcttaataatgaaggcaaaaatgagtgtggagaacttgtttccactatttgtgactaaagttaagaggcatgcgaatttaagacccactctgccaattgtgcccccatgaaatattgttgggggttttgtcctagaaatagaccatgcggtacattttaatgagcagacctctactaatatagatgagcataaagttgataatacatttgatcaaaatgatgagtttgatgatcccttttacaataataatcttggggtagatttgaacaaggatggtgatatagagttacaagttgatgaatctataaagatacctgctttgaggttagaactacctccaaggtaaccagagttgcagagcaagaaagaagaaccccttgt

SEQ ID NO: 265746 - DNA, 550 bp, Cannabis indica
tattataatatagtattaaggattatttattgttattgtagtttaaaatgatattttttaggttttgaatttttttttctagtataactctatttacttataacctctcaattagaatataatttacttgatcccaagtgtattcttagatagaggttctactgtataattgcttggatgtagaagaataggcttggatcgtcatttatctcaacggttagtaatcttttttcacttaatatttcagttgcagttgagtattttttttttttgttgcattccaacacttgtttcaacttgtgtataagttcttcatatttttcaatcccttgagatgaattcttcactaactttataatttacacaatttattacttgatcaaactacccattgtaaaatatgagaaatagaattacctccctttcctgacattttttgaaaattcatttatagtgagtctactatgagaaaactgtcatgcaatagttacatctgttgtgagccagctaatataaaaccacaaaataactaataatttcacatatttaa

SEQ ID NO: 265747 - DNA, 934 bp, Cannabis indica
aggacttgctcacaggtatcacaccagtatgataatacaagagctgttttcccatagcaattattgttatatctttatgaaacaattttatttcaacagggcaaagttggatggcaatgtcagacttttggattttactaacaaattggaagctgcatgtgttggtaccgttgaatctgggaagatgaccaaagatctagcccttctgattcatggaccgaagtaagtacatttcgaacaaatttgttccgaaaattatgagaaatgcttttcatgtatgacattacatagaaattttgatgttttgtgtagggttaccaggtctaaatatctaaatacagaagaattcattgatgctgtagctgaggagcttagatttcgattatctagcaaggcaaagctgtaaaatcttggtcactgactcacaattgctctcaatttggttgagattctcaatgtgtcatcagcttcaaacataaaataaaaatctgcatcatttcatggttaactaagaaataaccaaattactttctttagatggaaatatgtgacactgatagaatagtaagcaaataagaataagagaataaatgaaatgagtttgtctttgtatttcaagaagggtttgtaaatttttggaccattttgatggaggtatttatcctctatttatagggattgtaagattaattctaaatggcagaagatcgtgcctttcatatttgggtttgattcattttgtttgagcaacttctctttatcatatttgatcgtattaacatatttcaattatggcagtgtaagttcacatttgatacgttttgtttttatcaaaatcattcatccgtactttgaggtaaaatttggtcaacaattgtcttgaaaatgatcaaattgtattcacttatatgtaattacgtaattaagcttactt

SEQ ID NO: 265748 - DNA, 624 bp, Cannabis indica
  modified_base (580)..(580): a, c, t, g, unknown or other
aaatagcataataacatatataataatcaatgtatttccaaaatatacatttcataattataaattaatctcatacataaaccctaaatatttaataatccaaaatattaatcatatgcggtctttacaattatccccccgttaaaaggatttcgtccccgaaatctacctgaacaactctggatggtgagccctcatatcagattccagttcccaagtggcttcttccactatactatttctccagagtactttaaccaaagctatggttttggttcgaaggactttttccttactatccaaaatttgcactggttgttcatcatatgataggtcaggttgcaattccaatgcttcataactcaaaacgtgcattggatcaaacacgtacttcctcagcatggaaacatgaaatatattatgcactgctgacaatgaaggaggtaaggctaaccggtaagcaacttgcccaactttctccagaatttcaaaaggtccaataaacctagggctcaacttgcctttctttccaaagcgtatgatccctttcattggggatactcgtagaaagacatgatcnctaggttgaaaagtaatatcccgtcgcttgggatctgcataact

SEQ ID NO: 265749 - DNA, 3974 bp, Cannabis indica
gatttttttaattagataaaaaaattaaatataaaaattcaaatctttttaatattattcattataggtaattcttatatattgtgtatttgattgtaagaaaatttccaagaatatacattatatgattggctttgatgcatggattgtcgatttcgaaaactatggtttataaaagaatatttaaatattttaagttaattatttgatcagatttttgtttttaacaaattatttgataagatttggttgatgtaatcaaattatagaaagtggggaatttgataaaacgatgtaattaatcagtaattattgaattatgaaaagttgcaactttgaatattgcatcactgatggatggattaagtttagaattgggatatattttgcattgactgtataaatataattctacgtatatagttttctttatataattattaccacgtagaaatgaagatgatataattacaaaagaaaaaaaaaaaccatgtccatgctcaccattcctattcctaggcataccaaataccaatgtacgaccatttaaatttcaatgctcatctgaaatcttttgactttggtatttaaataatggtattgttggtggctaatcaatcatcatttcttttcagtcatattttttcctctttccataatttcatacatggtttctcatagaatcatttcaatccttatctttctacttttggaatcatttcaatgtacttgtcaataattttctaatcaaccaaaccagttttgatacattcatttatttatttattatactataaatttggccagctgtaagcatagagagtcagtcactcatttcgtcggctaaaattattgaaaatcaatagaaagaaagaaactaagttactttttgagtagttattttcaaaggattggaagttcatagccatataataatgattgaattattaggtttttgggattgtaattcagagcatcacatcgtctaaaatctcggagttgagcgtgattttagcacttttgaatcaaacccatttcatctctgaatgaatgaatgactgaagatgtgatagttttacagcaacaaaagaaggaaaaacttaacccaaactcttttccatcttatcttccatttcttttcaacttaattttcaagattatccaaatcttccaagatggttctccttttattacaaaacaaatcatttcatactgagagtgagagtggttaagttaagatttactatttctgtaaagagtaggtagatgtatctttactaaaagttatttccaaaaatattactaagtaatgagttatgacaacctttgttatcgttcatcaagaagaagcatttttttttttataaaaccaaatttcaaaagccaaaagcatataacaagttatggaagacaaaaagaaagaatcatatcacaagtaatgctgtgtgcactaacttattcattcatttaataaattaatttatttataataatgggtttaactttgcttcgtttttcaaagtgagaatgtagtgaagtgctataatgttctatatttcagactaaaacaagagagaaaagcaaaaaagtattatcccttttcaaccaattaaatgatcttccgtacattattacatgtacatgatgtatatatatataaaatatattttccccaaattatctcttacaaatgattgccttaatgaaccagagctcaccacttttaaaaagattaagtggccaagatatgatctatgcccaaatccaaggccaagaaagtctgttattttcttctttatgtattaatttttttcaaaaccacttgcctaaagagaatcggatatttgtttcgatttcatgcacagttgactccaattgtcgtaacaataggatgtcgttttaagaatcttaattagtatagtgtatgaaagaacaatatttataattgaccaaaagaaacctactattttggattattatatggatgatattatgttgtataatcctatttaacttaggataagtgtgaactataataatacgcgcgtgcacattcatataagtttttttttttcaaactaatgtgttcattcaactggtgcaataacttgtgaagagatgacttgatcagaacattaacagatttgaaagaagaaagcccaaataaataaaaggtcatattctaatgcaaattgttgagtactctcttcatccaataatacgaaaaccactaaggacattattattttggcccatccctttcccttccatgttctgaaattcttttagtgctaaatatgaaatagaattccaaaacacaagaaacaaaacaaaaaaatcaaacttttttctacagagaataactatatactctctcttcactaaaagaatagcactgtggccacttttttttttcagtttgaaaagaaagctccacttgacacatttggcgtatataatatacagcccttataaatacttggtctcaccttgctatttgagttaagaagtagactgaactttatattaaatatattttgtttgcttgcatttattaccctttttctatactagaatttaacaataaaggcaacaagagtacgtgttacctgtttgcagaccatctcaaaactcattcaggttgccgcgtccaacatttattgcactcctaaggtgaggctgccattgccaacttaattatattatcttctcatatcaagtttgctaccctttcttcaactttgactccactctgatatattgacctgaattaaaagcaaaacccggaatttactttctactcattcatactaaatttcttttcttttctttttttggtaattcaacagatatagtctccaaaagcaaaaatgatgcctgtatgcaaacaattgcaaccagcagtgcatatcccaccatgtggactgaaattgaatacctttactcaaaggcgtccaaaggacaaggtggtgatcgtgatgggggcaacagggactggaaaatcgaggctatccattgacttggcgacccttttccctgcagaaataataaactcagataaaatgcaaatatatgaaggccttgacatagccacaaacaagatcactgaagaagaacaacgtggggtaccccaccatttgcttggggtagtaaagcccaatgcagatttcacagctcaagacttctgtgacatgacctcactcgccatggaagatatcttgagccaccgtaagcttccaatcatcgttgggggttcaaactctttcatcgaacacttggtggacgataactacaggtccagatacgattgttgcttcatctgggtcgacgtcttcatgcccattctccactcctatgtctccaaacgcgtcgaccaaatggtccgtaatggattaatcgaagaggtgagacaaatgttcgacccaaatgccgattacagcaaagggatccgcagggcaatcggggttccagaattcgataactacttccgaaacgaaacccatttggactctaaaactaaatctaaattactagaagaagccattaatgaaatcaagaaaaatacttgtaaactggctagtagacaattggacaacattaatcgacttagatatattaaggattggaaacttcatcgccttgacgccaccgaagtgtaccaaaagcgaggcaaggaggccgatcaggcttggaataagctcgtgtctaggcgcagcgctgccatcgttggccaattcctccgtacagaaaccccattagcctcctctgccactcatctttccagccttagagatcgacttccagctatggccgctgcaatatctcactgaagtaaattttgaagaatgacttgacacgtgtgttataaccagtaacacacgtgtctttttaccatttttcgtgtaatttttttttatatataataacctcatttacgtactaatagaagcactactattactactactacttaa

SEQ ID NO: 265750 - DNA, 395 bp, Cannabis indica
tttctttgcctgagggcaatctttcttgaaatgccccaccatgccgcacaaaaagcatgtcttccggttgcactctcccgggtgatgtttcttgcaacgaggacacttagggtaggagtaaccctggcgtccacctctgccttggttcccacgaaaccacttactttgccctgaaccaccagatgttgaagtaactttccttttctgaccagtggtggagtcaccaccatccctaccatagacaggagtaggaaaagtaggggttccaccaacactcgaagtcactcggggctcccgaaggaatttcaccgcacctttggctctcaaagccttttcgaccatttcagcatatgaagttccttcagtggtagtaatcaccaaatcgtgcctaatct

SEQ ID NO: 265751 - DNA, 922 bp, Cannabis indica
acttctatgcagtcaagtcgcaacccatgcaaaacaacaagatgaaaaccaagttttataggttgaagaagcgctccagcaagtcgacttgctccatcagcttcaccaaatatatcctagacttccgagactattgattcttcaccacgggatttttactaaaaagggttccaaccttatcccttgacttttatactctgggtaagcattctagtcttttttctttcttttcattttcttccatgtcttgtatccattttctgatggaagaggttctattcttgcagccaacatcgagcaagcacctctaaccctgaccttggtgactaaggaagctcaatactggaagattcccaccgatgttctacaggtggatacttggtcaccacggataatcttccaaaatacgagctcattgctaggacccaacgcatcgaaccattcagtaattgcgataactgtcacgatcctccaacagttagagaagagatttttcgcaatggttgcctaggagatatggaaggtggtgaagctagatagagagtggttggttgattgggaatgagttcacccagatcccatcagcaagaaggctgaactggcagatcgatttgccgcggtggcaaaaaatgagggcactttgggagctattacttatataagaggtaaaaaatctttctgtcttacttatgctccatgattggatgtgatggctgattattttctaagtgtagatccttataggtatctgatatatgaatatctcaatagggtagatgagatcatatggagcccagagcactttgaatagccatcatagtcttataggatagatccattcctcctgatgtcctatccagattttgaggagtatagtagctttttggacagggatgatgtagctttatttgctcagggaaaa

SEQ ID NO: 265752 - DNA, 525 bp, Cannabis indica
cacggctgacggttgcactcgattacttttgattgcccatattcatttttgaggcgggaagctgaggcgtccgaggttcctttgatgcagttacctctttttgtgatttgcctataaatacccatagcattgacacataactcattttatcaccctttgctgtgaagtaaactccagagcaaaaagggagttttccagcttcaaagttgccgaagtgccttcatacgaccgctggtttgcttgacgttgcttaaacccagacattggaacctttgagtaagtttctgatttcctttatgcttttctttgcatgtgtacactttgaatgcaactatgctgtagaaaaatgcttaggaaaccctagggtttagaaacttctgcaactcttctttatcatgtcttcatgtgagcttacagccatagagcttctctctgagccgcattgtgtttgtctttcatcttgcttattctaagctttatgaaattttttgccctaactcaagaaaacttttgtgacttcttgag

SEQ ID NO: 265753 - DNA, 1142 bp, Cannabis indica
agttgccccatttgagtctgcaaatctttaatggaagatctagtttctgtcatgaattgtaacaataagtctgtctgcaaaccagaatttccactagagttttgttgctgagtctgttgttggttctgtgactggttctgatttctctgttgatagaacccgttgtttcttcggtttcctccttgattaaacccatagttgttgttttgagaataatttccaatggcttttgcttcatccattggcagatcatccacatctgtctggcacttagaaaagtgatggggacctccacatatctcacagaccacttgagcttgtttggctttcactgcaatcagctttgttagggcctcaacctgagctgtcagctttgtaatggcatcaacctctagcacaccagctaccttcttagcttgactcctttcagttggccattgttgattgttcagggccatctcctccaacataagcctcattcgcactcttcctcataaatgctccaccagctgaagcatctataagggttcttgtgtttccaaccagcccgttgtagaagttatgaaccagcatccagttttcgataccatgatgagggcactttctgattaaatccttgaacctctcccaagactcatggggagactcattatcctgctgacagaagttgttgatttctccacgcaacttagcagactttactggaggaaagaattttgacagaaattttgttgccaagtcattccaagtggctatggagtttggtggcaaagagttcaaccaactcttggctctttctctgagtgagaaaggaaacagtctcaatcggatggcgtcatcactaaccccatttactttgaaagtctgacataactctatgaagtttgatagatgcagattgggatcttcagaagggagtccaccaaactggactgaagactgcaccatttggagtatggcaggcttgatttcaaagttgttagcctccactgccggtggcctgatacatgactgagcccctgtaagagtagggagaatataatctctcaagttgtggccattagcttgatcttcaacggcacctccattattaccgttgttacctccattgtttgcagcattagcattcgcattagcagcca

SEQ ID NO: 265754 - DNA, 733 bp, Cannabis indica
aaaaaaaaaaaataacggaaacaaaaaaaacacgatcgaccatacgcgccaaaaaattaacaaaaaatggaatatgaatcttacaaccagtgcgtgaaatacaaacgcacatacaagaacatataaattcacgatttgttagttttcaaatcaatttgaatcatttttcaaaaaaaaaaaaaaaccattaacgaccaaaaaaaccttggaatacaacctgaaattcaataatcaacaaatcgaaatcaaaaaacgatttcgaatctgtctacgacttcgattctgtgttactgtaagtaaaaaacatagacaattcttattagatcctgaaaacagaaaacaccattgacgaagaaaaaagcttcggcaacaatcttcagtatttcaatcgaaaagcaacaatcgaagctgtttctcaacaacataaaacgatcctcaacacaacacagattgcagagatgttgctggccaaaaaataaaacaatggagaaaaatcgttacctgcagaaaaacttgttgactgtgctctgttcttcgcgcaaccaaaaataatcatcgaacagaaaaaggtaatctatatctttgttgtaatattacattgttaagaaatatcattacaaataacatgatcataaattttcctattcacagtgcaatttcttcatgtttatgctaaatgcaattcatcgattttttttttttccaaacaaaaacataattactgtgcaaaaaa

SEQ ID NO: 265755 - DNA, 650 bp, Cannabis indica
ttttacctgtttggctgctcagattttgagactgccgtggtggtgtcaaccatagaagatccacttctttcttaagttattattaccaggtaacctgcaccatatcttaaagcttagtcttttttcacaatatttttatataacacaaaaacacgcattttgatatatagccttccaaaactcaacattgtttttcttttttttttatattattattattagttccaaaatactagagaaaaacttcttcaatgtttactaaaagaaaaacgtaacataaaaaagtatgctattaaatcaaatgagcactaagataaattaccaagtaaattttaaaatcagtaaccaagcaagaactgcaatatcaaaactcaaataccacattcaataataacaatgcagatttacaaggactcaattttgaaagctatcaataacgagaaagaaaaggagagagaagagtaataagcaatgacacatgagctaaccacaaaattatcatacttataaaccaagcaaacagtgctcaacacttcaaatttcacactgcccgaaaaggcttttacaaacaagtctatagcctactgaaacgggcaacatacatgttagaatatgggataatgtgaatggggttccatctcaaaatcaat

SEQ ID NO: 265756 - DNA, 1536 bp, Cannabis indica
tggtcaaagtactctggagaaatagcaaggtggaggaagccacctgggagttagaatcagacatgagagctcaatatccagaattgttcaggttagatttcgaggacgaaatccttttaaggggggataattataaagactgcttagctttaatttggaaattcgcagataattagggctttattatggagattatttattaatatggaatcaattatttatgatgatttatttgaattcagaatgcatttttatgtcacatatagaaatttcataattttgcatattttgtacccggcaactttagaacgcggtgtatggctattggaatcacatcttagtattttttagtatagcgggataatattttagacattgaaaatgtcgaaaatagtcgggattttagaatttcccaaaatacccctaggtgaccatttatgacttttagtatgggtggggcaaaatggtctttttgcctattagagtttttgtcttatatcagtttaattaggttaattaaatctgatttttaagttaagttttatgctgatattatccttagttaataagattttatttcattttatcaattagaaaagaaaagaagaaaaaaactatactatttcaagctctctctctctttctctcgaaatccctagcaccaactagggttgtctgatttttcttcccaattcaagcaagttgcagcaagtcttagtgtgaatccaatccaaggtaagtttctagcaattcccagtttagttttcttgaatttttagaaatggattttgcatgattttgagttagtagctgctgtgttagttgttggtgtttgaatcatgtttctggtgttagattatggttttgtatgttgttttaagcatgaataaagagttgttggtaagtttaaatgagctttgagttttagaactcaatcttgaagccttaatggtgaaattcgtttctgtgtatgggtagttgttttatcacttggaaaatgtttattggggtataatatgcaggtctggaaagtttgatttagtttggaaacgatttggttagagtatgagatttttttggttggttttacactgcttgtaaaactggttacccgaattttgcagcagggaaaacccatttttcagcttgtcgtttcgggtcagtttcaggtttctgttggttgattccccgctagtttgggatattgccatattaagttgctgtaaataggtttttggttttaaacctaagtcccggttgtgatattagtgggttacttattcatgttgttatcaatgtgatttagaagcatataattcgccgagcagttgttccactcaggttgaccgacacacttgaattcgaaattgaggtaagattagtataatgttatgcatatgtttatacatgtttagcgtccatgttagttgtcgtcagaataacatattagggtatcgaatagagttgcaccgagataccaacagatatatgttatgcaaatctatagccatcagattagcatattagggcaacagt

SEQ ID NO: 265757 - DNA, 847 bp, Cannabis indica
ttaaccacaaaaaccgaaattttggcggcagtgttaatgttgttaggttattagatttttgtatttgtaattattagctattgggattttgttgggttgttcttgattgtaatttctaatatcttgtggggtattgtatcttcaatggcaatggcaattcaatttcaatccaatttattattttagtacccaattttcgagcagaagaaatagagaagaagaagaagacaaagaaaaaaaaaagaaaaagaaataaataaataaataaaataaaaaatatttatttataattgtttaattttttaaaattttaaaatttattttttataatatttaaatatttaatattacgtggaccattaaaaattagccacgtgtaaaagtgtgtacacgtggacagtccaccgtggcacttaactgtgatttttggacggaggggtgcagaacaaaacggaaccagggtttaggtagttatgccgccaaaatttcaatttttgtggttaactgttacaaactgtaaagttcaggtggtttagccgccaataacacataaaaaaagaagtgtatgacaaaagatatacatttttttctttaacaacactgaacattacacaaagtatatatctttatgtaagtgttgattcaaaatttagtcaattgatagtgaaactttatttattactgataatcaccacatgtaaacaacaatgataaataataaaagtaacacaaagatttatagaggttcgacactcctaattagcgggtaatgacctactttctttttaattgtactgattcagaacgcagattataggctgggatcttataattttttttttttttt

SEQ ID NO: 265758 - DNA, 514 bp, Cannabis indica
ctatgaaagtctatatttcggctaattaaaaaacggaatagaaattatttttatttcaatttttgtttttatttggttgctatagttaaattttacttgtttttaattttttccttttttgaatgatatatttttctttttccttttttttttttgagaaaattgaatgatactatttaaatttggtcagaattaaccattccaagttccaaatggataattaaggggttttggtaattaacctaaaatgacatatttggtgtgttttaaatgggaaaaaaaaaaaaaaaaaaatcaaaatgcataaattttctaatacaatttgtcgttttttcattaaaaggtgtcgtttcccaagatatttgccgttttcattttcaatactttttacagagttgtcgtttttctagataattgtcgttttgtaagagatgatataaagaggctaacacatagttgtcgtttttctagataactgtcgtttctagacaattgtcgtttctatataattgtc

SEQ ID NO: 265759 - DNA, 1671 bp, Cannabis indica
taaatataatgattttatagtagaaaaatctaaccaaaaaaaaaataatacaaataatatatgcacctgatgttaaaaaatataaactacatatacatatatagaatatgtttatggttaagaattattattttgtccctatttgtgcaaatattttataaccatagatagatctaagagtaaaaaataaataagttcatgataataatttatttctaagatttagctttctgttttgtcttttttttttttttttttttgagcgtttgcttttgctttgatctactttttttaccattcgccttttgcttgctctatttattttttgagcattcactttttgcgtcactcttctttttgtttgtgtttctactttgctttgcgatttttttaggttgcaatgagtaacaacctttcttctcatctaaaagaaagttttgtccttagttaaagagacaatgtcacaatttactttttgaaattgagagtctatttcgatctctttgtattgtatcatttttttaatcactactataaaattgacttttaccaccaacttataagtaactgtcatttatactattttccaacggttcttaaaatcgttggctatgtaactttaaatgacggtttataacagttgcaaaaagttactttaaatgacggttaagaattgttggaaaaagttactttacatgacggtttataactattgggaaagactttcatcgggtagtaactttcatcaggtagtaactttcatcgggtagtaactgataaaaaacatctctttaaatgacggtttataaccattgagaaaagtcactttaaatgacagtttacacctgttgggaaagattttagtcggactataactaacaaaatacactacttaagatgacggttataaactgatggacaatatgaagtaaaggagaaattacaaatgttattgcgattctccccttgcatttttattatttagatttccaatatacaatgaaaaaaaaacaaaaaaaaaaaaaaaaatgtttttataagaaaattcatacatttgtcaaattagagtatatatcatatgtgaagctatctaaactaacaatttaattttcaagtatttgtaaaaatggtttactaaatcctcatttcattctcctgcaaatgctcttttaaatgtgatcaataaaatactcttttagagtagagattacaagatatattttttcaaaaggccaattctctcatgaaagagtgtcctatttatggtagtactattggccccaggttacaagtggtcctaaaacctaaaacatatacttatttgtacctacaaaataagcattgcaggtgggtagtggaggtagtgatggttgggtgttagtttatactaatacatgtggatttggtctccactaccaggctttgcagaggggtggaggatcttttagctggtccctatcatgtacgttatacgaaagactttatactttacagcttcgtgcttttgcatcctaaagttcgttatgcagcaaagggtgcaaacctcattatggaacccctggtgaggagctagtagagggagatgaggctcttcttcactcattctctatataattgttacatattgaatgagattctttggtcaatgggggtcctcgcataatgggaccc

SEQ ID NO: 265760 - DNA, 1049 bp, Cannabis indica
taattctgataaattgatgcatgaataataataatcatcataatataaccctcttaattcaacatttacatatgtaattaatttcataacattttttttttatatatataattaatattaggtacctgcctcagcatgctgtccaaaccacctttgcttagcagcttggatgtgtttcatgggaacaatacaatcagcaataattgcattctttttagagaaagattattcagagtcttggaagttcactactgctttggaatttggctcttgttttttctcagtaagttaattaatctattatatacaataatcaatcttatagtttgataattataactataattggtgtaattattatatatatatatctcagggagtatttggatctggggtctcattctttgttcaagcatgggtcatatctcaaaggggtccactcttctctgctatattcaatcctttatgtactattatagtcaccattttggctgctatatttctacatgagaagatttatactggagggtatgagtataatataatttttttacatgtataattaaatatagtgattaattctttgttatatgttaatttcattcttttttttttcttggacagattggttggcgcaattggtgtaataattggtttatatattttgttatggggtaaagccaaggacataaagaatgttattaaagaagaaattcatgatcccaatctacacaaaaatactgttcatgaacagaggaaacaacataatattgatgatgactatatggacaagggaagtcaccaagttgatttggaagaaccccttttatcagaccatgccaaccaatcatttcttacatgattataatttatactatataacatataatgttaacattaaatgtaacctatattaattttgtttatggttaaagtttactgttttcaccatttttttttttggtaaattaatttcaatcaatttatcttttttatttttgaaaacttatttatttatattttgttaattccatttttggcatatttaa

SEQ ID NO: 265761 - DNA, 678 bp, Cannabis indica
aaccttcatcaacagaatacctcatgaacatcaatgaattcccctatgatgttaccaagtgcagtggcaagagactttgatttgctaaggaatggtaatcggtatacctgaacccaaaagggggtactcactagattgttcattgtgacattttgcagagactttggtgagcagaaacaactaagtggttttggaagtgccaaggttctttgtttaacacccgaaatttgtactcctgaacatccaaatgaaactttgaacaacccttcaccatattcagaaattatcacagggaatctccccttccaatgacccccccatttgatcaaaggtaagtaggcggatgaacatagttctcagtgagaattcttgcaataagaatgtggctgttgttgacattggcgagaagatccactttcagttggtaaaacaagcaacagagctctcttcctcagtgagagttaaggtggaatcaagacggtttagcaaaggatccatggcggcaaaatggtcaaaacaaggtatacaattgtagaggatgatggcagttaaaccctgaaagtgggaaaagaagaaaggaaaccgaaactgggataggaagagggaaagagaacattcaaaaaaacagttaaaatccaaaaaaagaggttaaaaagctataactgcaacagacccaaa

SEQ ID NO: 265762 - DNA, 489 bp, Cannabis indica
aaatgcttcaacaaataaccatccataagggagacgaagtctagcgtctcgaggttatattgaaaataattaaccatgtaggaccaacagtggagatcgaatattcttataactaaagctcattattttaaaagagttgtattttcatttgatacttattttaatctatttattttaacatatatttatttatttatttaatattactaatttagatgactctaattataaattttaatttaatatttataaaattatagcctacgaagatctaaaaaataaaataaaattatttttcatccttactattaattttccattaaatattatgaaaattacttaatttaagttggtccaaaattaattaattttcaactcaaatttaattttcgatgaatatataattgcattcgaaatccaatgtataaaaatatatttttgaaatcaccttaaaataaaataaaacaaaactgaaaaaaattattctaa

SEQ ID NO: 265763 - DNA, 2402 bp, Cannabis indica
cattaaattttaaaatgacaaaaaactgttttccattcttacttttaaaaacacaattttaaaaactgaaaactgaaaacacagccaaacaagctcgtaatttcttcaaacatttattttaaatgtcaaaacaaataaaagcataccaatttaaatatttatagattgcactgtagatatttattcatataatatttgtagatattgtaaaatgtatgtatatataggtacacgattttatcccgtgttgtacttttacggaatgtattccgtggtatattagatgggtctcaggtacattactattttttaaccttaattacccctagatcaaccccagccatcagatcaaataactctctcatctaacgactgccgtagatcaaaaaatacattccgtgaaagtacatcacagtgttttatccgtgtatatataataattatttgattatatatatgtacctcggagaccatgtcattgaaggctcttcccattatttccatcaaatgtttaggatcattacttataatacttcccaacattgtaagtaccatgcatccaccaaccacaatttcttctgaacgacaccttaaaaaggttctgaaatcctcttcaaattgacccaaataagctttcacaaccatttcaggacttgttttcgtaatataaatatttcctttgttatgtgcttctcctctttcactaaccaaccctttgggaaccttcaacacaatgttaaaagtcacataattaatcaattataaaatcttattaaagaaaagggaatatttcagttttatattttttttgtttaagtaatggatcaagggatactttcagaaatacttataaaaataacaaattttttacaaatttatagatctattaatttgcaaataaatacctaatgaattaattagcatatttaccttagacaaccaatggagactataagaagaatgaaagaagtgaatgaaatcattaggaaaaagcctttcatagaagctcccaggcatggccatgacaaagcataagggcttatctcccaattttccattattattatttttcaggtacttttcatgaaaggttggaagccattgattgaagactgtgttgaaatcatttccaggaagatcattgaggaacacttgaaatgtagtgaatggcttgttcttcttattagtacttatcatttgggccattattacatccaaaatgtaagatgtaacagtgagagcatttgggcctgaagagcagcccaaatcagctattctcatacattttggcaacttattgcaataaatctccaatgcactctcttccacacttgcttttactttggagatcaccgttttctatttagaaaaaaaaacatatatatgtatgtgatatatattgatatgagaataaaaaaaaaaaaaaaatgagtatctcttgcgggtaagtgattctatccgatctgtaactatatagatagtgaccatgtctactttaatacagttcaagattaatgagcaaaaaaatagccatcatcttgaggggaatattgtggacattatcctacataaaataaatgataaagtattgagcagaacatgaactactccactaatcaccaattagttttgagatagacccaatgattcttaaaatcattttatacaaaaatatatgtatttataagatgaaaaaagattgttaataaaaaatttgaatgaataattattgtgatcataattattaatgggcacatacttgaagtgaggagttgtttgcatagctagctttgccaataccactattcatgggaaaaacttgttctaccttcattttctttttctaatttgatgtaagaattgtgagaaaactaataagactatttataatagagcattgcctgattatttaattattaccacctaaaaattatatctgatggaataattaaatagaatttataacatgtgcattgcatgacaagtaattttgaagccatatatattggactaaaataatatttataatagataagagaataataagcatgtgaaaccatgcatacaataattaatttgcctactagaataatcattacaaatttaaaacaatccatttttgttatgatatcaaattaattttcagtcaaataaagagttctgaattattatataattttcaatgtgtatattataatattgaaaacaaaaccaaataggtctatacatttgtaggtgtggacttattatcacatttctccataaaactaggtatcgtatattaaataatttctcagatgagatgatattcgaatttatgagaaagataaagcttcaggtgcacattaatttgtttatttataattagaaaaataactgaaattaaggtgccgtttgataat

SEQ ID NO: 265764 - DNA, 540 bp, Cannabis indica
gagttgatatattcacttcaacaggcagcattgcttccgagccaaatgctagcgagaaacgagtgtgtcccgtggttgttttctcgtaagttctgtgggcctagagcacccgaggtagctcatcaacccatttgcctttgataacgtctaacttcttcttgatagtaccctttaaggttttattaacgacttccacttgtccatttgtctgaggcctggatactaacgagaagcttttgataattttattcctctcgcagaattcagtgaacaagtcgcaatcaaattgggttccattatcagatactatctttatgggaattccaaacctacaaataatgttcttgatgacgaagtcaaggactttcttacaggttatagatacaaggggctcggccttcgtccatttaatgaagaagtcgacttctaccaccgcatacttagctccccctcgcccagtgggtaatgttgggttttgtgccctaaataaaatccattacaatctgattagttatcaatttagaattttgaagtgattta

SEQ ID NO: 265765 - DNA, 770 bp, Cannabis indica
ccactttagaaacccaaactgtaaatttgaaaaaaaactaaaaaaaataatatataaggtaattctcctaaaaaaattggtgcaaaatttatgaaaagaaatatttttccattttttataaagtaaatagccaacatttattatataaaaaaaaataaaatatttatcaaaaaaacgaaattttaataaaaaaaatatataatttaattaagtttttttattgttagaaaaatatataagtaaatagaattacacattttaattatcagtaaaaataaaataaaaagagtgcaaaagagaatttcctagcatttttctaaaacataaataaaaagctactaagatttcggctatttttgacttttatttttagttatgatggtggtgaatgattaatgaactagcatagtcatttgtagatcttaaaaatgtgtaaaagaaaatattgtaaaatttattgaaacgtgggatgaatttaagtttgagattttattaatttatttatttattccgatgaataagtttgagattttatcatataatatatattttagctaaataattattagatcaagttctcaattttggagagacttataagaaatattatggtataagtgatattaagtattcgttggaactattttaatacaaaatttctaacaacatattaagtttagaattataaaaaaaaaaaaataaataagagtactctgcaatattaataacaaatataaattattcaagtttggtataaaattttcttttat

SEQ ID NO: 265766 - DNA, 817 bp, Cannabis indica
aaaaaaataataatttaatcaattacaaaataatcatgttcgtttttaaaactttaagtgatgatgaatttataattaaatgtgtattatctcattactcttttctattcttgtgggcttttcccttttatcagtgagttttttttaaataatgaccttatcatttaaataataattcgagagtacaaaggtgataaaaaaattatcaaatcgaggttttttagctatcatgaatgtatgcacaactaatttatgagatatcaaagaataaagatacttcaagaaaattagtaaataaacgtgtaaaatcatataatgatcgtacattggtgtaaagcattaaaaaaacaaaattcaatgcattacaatcaatcttaaagtataaatgtagactaaacaacaagcagctactccaaattcgcatctataaaatctacttgaataatgtaagagtccctaaaaatatagtatagaaaaaataagcgttcaacaaaataaaatatatattataaattaataaatctaaattgtaatatatatatatatactaacaaaacttatatctctattataaaattcaaatagaatatgtcattaaataaggtcaaggaatagaacattagtataaatagttagattcaaataagtaatttttggaaagtaatatataataattttaaaatatatataatattaattataaactttctgaattacacatattattaaataatataacatatagaataattttgttgttatataatacttaattaataattattaataatactatagattctgggattgtaaaatg

SEQ ID NO: 265767 - DNA, 775 bp, Cannabis indica
ttggcaaagtttaccagtatctgatgtatggagtatacattggaagggaccgatattgaacttggattagatattataaatttaccgtaatatccattcaattcaatatcacctagttgatcatagatcaaacaatcttaatcctgacatgattaggttcgatcgcaagagtgtttttgtcttctttgatttgttagttaagcctactttttggtcagggtgatacgtacattttgggaaaacaattgtacaattgactgggagcgttaatcataggtatggaatttatagcttctattcagacatagaagtgaaacgatgatttccttcgagcttgctaaatagagataatgatagagggatcattttagtgattatgttagttcactaaaatatcatttatatgtggccaagtgttttaaggataaaatacattaaaagggtgcaaatgtaattttgtccctatgcaatgtagatcatctatagaggatcaaatattattaggattataacaatggataattaatagtgtaactatatcgtggaacatagagagcattctatgtaactgagagtacaattccaagttctatggtggatgcaatgaggaattaataagttagtgaatttacttggtaaattctagatctgcttattggaagctcggttatataggcccatggtccccatactagttgagcaaactacttgtaagactcagttaattgatttttagttaatcaattataaattctaaaaaattagactatgtcta

SEQ ID NO: 265768 - DNA, 474 bp, Cannabis indica
acatcccaagtgtagaaacctgaaactaaagaaaataagcgtaattccattccaaaaataataaaaaagaagaaaaacaaatataaaatgtgacccaaaacttaggctaaaattagtctaacaatagtatccatgcaaatttctaaaatgacatccatctctctacaatgttatagcatcttaatattttatcacttaatatgtccacctcagcaaacatcatttaaatttttaccattggagatgctcttaggctaatactaattagaaagagaaatagttaaatgtacctaaacgtgtcatatcgttattagtacaattaaatattgaatttcatataatttaatgtattaacttttatagaatatggctaagagcatatctccaatgaggaacacgtatttttccaaaatatacatattattttaaaatattattttttttattttctctctcatccacataagatttgtc

SEQ ID NO: 265769 - DNA, 790 bp, Cannabis indica
aatgtctcatttttacattatatgggctagtgttgttccatcagttataaaaaaaacaataaaaataaattttcggcaaaaaaagataaaagaaatttgagtttaacttaaatatttttcatataaatatatttttgatataatgtaaaaatatatatattttttaatattttctttaaataataagataaattaagcctgaaaattcaaatttctattttattattttctatcagatcaaaattaaatgatttaatattttttaaattaatatttatagttaaatttctttagtatctattaatgggcaatacccattaaaaaatattctatatatatatattagaataaatagtatttttaccccccaaactttttaccctaccaaattttgccccgtattatgtactgtttgttacgaatagtcctcaaattataacgaatgcaaaaacgtcgtccttctattcacttctgtttaattttgctgtttattgacttatatggcagtattattttaaattaaaaatgatgtggcaagacatgtggatattaattttgggtgatgtggatattttaatgtaacctaaatatttttttttttacattaatgaattaaaacaacaaattaaataaattcattataaaaagataactataaacaatcaaaccctagctgtcatttcctatttcctctctcttcttcacgcacgactgtgttcttctatttcccctttgacaaaaaaaaaaaagaaatgggcaaataaaattgggcttcacgcacgacgatctt

SEQ ID NO: 265770 - DNA, 2192 bp, Cannabis indica
aatttaccaagtaaattccccaacttattaattcctccttgcactactatagatttagaattacactctcaattatatagaacgatttatatgtttcaatatatagatacgctatgaaaatttaaccatcgttctaatcctaataatcaaatatcctttatagatgatttacactaagtagggacaaatttatcgtttcacccctcagtgtattttatccttaaaacacttagcttcctataaatgatattttagtaaactaatataatcactgaaataagagctcttcaatttatctttattaagccaagctcgaaggaaatcaccatttcacttctatgtctagataaaagatatagattccatatctatgttaagcgctcccactcaattgtactatcatgttcccaagctatacgtgtgacccgaaccaaatggtaggctttaactaacaacttaaagaacacaaataacactctggagatcaaacctaaccatgtcaggattaagatcttttgatctaagatcaaccagtgatattgacttagaaagatacaacggtaagattataatatctttactaagatcaatatcgatcgcagtccaatgtatactccatacatctgatactaacatacttttccaatattctagaaagaacataacacttatccaaggtgtaagtaagcttaatcgctgactatcacatcagtgtaaatccagtgcactgatgaatcatgggacattaacttttgaagcatataatcacaattaccttccactgtgttgacatcactgtaattgtgaataactatatgttctgaatttaacagaaatcgtatacattaaaccataaacatgaaaactacatgtaaacataaatgacttctaatcttctattgataacaaatcagattatattgaaatgggttttatttaagccataaaatctcaacatatattacacatactcataataacatatataacatgttctatgctattcttacctcttttctaaattcaagtgagttggccgacctgaacagaaaacctcatgctggatggatgccctagtcacatttacataaacgggtaaataacacaccaaaaccctaatctaggaaaccccaaactcccaactaagggtttttctattggtaactaatataacaataccctaagtatcgagaaattaaccaactaaggctttgaaaataacccgaatcaacaaatcgaacaattcgggaaacctgctcctgattcagctaaccctttttacaggtcttgtaaaactggttaaccggtttgcatgagttaacccaaacaagtttgaaacttgttcaattcgtgtccaaaccaagccaaaccttccaaaacacatgtaacaacctcaaaaaacattttccaagcaatagaagcaagaaaatcacacaaaatccaaacatgctattaatgaccctagaacacaacacatcaaaactagctacaagaactcaatttcaacttgaaatgaacctagaaacttaaccacaaaccattctaaccctaacagccactacatctcaaaattgcattattaaatcaaaattaagccttaaactacacaaagattaaacctctagggttacctctaatttacaccacttggattcagctaacacctcctgaaaatcactctaaaatcttaagttccttgttggttcttgctaggcttgaagggaagggagagagcgagagtaagaaaatttgagttttttcttttttttctttttaattttaattcatctagttggtggataaaccttaggctgaagtggtgccaaaaaggccagttgccacccttaggaaatgccacctaatcctcaaataggaaataccaaaaataccctttaatcccttaagttaaacaatagttatcctgctaagaaaaaggttctaaacttacccatgtgacacaaacggccatccatcacatttttcgttgtcgtcgagcaaaaattataaaatttgcataatacatatttaatataaataatactcctagagtttaataaaatctctagaattgagaaattataactctaatgtccatttctaataataggacccacaacataataaaatcatacataattataaaaatgccaataattaacactaattgcctttactaatccatattctaacat

SEQ ID NO: 265771 - DNA, 1078 bp, Cannabis indica
tgatgatattgattttaaatgtagtggtgactacaaatgagatatggtgataacagttgttttgaagattatttttttgtatactttcttcctataaaagaaattgtatgatgattttttttttttaaaaaaaaaatctttagaatattttatatagatttattattttcttaaaaaaaattataaataaaaatatatttgaaattatttcatataatcttattattcaattaatatttatacatataatttcaaatttttataaacaattgcacgttaagtacggcatatttactagtttgtatatataaaacatacggacgtaccatatatataattcaatcagaaaattaaaatgctggacaaaatgaaatgttgatataacaaataatgctaccgaaatgggagaaacaaattaaaaatgggatagatcacatttagttaatgcataaggcaccactgatgaaactatatattttcacactatcccgacaaataaagatcaatttcatgcataggatcccaccatatgaggcctatgatgtgtgtcgtagggctgcttcaaattctcacgagaacaagaaaaaaaggtttcaatttcttaaggcttcttttgatgtcagcgcacatacaatatgaaaagtgggtttccgggtgcatgtggaaccccaattacttattgttttttcccaaattaagcactagagaggatgagctctctcgtgacattgtgctccttcaactacgtaagcaaattaggtactaatagtaataaaccccacctctctcgtgacattgtgctcgttagcttacaatgtaattttattttatttaaaatatttggtaaatgttttcaaaatatatgaataatttactatactgtaaatagacttcaaataaattatctcgtataaaataaaaataagaattaacaaatgctatatggatctttttctttagtaaattatacatgtattcttttaaaaatatatacaaaatagatatatatttttttttaaaaaaaaaaataatgcaattttattaatagtaatcagcatgagagaaacagagaagaaaa

SEQ ID NO: 265772 - DNA, 383 bp, Cannabis indica
aaaactaaaatattaaataaaactaacactacgtggcttggcacgtaacaatcacctagtatatatatatatatatataattatgggtaatagggaattatatttttttgctaactctattaaaggattatatttgatcattcagaatagaattttatcaattatttagagcttatacttatttttatagcatacttattttccctgtaaattttatgggggtctttgtatactcatatattgccatttcttctttcttagttgccaaattaatattggtgttataggtttgatgctccagtttgcatttctcccattactattctgttagttttatatttagtttcaatttaatgttcttatcaaatatgattaccctttct

SEQ ID NO: 265773 - DNA, 1753 bp, Cannabis indica
ctgagctggagcttgtttcttggttgaaatatttggggtgcccctgctattgttgttggagattgttgaagaagacaaagaagaagaatgaggagttatgatattgttccttctagatgaggatttgaaggctaaaagagccatggattggaatatttctagctcaaaatttttgtttttagttttttagccaaaaattgggtttatgttttgtttgtggttaaggattttgatttgtttgtgatattggatttagggtggtggtttagattttgtttttgcgattttggctatggtgatttttttttttattattttttattttaaaattcaagtaattaatgtttgtaacggtggcggtagttatggtggtacctggagatctgattttgggcagaagaaagaagaaatgagaagaaggaggaggaggaatgagtattggcgatgcttctagagaataagagaaaaagaaaaggaaaagaaaaaataataaaaaagaatttgtttttaattttttgtaatttattttggttttttaaaatattttttcaactattttaatattttaataattaatattatgtagaccactaaaaatatgtcacatgtacactggtgtacacgtgggcagttcaccgtggcacttaactgagaattttagacggaagtgtaaagagcaaaaagaaatgtgagtttggtaggttttgccgtcaaaaaattagtttatgtggttaaatgttaaaaaaatataaagttgggataattttaccgctaatatcccatataaaaaaaaaaaccatagtttaaaacctaataatccaacctacataataaaacttcttcaatatgcatgatctaaatttttttttttaatctcatgtatgtaggtgcaaaataagaataaaattaattaatatatattttaaataaaatatataaaattattaattgggggaaatttcaatgggtcaataagaggcccatggtgttagaaatataagaaaggcccaataaacaaatacatttaaagcccacgaaagagttggtaaagatataaagtttaaaattaggagtcgagatacgagaatataactaagaaggtaaccctattggacgagtcgaagtaatatctaagtcaaatcgatctgagataattcctatctcaaatcgtgctgagaaacacattatctcggattggaaggtgcctagctcgatttagtcttggactcctcttatctggaatcagttcgaaatatgttttatctcggagcagtttgagatatgacctatcacggtcgttccagtccgagatatgacctgtcacgatcgttctgagatatggagtccgagctatgacctgtcacggtcattctgagatatggcctacctcggtcagttcgaaatatgttttatcttgaaccggctcgagatatgacctatcacggtcgttctaagatatggagtccgagatatgacctgtcacgtttgttctgagatgtggagtccgagatatgacctgtcacgatcgttctgagatatggccaacctaggtcagtttgaactcacttatctcggataggacaactcacttatctcgaacaggatgtctcaatatctcgaacaagatgatccacacacctcaaacttatgactcaccttttatacaagacagttatcaagatatgcaatgacacctcataagttataatagacaaatatctaatgataccttgagaagtagatacctaaagat

SEQ ID NO: 265774 - DNA, 490 bp, Cannabis indica
atatatagtatcaagacctcaattttcaatatttttctataatttggagacatacaaacttttttttttatgtcaacaactttactatcatcgatgtcttcgaattattcatgatttactcattagtatgaattatttgatgtaaaaaaataattttttaatgataaattcatgaaaagtgatgaaaaggctattgtaattttttcttcctcattctcatgtgataatctctattcttcattatatttttctcgctctctatataattatttttagtacttttttttctcaaaaagatatttaaataaaactttatatatataaatgtatacatatagatatgttttttctgaaaaagataactttagtttatgacttataactcctaggttggtattatgttttaattatataattataattatgatttgtttctaaatgtatatataattatgatttgtttctacatgtatatataattaattgattt

SEQ ID NO: 265775 - DNA, 561 bp, Cannabis indica
ccgttgtaataagtatagcaacgatgcggcctatatgatgcgtgttgtctgttcatattctcgcacaagctcccaggctttcggtgtgttctatatttctaaggaggactaatgagcctcgtgctaaggtgtctgtgttctatctaagtcacacatatggacaccttatatgcgttgaaaaacatgagacacacaaatccctatcaagttatcaagtacgctttgttgtttagactagtttattatgtaaagaagtgatcttcactcagctgcaggagaaggctacctagtcatcgcatatatcttagtatatgcgcaacttgtataaacccctcgtggtccttcttagtttatactctccaaggcacagtatgtgactagactctatcaaggttgcatcatcttgcgagtttaggtcaagcgatgttaactctcgaagagtcattaattaatagctcattcatcccttgaggttggatccacgtgtcaattttgtaagagattgatcttgatgtctagtaaaaaaattctcactataataattgtatttcatatattctt

SEQ ID NO: 265776 - DNA, 628 bp, Cannabis indica
gttattttactaaaggttaaatacgtaaatatattattggggtgtagttattaatattgaaaaattatatttgcaccctaataaattatcaatacaccccaatttaaataaaaaacttaattaaatttttatccttgtacaaaattatcaaaatatacaattttaaatgatgagtctattttaacttttattttaataattacacctcatttgcttataaaactaaaattatctccttcaaatcttaaaaaagaatcattaatagaggaaaataattgaggttttatcaataaagaaaatttaatgtaagcataaaaaatgtttaattatttcattaaatttataatctctaaattttttgtatttattttctgtatgaatctcacttatatatatacactaatatataaaagatttcattcatttactttatttttttccgatcataaaatctttatttattgttatgtatatgaaaaaaattaattgattgttaattataattataaaaagaagagatgtatatgtaagtacctatgtatattttgaaatctaaaaagtaatgattatttaaaagaatgaaatgatgaagaagagataataaagaatcaaaaaaaaaaaaaaaaaa

SEQ ID NO: 265777 - DNA, 546 bp, Cannabis indica
accaaagccaagaaaaggcaaaagctcacttgttgcaattaattgcaaagccaatccttatcaatttgactaactttttctctatttatttttgagagattttgcttctaactatttgtttggtattattatatttataactttacaaattgtataaacttgttggttccaatgagcattatttctaactgcttgcattgagtactgctatgaaaatttgttttctggctctagtttgtttgctccaattacactatttgagaaggccatcaagcctatagtgattagtaccaaaacctgcccaagacagcatttttgaagcaattaccttactataacagcattgaaagaaaagatgagaataagtttcaatctcaatagcacaaatcaaatacgtatcctcattcttaatactaagtttggccaaatgatccctagtttaaagacaggaattaaaagctaaccaagctataaattgatgctttaggagattgaacctgttggcagggacgaccctggacctaggcagactaggcccgtgcttag

SEQ ID NO: 265778 - DNA, 537 bp, Cannabis indica
ttttcaagaaactttgacgtctcgtctaatactttcccttaacacgagccgttagtattcaactttatgcgctaatcgtaacttttcatttttctttctcgtcaaatagaatttaaacttaaaattacagttgtttgatccctttctcgtcgaaatggtttgatcaaggcgttataacgattcgacccctcttccataaaaaaggttttgtcagggagttataacagttagaccgctctttcgtcaaaaaggtttggtcgaggacctttaaaaaaattcaatttatttttgattttttgaaatgatgggtttgcattgtactatgtatttctagattaattctggttaatcttacatatatgcccctcaggtaattttaaagggtttacgctttataattacttgtttgagagaaatgattactttattcacaactaaagttcaaaatatttcatcagcaatgtgatttacaatcattaatctcataagaacttccccacctcaatcgtttattttatcaatcttctaggagcatct

SEQ ID NO: 265779 - DNA, 537 bp, Cannabis indica
  modified_base (42)..(42): a, c, t, g, unknown or other
gacaatagatgtactatttattttttatttttttaaaaaagngatagaatatcaatgacatgtagtggcatcaagaaaattttctatcatatcacctattggaagcataaaaaataataaaaaacccaaaagttttgagcatgtttggtattgttttctgttttttattttcaaaaaattatttttagaaatgagaacaaaaaatagtttttgaagtttttaaaaacaagtcatgttcggttagtgttttttaaaaacaatattgatcaaaagtgaattggtttttaaaacagaaaacaacattttgttgttttcaaaattcttattttttgtaactttgttttttgaaaaatgttttaaaaaataaggccaaacaagccaaattgttttcaaaaaacaattttctgtttttaaaatcaaaaaacagttttttagttatgatgccaaacatgcactttgtttttcttgtttttaaaaagtaatttaatcatgaagatgattcttttcaatttaccattgaagtcggccgaaaaaggc

SEQ ID NO: 265780 - DNA, 661 bp, Cannabis indica
tacggactatcctatgtgacatctcgggaaatcggggtgttacagtagtgaccgtcttcctgactggttctatatttacttgatttcacctgtttggctgactggctgggctttgaccctgttgcgggacgatccgtcttgtggcccataggctcactcgttagtctatttcaaggcctagtgagtccgtctgactgtcttattgggcccaatattgttggatccattattgatgggctcgtctaacttgcatattggacttctcaaaaatatcacaaatattaagcaaatttttacctctacagtttgtccctcactctctagctagatttattttagctggagagttattaataccaaattaggtgttggccaagagttttgtctaagtaagcgttgtacgcttgtcttgctgtttgagacaagaaaataggctgaacggttcgagcatggtggttgggtagtccttgtcgcatgcgtgtatgtggctaccttggccaataatttttgtgtgatcaattagttcttcaaagagactcttaactagaccaagtcgtcttgttgggtcaaatgaaaaatatttggctgtctatctcaaaatatgagatgagagtagatagacgtacatgtgtatgaggtgtaaaaaaatagacatttatat

SEQ ID NO: 265781 - DNA, 770 bp, Cannabis indica
aacagaacttggccttggcaagggcctcccggcgctcagcatcctcctggtacgtccgcctttcagcagtcaaatcctgaaggatcttcatgacttcgtccatgcccccaaattcggacaagacgaagccatggttaattaggttcttggaaaggcggccggcctcggcagcgagctggaaaaggatacaagtatgagtaaaagtccttaagagaaaataatgaggaaaaaagtaaactacgaaatacttaccacagtcagggagtggctgagatcctggacttgaaagatggagttcaaggatgcacaagcagcgaaccgcttgggtgcacaccgggtgagctgagacacaaactcgccggtcatctccgcggcaaagggagccaaggtaggaccgaggaaacgattgaaccaatccgacagggggtccaaatttagatcccacggattttgatagttctgatcgttgagggtattttgcatttcaattcgcaaaaccctcctcaaagcctccacgtcagcatgcccccgggagtactcgtccatggcgtagttgtgtttggctatccggagttcctgcctcgcctcatctccaggaaccggagtcagcactatgttgggaggcactgtgtattcctccgcctcgggagagatcccggaatcagggccaggggccggagtatcagctctccgctgccgtttgggcacctcctcggcaaccatcttgcccttgcgcttgcgaatcagagcaacttcttgctcttcttcac

SEQ ID NO: 265782 - DNA, 1326 bp, Cannabis indica
tactggccgaatacttggacagaaaatccattcccagtataatgtcaaaccaagtaaatccaaatttataaggttagcacccaactcccttccctcgatcttaaccggcatagacctaatgtgcctattaaagataaccaattccccgctaggcattagggttccaaaccctctttctaaaatatcacaaggcctacccaaaaagattaattattctcatagctacatatgaacgtgtagctcccgaatcaaacaacacgatataaaagaagtcgtttacagggagctgacctgccactacagaagggctcgctgcatcatcagcttgaacattagcatacaccggagtaggaacaaatatcgcttcctgctcttgttcttctttctccacctgtgggcaatctttcttaaaatgcccaaccataccacattgaaaacatacttttcggttacattctccgggatggtgtttcatgcaacgtgggcactcagggtaagaataaccctggcgtcctcctttgccttgaaaccttcggaaccgcttgttctgtcttaaacccaccactgatgacgtaggtttcctcttccgctcaatcatggagctcctaccacttccaccataatctggaatcaggcaggtgatatcctgaccctctgccataatctcctgaggtctcggaataattttctcagggctttcagcccaaaaagcgttcttcatatttgaatctccctgaaagactgaaggttcatgcatccaaatctttccatgcaatggttccacttgattaccagccattccatgcttcgctggtaataccgaatcaaaaatgattggcatatgtggtaaagatactacaggagacctttgttgtttcaacctctgaatctcttcttcatgtcgttgaatcacagcttccatttttgcaaacctttgctccaaatccaacggagcctgtgacggataaccatcactcccgtcggaagccctccaagggctttcaccttggttacggggacaacttggactccattctctccaaccgttactagccctggccactttactctgactctccatattgcaccaggtgtccattctataagactaacctgtcagttagtaagtcagcctggtcaggcaacgacctatttacatacttactaccgcacttacggattttaaggcaatgcacttaacataaataattataatctaatatgcttcctaacatgctttaataatcttttaaaatactaaacaagtacaggcttactgaaccgcgaaccgagctttctctgatgaagattgtacatgtcttagca

SEQ ID NO: 265783 - DNA, 596 bp, Cannabis indica
ataaaataatagcaaaaataaggggcaagtggccggccatatgtgggccctacactaattatatttttgccatatttcttaaccatttatctattatttcacaaatgtcatattttctaattctaatactataagtgccaaaactatttatataataattataattaattatcaaataaaattgttatttatattatttattagttaaactccacaaagtctcttaattaacaaataaaccctaaaatcctatttcttcacaatcaagctataacttagtgaaaattcataaataaggcatagtctaattaaaaattagaattaattaattaaaatcaattaactgagtcttacaagtagtattgtctcaactagtatggggactatgagcctatataatcgagcttccaataagcagatctagaatttaccactatagatttggaatagcactctcaattatatagaacgctctatatgttctacattataggtacgctatgaattatccatttgttataatccttgaaagaacaatttagcctaattacttgattcagattgccgagtttcctaaggaatcaactatcaattgt

SEQ ID NO: 265784 - DNA, 1033 bp, Cannabis indica
cctagagcccccactctgccgaagtggttcctcccaagaagcaaagaaaaaccaccgcccataagaagaaattactggccaagcctatcgatctcgaggtttcggacaacgagatccaagagcaagttcctcctccagttgttcccaatgccaattcccctcatctcgaggtcgacccccgccactacctctccgagtcacggccatcgacgaccctatcggtcgcaggttggagaagcgtggctctgaatttgccttggcatatggggttgcctgttggcgaaaaattcatactctcctttccccagattgggattttctcaatcttaggagtccaaaagagatgctttcaaggaccttcgactgtcacttcatggtatctcggctttattataattatattaactttttatacctctttcatctgtttgcaattctccagaattcttttacttctttttctttgcaatcgactactctcggagcggctcgagtatttggagggcgagactcacaaattagtatctcaatgaaaggttgggtgtgaacaacgagacaacacccaataggagattacctacttcaagcaaaaagcgagaaggcaaaggaggaagccgagaaagcaaagaaggaagtcgagaaggcaaaagaggaagccgagaagacgaacgaggaggccgagaagaccatcaaagtctaagtagtttgaggagaagcttgctgaaaaacttactgagaaagagatcgagaccgtagaacgtgttgggttttgtgccctaaataaaacccatttcaatataatcagatttacttattaataaagatcagaaataacattttatgttgcatggttcacatgatttatttcatgattatatatatataatgtatgaattctatttaagtccagaacatatgaatttgttaatgattatagtgttgtcagcacagtggaatataatcttaattatatgttcgaaagtttattccctgatttgtcagttcactggatttagactgacatgataatcag

SEQ ID NO: 265785 - DNA, 841 bp, Cannabis indica
cggaccaggactcggactccgaataagacctagacccgaattgggagccgaacccggatcccaaccgaaacctggactcgggacccgaacccgaacctcagctcacacccaaacatggaaccagactagggacacaaaaccaggttcgggacctagaaccgcacccgagtctcgatctcgaacccaaactcaaaaatgcgacctgggacctgtagcagaaccagatcgagacccgtgaccgtgatcctgatcttgactcaggattcgagtaacggggcctagaatagaccagtagtcgttgtctagatttgggactcagacaaggactagaaccctgacgaagaaccaaacccgaacccaggaccgtagaacaagactaggaaggtgaccaggaccaagatctagacctagaactgaacacagacatagcctcagacccaaactgagactggaactggggcccggacacggtcgtgtacccagaccggaactgagacccgcacttagacctaaatttgggacacaatctcaaacacagacttggacctagatagggatccggatacgaacctggactcagaccaagagccagtctggcatcgaaatgcatgacctagatctagaccgagatcctgacccagacccaaacttggacccgcactcgggaccccaacttggaccttgacctgaaactagacccaaatcagggtacaaacctagacacaaacccggaaacatactcgaaccgaaactcaaacccacacatagaatccgacccaaagctagacacggacccggacccaaactcgaacccagatcaggatcagaaccaaggacttag

SEQ ID NO: 265786 - DNA, 3775 bp, Cannabis indica
aaaaaaataaaaaaattaataacccacaatagacccctcaaaccaaattcaaagtctaaataatatagattccgacatataaaaaacaagacatacatatcattttttcaagtgtttttaaagatttagaggatacattaaaagcgaccatgttattattattgttttatgttaaaaataaaaaagaaagttcgtaccaaaagcttgaaagatgtcttggagtatagaggcggtgatctctgagtccaaattgaaaattactatggttccttggttgtaaccatcttggacggagttagtggtcggaataacgaactgagcccaaacaggacgaccagctatgagtccaggcgccggtgggggaattgggggaggagagagtagtagtgatgaggttgcccaattgagctcttcaaacccagaattccgtatattagtattagtagtagtattattactactactgatcatgaaatggtaatctcgaagcctggtctgttgttgcatgtgctggtccctaatctccctcaaagcgttctctgcatgtctaaggtcatagaaatgaacggtcacgattccatcatagagtctctccatttgaacccctctaacttccccaaacgcttccaattccctcctcacaatcgactcgctcacttcacacggtacagagctcagtaaaatcgcccgagtcgatatagctgacgtggcaggtgccgggactcgcacagtcactgcagtcggtcccaccgccgactcggcgctaacgtacgctgccggagcacaagaagagaactgcgggtaacccatgcttccgtcaccgtaaggtaacacttgtacttcccccatgtgtggatgatgatgatgatggtatggagatgtgtacggataataaacctgcggaagtggtggtggtggtggcggtggcgggaacaagagtacctggtttgttgggtttgtgctagggtttctaggtctgaactcttctgcctttgggtccaggtttccgggaaaccggtgttcagccatagtctaaatttttgtttcgaaataccgccggaaaaccagtagtgtgccgaaaaaagaaagggtacgtaaaaaagtggtttaccggcgaataacagagataatcaagtgatggggtgttgtaagttatagcgttttatagagattggtttctttctccggcgctagtgaagttccatagtagtagcagagagcagtagtacatgctttctctctctaactctttctctctctctctagaacaaaagaaaagaaaggaaaaggcacaaatgggtttgggtgtttttctttctctcaactttcatttcaagcaaaagttgctaaaaatgtccttcgccatctatttacgaaaatacccttgtgtccttattttttttattttgagagagataataaaaaagagaaacaaaattggggttatatattttggtatcatagtagtggagagtggtgaagaggaggaggtgggatttgatcggtgggggccatctttcagatggggccttgttgttaaggatggtacacgtggctgattggatgaatatggtacgttcgattaaatatgggaatagtttttataatttgaataattaattaaattgctaaaaacggggatgggtaataattgctctgcgagtctgggtgggttttggtactttttcatgtgtgtggttttgactactcgcctatgctttatttgtgtttagtgttatgtgtgagtgtgtagtgtctctattaattcttttgtcccatcgactcctcctctcctctcttctccttcttctattttctaataaatctattttcattttcttttttcaatatctctataggaaattctcctatattggtgtattcttttatttttgggcttgggtaggtgaagtaaatctattttcatttcttttttcaatatctctataggaaattctcctatattggtgtatttttttatattttgatattctactaaatttttatttcatttagctctttatacttttatctaaaaatttcaattaagtactatcgtaaattgcttacgtaacaaattttaatggttcatatattttttctattttcatctaattcttcttgttttgtttttcttttttcattttcttcttttcttttcttcttcatttgagataccaccaccacatcttcttcttgtttttttttttaaaccaattactcagactcccctactacaacaatggaagtacgcgaattacccaaccatccctaaatcgtatctctctctctctaacagtgcccacccctccctagcccaaacaatgcctactttaccctagatttgtgacgcctgttccatccccaaacttgcgaccagtggcagaggtagtcaaatattaaagtgggcgcaaaaaaaaatttgaagcataaataaaatatacgatttttattaaaaaaatataaattatgtgaaaataaaaataaataatgtaagaataaaagtaaaaaatataaatttcataagaatacaaataaaagtatgtgagataaaaataaaaagtataaattgtatgggaacaaatataaatatatgtaaggacatagataaaaagtaattataaggtcaaaatgtaaaatacctaaaaatttgtatgaacaaaaagttgaaggagcaaatgaccccacatgccccccttctctctgccactgtctgcgacacccatttcttctctagccttgatgacgcctacttcttcccagctttggcgacactttcaatcgaacttgtggtaagtcatgtttagtcactctccatcacaatagtgtacatcttaaatcttaaatctgatattcagtaagaaaatagatctaagatttattttctgaattttatttattttttattttataggtatttatatagatttgaaaattataatagtgatagtggttattgcagtaactacggtggtgatggtgtaattgtggtgggggtggtttcagtggtgtggctgtggtggtttagaaaagatattcatggtggtggtaattgtagtgattgtggtgtgatggtagtagtcacagtgagaatagttgtgatcgttgtgtgatggtggtggtgttaatggaggtggcgtggtagtggttgtggagtgagtaagaattagggtgtttcaaatgaataaggaaaaaaaaataaaagaactaaggtggaacacactcaggtaaacactactttctatttattgtagatgattttagtaggcatttatgggtttacttgcttaaaaaccagaatgaatgtttagaaaaattcgaagaatagaaactgaggtggaaaattagtatgataagaaactgaaagtgcttagaacagataatagcttagaatttattaacattgaatttggtttgctctattctgagtatggaattgttagacatcgaactgtgaagcacacacctcaacaaaatggtgttgctgagagaatgaatatgactttgttaaataaagtcaaatgtttgctgattagttgtggtttaaggaaaatctattggggggaagttcttgttactgcatgttacttgatcaataggattcctagtatagtcattgacctaaaaacaccctatgaaaagttgcatggcactactccaaaattaaatcacgtaagaatctttggttgcactgcctatgtgttgggttttatgccctaaataaaactctatttcaatgtaatctattttatttaacatcaataaagaaacagaa

SEQ ID NO: 265787 - DNA, 1086 bp, Cannabis indica
ccaaggagacctcagatgaaacacgagacaatgcatctgcggtgcggttctccaaaccaggtttgtattggatatcaaagccataccctaagatcttagtgagccatttttgatattctagggagaccacacgttgttctagcaagtattttaagcttctttgatcagtgcgaacaagaaacttacggcccaataaatacgggagccatttttgaatggctaggacaatggccatcaattctctttcgtagacagacttggattgggccagaggggatagagtgcggttgaaataggtgatgggacacccatttttcttcagaaccgcgccaagccccatagcgaaagcatcaacctcaagtacaaacggaatggagaaattaggaagagctaaaaccgaaactgtgcacatggctaccttcaatcgttcaaaggccatttgagctgaggaggaccaggaaaaagcatcctttttaagctgatccgtgagaggacgggcaatgctaccatatccttgtacaaacttacggtaatagccggtaagacctagaaaaccccgtaggtccttaatggtggatggagtgggccatcgaagcatcgcctcaatcctacttggatcgacagcaacccccttggcggatatcacatggcccaaatagtcaacttgagcttgagcaaaaagacacttcttcttgttggcatacaagcgatggtgacagagtcggtcgagaaccaagcgaagatgagttgcatgagctgctaaagaagggatatgcacaaaaatatcatcaaagaaaaccaagacacaatgacctcggaaatcgcaaaatacctcattcatgagagcttgaaaggtggtcggggcattggtgaggccgaaaggcatgactagaaactcgtaatgcccctcatgagtccataaagctgtcttttccacatctccaagtgccatacgaatttgatgatacccaaacttcaaatccagtttggaaaaaacggtggcaccatgaagctcgtcaagtagctcattaataacaggaatgggaaatttgtttgccacggttgctcgatttaaagctcagtaat

SEQ ID NO: 265788 - DNA, 837 bp, Cannabis indica
agttatattagacagttagattggttattactattatacactattatgttgtgtatataaagacctaaagccattgtattaataatatcaatccataatatcgctttatttttgtttatactagttctaataccttatgtacatgtagtcaagtcatatggtgaccaaattattttacttatacttacatttttttaaaattactagataaaacttctaactatagcttgaggaagttaattctaagaagtataataatatagcaatgttagaaaaaaaaagggtgtttgggaaagtcttaatgatgttcaggaaagatatatttatgcatatcaagtttttatttcctaaatatgcttttgttgcccaagacaaggaggcagtcaggtcagggaagatgctacaatgtatctttattaataataaaaacaaaataaaaaatatgtcgaataaatgttgaagcatatttttagcaaaagatcctgaatttgagactttctacaccaaaaatattctcttaaacgagggtattcgtgtttggatggcagctaaagatcaacctcatgaaaaatttatattccttaaggaggttctacctcgtggaaatactctttaatggaactttagatttagttggtcttcaccaagaaactactgattttgcttggtgggtcgagaatgcccaacttattaatttatctggtaaactgctaggggcttatgtagctcatgccatattaatcgtattttgggctggaacaatgtgttaagattttatgccctaaataaaacccattctaatctaatatgatttgttatcaataaaagattagaagt

SEQ ID NO: 265789 - DNA, 1256 bp, Cannabis indica
gttcgaattttgactgcctttagtgaagctcattttgtaactggtgtgaatcaccatcagtgtgctttgtgctcttgattctctattgttgtaagttgtaatctttgccattcaataataaaatcatcacagccaatagagttgtttcaacccggggattaggtccaagttctatccaaaacttgtgactgaacctcgttatttcttgctgtcaatttacatttctggtttaatgttctaagcctatttttttttttttttcattgtgttcttgtttgtgcttgagtgcacaacatatatatatatatgtaagaattttttctatattaagctaagattatctaaaataaatatttatactttcataaggaaaattaaacatttatactatttaatattcacaaaaatactatttagaaatttattaattacaaaaatactcagccttcttagatgcatttcgaacaagcatccccacttggttcagtgttataaccaatacggcaataacgaatattaatgcagattatttctattttaaaataactaattttattttatttttaaatgtggagttcgtgcacacataatttacgtgaataaatgtaggtacaacgtcacagatacaatacactcaccaatagtttattttgcaattcaaagtttcatagggacaaaatttactttttttctttcacacacatgcagtcacaaaaaatgacctcataaccagcttcatttttcttttccataaaatcttatatttatctataattataaggtggtgttatcgcaagactgttatctgcatttgtatttttatgattaactaaatataacatgtggaatacaatatgatgaacttaaacttgtcactaaagttgtgaacaaaacaccttgtcattaagtggcaaagattttaatacatatatactcatgaaaaaaactaaacatattattaatttttctattatcaagataactaaataacaacaataaaacaatacaataacaactttattttaatataaaaattaaataaatttactcaattaaaaataaattagcaagacttcaactaaaaatatacatataaaaattaagtatacttttaatttgtattgtttgtgagtataaataccaataaataaacaactagacaacaacccaatttaaatatgtaaatcaataacacattaatattaaaaaaaaaaaaacttaaaacaactaaaaatcacctttataacaactaattg

SEQ ID NO: 265790 - DNA, 809 bp, Cannabis indica
aaacctcgttgattagcaacgagctgcacagtacgtttaaaaatcacgtaatacgcctatgctagttagggtgctacatatagtttttgaccattttacccctaaatttgaaataggcttaagttatgtaacaagggtatcttagtaaatttccaaggcaagtgatttggtggatgccttattgagtgacacatagcaacttaattcagcaagattaagttagagattaaactcttttcacttagaggaattaaggaaaatcaaaggaaaaagactaaaaatagaaagaactctattcccttccctctctctcttcgaaccagccctggtcaagggggattactgctggtttttggtgttttcagtagggattaaaagatctcttaaccaaggtaaaccctagaagtctttttttttattaaattccttaactttttacttggtttgagtagtgattttttcaattgatggcagttaggtttagaaatgtttagggtttgaattttaatgttcatttgagtttgtttaagcttcttgtagctagtttggttgtatggaattggatttatgcaagtttgggtttgaaaacctaaactttgatctttaattgcatgttttagtttcctgggtttttttgtttatttattgacttgaatatgttgtgtatacccgaattaggtactctagaaggtttggttatgtttggtgaagttttgagcaagaaatgagattttttaggtgaactggtgcaaaccaggtaaccagttttacacgtacttgtaaaacctttggtcagggttccctaagtc

SEQ ID NO: 265791 - DNA, 501 bp, Cannabis indica
attatattcattaatatgagtcttacttattaaaaattattcactgcacaagatcagccttgaaatatagtcatacaaacaaaaaaatatttgtaggtctttgtttagaaaaaatgtagtattttttaaaattagtaagaaaaaatgtataattttaaaagaaaaaaaaacattttgggcctctcgactaggtgagtcataggcatagccctgcccgcctatgcctagagtcatagtctgctactacaaaattggtctttttcggcatttaaaattgtcttttatactattttactataacatatttgacactcacttctcagatatcgcatcaaaatcattgtcaattaattgatgatcaggcaattaaaagtaattaagcacagataaaatagaatacatagaaattatggggaaaaataaatcatattaaaaccataaaacaatgttaaacaatctccatctaaccctaattaaatgtttagttactcatgtttatga

SEQ ID NO: 265792 - DNA, 694 bp, Cannabis indica
ataaaactcatgaagcctaatataacatggattggatatttatgtatattagtgtgggtacgagaggtacctaatcggtcaaaacatgtaaattaattatatatcttattttttattaattacatttaaataaaaatattgtgatataaattcttaaaaataatttatattatttgcaatattattttaatgtatgcctagatttttttctcaccaatgtattgataaaataatacaaaaatattaatatatataatataatatctaatttaatataatataataagattgtaacataatcaaaattactattatagtattcgattttttttaatataaattaaaaaaagaactaatgtaataaaataacaatgtaatactgattacattatgtaatcgaattttattccattaaaaaagttatgtaatgaaaattttattaaaaatattaaataaataaaagtcaaatgactgaaatattattttttagataagaataataattaaactatagagataattttgtgtatatgtgagttattcaaattttattccaacaacaaacaaatatcttaatgatcaattctcattattattcttattttattacgtttattattactatatcatcaaattatatatcacttaagctcgtataattttttatactattatttactaatagaaaaaaaaa

SEQ ID NO: 265793 - DNA, 675 bp, Cannabis indica
aaatcgcgcttggtgtgcaagagactgggaatactagttcagcagtcgaccagggcattcataacacaaccattctgcccgctaccaatgttcaaacaaccattggagatgacattgaaatacaaaacctctgtgctgctcttggaatcatgcacggtcataccaacaccctacatcatgatcaagagaaactccatgacgcggtgaatctcgtgtttatagagcaaaggcatgttttccgaatggagggacaaggagatggaaacgttaagggctcagcaagcagtcattaacgatcgtagtcgacaagctactgtgctaatacgaaaagcctatcagactggtgatcagcagcctgtgaatgtcattcctttgggtgaaacagatgaagatctagcgatgaatacctcttaaactataactggtcagtcgtcaaatcggccaaaaggctgaacaggttagtccagccgtgcaggcacagctggacgaactaaaaaatatgttccaaggcatggccggtcagaggaacaacgatctcgagttggatcgagcacgtggaacccctttctcccccgagatcaacattctggagttgccccacaagtttaagatgccaacatggaagatgtatactgaaaaggaagatcctttgtcccacctcaagtatttcgagat

SEQ ID NO: 265794 - DNA, 557 bp, Cannabis indica
aaaaaaaaattaaatatatgtatctaaattataaagcaacacacatacaaccaaaaaaatgttaggaagaaactaaaaattatacaccataaaaaaatatacatgaataaaaaaaataactaataagtaactgttgaataaaaaaatattctgaaaacaacttaaaaataactaaaaaataagaaaacaaatgcacatatatacaacaaaaaaattgtgttgaataaactaaaaactacacaccataaaaaatatacatgaactaaataactatacaaaaaaaatagaaaaagaactataaaacacctaaacaacaacataaaaacaactataaaataacaaaaagacagctataaatcaatatagaaataacaagacatcaaccttgtcaaaataggcaaattattcataaatcaactacgaataaaatacacaacatccaaaaaaaatactactttttattaatcatgtaaaatggagaaagatataggaggagtgttcttaatttttttctaaactagagaaagtttttaaaaaaaaatggctatttacaaaaa

SEQ ID NO: 265795 - DNA, 2450 bp, Cannabis indica
ttatcaaaaaaaatatagacaatatagctaataaacagaattattaatttaacaggagataatcttattttttttttcttatattcttttcttttagaaaaaaaaaaaagaaactccatacttatctccctttataagttattccctattctttctcgatatatcaatgcacatgaaaaatcatcacattattcaatcttttccttcaatcattaaatattcttttttagagtcgctcacaagattatttgtatgtacaacttttccaatttcatcatataagttttcaccataaccccaatagttttatgtgacaacatatatatttctctaaaatatataaagattactaacaatagctcaagtgataatatatatttatatgtaacatggccgaactacccatacccaacgaggtgaagaaactatgggatatatggcaactacgtggttgtataattctaagtctattcctacaagccttattggtttcgtttgcatcaatgagaagaagatccaaaaactcatttctagtcttcttcatctggtcagcctatttgctagccgactgggcagctgccactgccattggtttgatcacccaaagccaaaccgatctttgcgaatccaacaacggcgagatcttcgccttttgggcttcctttcttctgcttcatctcggcggcccagatggcatcacctcatttgctcttgaagacaatgaattttggcttagacacctttttgggctagttttgcaagtcttgggggctttatatagcatatacctaactctcccaaacaacaaactttggcttcctacatttttggtttttgttgttggagttgtcaagtatatggagagaactatagctctttaccttgctagttctgaccattttggtgctgcctcattacccaaaccgaatccaggatgggtcattgaggcagcaccagctagtactgctgctgaggcagccaaaccgccagcagcagcagtaactgactcttctgtcatccaagtatcgaacgatcatcaagaaattggtgaatctgatgacgaaatcaaactcatgcaagttgcttataagtttcacgacaattttaagggattgattgttggatttggcttgagttcgaaatgtcaagaatctagccgcaaggctttcatgaaagccaatcacattagtgctttcaaagttgtagagatcgaattgagtatattttatgaggttctttacaccaaggccattgtcattcgaaatagaatgggctacatcttccgcttcattggcttctctttcgtcgttgttgctttaatcttcttcaccttgttcgccgataaagatggtttcgaagaaatcgacattggcctcacctacgctttgttgattggagccattgctatcgatttgatttccattgttcatgatcagctcatttcttcagattggactcttggcgccctttgtgaaagatggggtaagtatactgttggaacttttatataaaattagtgaattttgcaaaaatagagaagtgacttatcacaagtctatactataaatctaaaaacattatatgtggaataataaacaactataagtgtggtggaaagagtcccacatggagtaaaacatattttattataaatgtatattcacacttaagtttgggttgcaattattattattattagaataatttgtagtaaaatacatttatgttttaatttttacatcactacagcaaaaacagtcacaggaaggatggactgttttggttggtgcctgaaaatcaatattatgaacaaaatatgtacttaatactaaaatatctgaaacgaaaatgaattattcctaaaaattgggagtggttccaaaaaattaaaccaacagcctagtttttacacattatcagaaacaatcaggaacgaattgtcgttcctgaaatcatttttcaaaataattaaatttatttaaattaaattaaatattaatttttttaatatcacattttctttattaaataatttctttcaaaacataaactgttttcatatttaattttaaacattatttttatatttaaaaaaatttatactaaaagagctcattcacataaacaaaagtaataaactaaaacctcaaaactttccaacaaattaacctaattattattacatagacttaaaacgtttattatctaatctgcaacttaactcaaatttattcttattttttttatattaatttgagttgaacatgttcatttgcactgttgattaatactcagatttaattgggtaattttatttcattgcagctacatatattccctcatcaatattaaaaaagaaaaagaatcaaggtggtctggaactgtgttacatacaatatgatgttaattgtcttgatcacatcgtatctacacatggtaaactaaacttc

SEQ ID NO: 265796 - DNA, 1520 bp, Cannabis indica
atatttgtgagtgatatttaagatattcttcattttgttatttatgtctgaattatgttagtgggaaatttacccttgttttgtctgatcacagatggggttgatggtcaatcctctcaaacctggagatatttcatacgaccaattcgttagagaaaggtaatcttagctgaaattctatttcatctaattaaatgtcttggcactgtgtgaaccattgtgcattttgaaaaggtttgatcatatatgcaagatcccatattagttaccactcttctagctttaacatgctattgccataatcctgcgcagctctgcacatacgaaaacttaaacgccaatttaatgtttgtggttctttgttattttaaggacatgaagaaatattacattagatgttatgaagtgtctcacatttctagagatatttattgtgagttgcaagtacttatgattataacatgtaaaaacatgcagcaaagggatccttgaatcactaaggagaagagcaaagttaatgactgatggatttaacagctgcagaaatgtggtttgtaatttcactgaaggtaaaagttgtaacaaagaaaagaatatctttcactttgttaataaggactttttcaatatcgtcggtggccatgaaaaataattgagataaactttgtttcaggtgcaatgtattctttcccacaaattcgattaccaccaaaagccatagaggctgctcaatcagctggaaaagttccagatgtcttctactgtctcaagcttttggaagccaccgggatctcaactgtccccggttcaggatttggacagaaagaagggtaataatttcatcatttcaacatatcagacattttcgctttgaaactttggtcactttctagagaagaactttgttaccatttacttagcatttgacatgtctatgcagcatgttccatttgaggacaaccatcttgcccgccgaggaagacatgccagagatcatgtcgagtttcaagaagttcaacgacgagttcatggagcagtatgaagaccatagaggttattcaaggatgtgaaaaatcctttatccttccaaaaccaatttgtattataatatcactcagcaattggtagctctttaattttattatattatatatcatctctatacttgtgaaaatacttctttatctgtctctattttcttcctatcacaaagggtatgaacctcattctgttgaaacatatatacactacattattactagtttctattatctgaattctaactttaatgatttgtggcttagatttagatcatgcttgaccaaaactaaaagtctataacttgatcgtttttattattttgttgaagttacacattgagaatttaatattcaggtgaaaagtagatatttttagaccaagttttattaatagtcacacccttcgtttaaaactgaaatttctgaagttaccattttgacttcctaatggcagatttttttttttttttggtttgtaaa

SEQ ID NO: 265797 - DNA, 673 bp, Cannabis indica
acatggaattggttattctgaaccaagtatttgcaaaattataataacaacacatactatatgttacactatgaaatagtgcaggggcttattagttaatttgtaaagtgcttattagtaatttgtaaaaggtgtgaaggactgtaaatatgtaattgtgaggctattttttagatatggaaatagaaaatataacttggttccattggagtttgggactgattcgaagagtacattttaagaggtttgtcctgtctcgaatagtcctcttcgagtcaggacaaatctacctaaaatgcactcttggagtcagtgaccaaactccaattttctatttccatatactaaaaatagactcacaattacatatttactgtccttcacaccctttacaaattactaataagcccttacactatttcatagtgtaacactacacaacatatgaagggtaaaagtgccaaaagttatgcccagctctttacagttttaacagtatttgtctatcaaaatcatgaaaaccaatttacttaaccgaataaattcaaacttctcctaaaccaaatgccggattactcatacaattatcatgtttgtacataattaaaatggaaaacccaacttttttctgaacctacacgcattcacattcatagcacgaagtcacaaaatg

SEQ ID NO: 265798 - DNA, 1732 bp, Cannabis indica
agctgtctcctgcctcttggttcatgagccacaagtctgcctcgtggtcttctcactctaggatcaggttggttttgtgtgttgttctcctgtgctgccctggtcgcgactgtctcacgttccaactcagcattttattggtttgcctcctccaagcgacgtctgagacgaaaattttccaactcaacaattggcacgtatcttgtgggatcataagcaccatcattatcatattccataggttgcgcaccccaaagattgggttcttcatcctctacttctgggttctggccattttcatggtgagtcctccttgaacgtgtggactgtgtatttttgccaccttcaggttaggtccttctgaaacgagtggtctgcgtagatcgcgagttgggaggcctccgtgaacccattggctcttttccaggacggtgagtggtctcttcaggatgagcatcaacatgttctccattatcagccatgtagaaaggtttttctttcgatcaggaggttttttttctaaactattttcacgtaggctctcaatgaaagtaccaaactgttaatgcagattttcgttaacgataatcaagcctatttcgtgattgattttcacagaaataaaaatagtaaaagaagaagaaataacacaaagatttttacaattaaaattctgcatagtccacgagtctatcttattagatttctctgatacaaaactatggtctttttctctaaaggattttttcgttcttttttttttttatgtattctgcctctatttatagttacataggagggcagttaattacaatcagattgatatcccacaacaataatctcctaaaattgtgggatttgataatgtcccacgtaaataaatgcggttattatttaaaaatcacatagctgtaatttatccgcttttactgggtcaatgctaacgtggatcttgatacgttgttaagtgtatcttgctgggtcacctcgctgggatagcaacaattactttgtcagcgagctggagcatttcccatgtctttccgaggttgataatgtaaatactgtcgtttctactattgaaggcacaacgctccatttgacaatcacagttcttggtgacaaggtgaacttcaacagtcaacatcatttgaatgtcaacttctatctgagagagctgactcgatggagtagtgaatctcattgaaagatgtctgaagctgattagtgaaggtaccatgagtatgccttcttatagcaagatggatgcttcgttatttgttgttctgattcatttaactgttatacttagtttgtataatgtacgatatacgctgagtgttttaacagtcaacatgtctcgcctacatcttttcatacttagcgagattggtgcctcactttgtattactgatgtcgtccttatgatcgtgtcttcatatatgaaatggtttctcgctaatatgtgaattaatagttcgtacatctgtatctcgcttaagactttacagtcaacgagttatagatatactctatcaactccgtatttaatgagttattccattttaatatcttctaatataatagtcattatattcgttgattcgtgttctcctaggttgacatgtgtgctcctctgaagtaccagccgaatttcgagtataacacaaacaataaatttactattgatcacttttatatataaagtgaatctagaatagatttctttttt

SEQ ID NO: 265799 - DNA, 660 bp, Cannabis indica
tttcctataacagttaatttagtttgatgaaatccgtactttctttttaaaaaaaattagaaaaataaaccctctccaaggaattcatagataaaaaaaaatagtcatcttgaagttttggagaaaatatgttctttaatttactaatttgtgaaaacaaaattctatataattaatttattctaagtacctatggaataaaattctgttttcttattaacacacatttttacggctttccatgaaattgtggtgtaacctcagggaggcatgtgaagaatatggtagagaggttgaaaagctctcgatcaagttgatggaactaattgccataagcttaggattacaagcaaacaggttcaacgacttcttcaaagaccaaacaagcttcatccggctcaatcactatccaccatgccctaatcctcaccttgctctcggcgttgggcgccacaaggatgccggtgcgctgacaatcctagctcaagatgatgttggaggtcttgaagttaagagaaagagtgatggagagtggattcgtgtcaaaccaacaccccatgcttttatcatcaacgttggtgatataattcaggtatggtttttcaaagaaagactgttatttgtgtagcttttttatggtaagaattgatggttgatgtt

SEQ ID NO: 265800 - DNA, 545 bp, Cannabis indica
acattgattaagtttaggctagaaaataagaacggctaacaatatacattgatgtgtcaaaatatatactatatttaacagatagtttgcatggagtacaccggtatagccagctgcaccgatttgataagggtggctcgcccagctttaaagagagttgttacttttcacccttgcaacttattggaaaatttttctaggataaaattaaaatctacatctttctgtcaaaaataaataaataaataaatccttatattggccaaatatgctgtcatataattgttagttatttatttgtcgtactattagttttaacatcaaacatacattagtttctaagaatcagattgcaaatctattctacgtcaaaaaagaaaaaaaatgaaatctattctaccttaataataagataaatactgccaccagtcatatatatataaatatatatatatatatatatagaacactttttaatagatatcacccatgaataattactaaacaaatttaagtataaatattaattttaaaaatatcaaact

SEQ ID NO: 265801 - DNA, 1063 bp, Cannabis indica
gtcaaaactaattaaaaaaattgtaatacaaaaatatattgaagagttgatattattttgcttattgcaattaggtcaatgttttgttattgatttagagatatttttttgttgttttataattatttacattgtttgttaagttgttcttaggtttttttttttttgagttgttttttattttactgaaacatagcatttttataattttgaaattttaacacagtattttgtaaacatagtatagtaaaaatgtaaaaatctccatgtcccattatttttgtaaactttcccctattttttagtatttttgtaagttcccattttctagtatttttatagaaataacaaaataaatatataattaaatattattataatatgtataaagtcttagttgtaaatcaagttgtcaaaactaaataaaagaatcgtaatacaataacatatgagtagttgatattgttttgtttattgcaattatatcaatattttgttatttttctgttgctttgtagttattgtttgttgtcttatagttattttcatgatgcttgttaagttgttttagagttgcttttgagttgtatttttattttattaacaaattatttttgtaattttaaaattttaacatagtattttataaacttagtaaagtaaaaatataaaaatttctgtgtctcaatatttttataaatttttttctattttttagtatttttataagtttcatttttataattgcctttagttgtagactccagatatataaattcgtttgattggaggaaagtggttatggatatgtattgtttttgtatttcaatcatttatgtacgcataaaaggtaacaatgtacggtaagagtaaaaggttaatatgtaaaccatttgaaaacatcattggtatttttttttttttttttttgtaaaatgagcgtttatagataaagaaaatttagatttttcagtcattataaattatatttattagtattgttgatattttaactagacgaagttaagttttaagtaaaagtttatttagtcacattatagac

SEQ ID NO: 265802 - DNA, 842 bp, Cannabis indica
agtgatggcttcaggaaactatagacttgcatcttattctttttcagagaaaacctgagcctccaagccgccactcttcttctcttttcttctcttcaattttgaaataccctagtgataaagtagtgcccacacatatcaagtggtatctcaatcatagtgtggaagatagtgtagaatccaaccatcaaagaaggattaggatgttaatgaaacatacgttgtagtaaatctagatcctgttaaaatatttccaacaaactctaggtttgatattccattttctcacttgtaaactataattattattatttcatccaaagagcgccaactgtcttctaaaagagaggacacctatccttcggaataaatgacctaactacccttggattaatgcataatcaatatatggcttaggagtaaaattgtccaatatcataactcgcctaaactcaaaatttgaacttaacatactataattctctataacaaaaggttctatgtttacccatgaaacttaaataaccctccgttgcattttttatcgccattaagctagaatcacaaaaataacatacattgcacttaacataaatattcacatataattattaataattaaggaaataatatatgtagccccactattccatatctaaatcatacagctaatacaattatcccctgttaaaaggattttgtcctcaaaatttaacctgaataatgttagatattgagtcctcatgtcgaactccaactcccaggtagcttcgtccaccttactattcttctagagaactttgaccaacagtatggttttgtttcgaagaactttttccttt

SEQ ID NO: 265803 - DNA, 2436 bp, Cannabis indica
attgacaacaagcttttcatccacatacaataacaaaacaaggaaactacttgttgaaattattgatagaaaaacgttgatctgcttgacatcttttgagatcattgtttacccatgaagttattaaacttcttgtaccatttcctatgagcattgcgaagccatagaaaagccaagtcatttttgctttcttttatgaatcattgttttgtataaatcccgaaatcaccataaagaaagtttatctttatatctagtcgggctgtaattcttctacacctaaaattatatcagtaccaatttgattgtagctagtgtcaatactagatagaaaatattattttttccttttgctcgaagcctttaatacctggtctttatggtaactagtttccatcatgtcctactgaaaatccacttgctatgtagtgctttcttgctttgaggtaattcagctgattcccatgtctaatttttcattaattagtttatctcatatttcatggcagcctccaacttgactaaatcatccacctgcattggttcatactaacgctatggttctgcattgtcagtcagttataaataatgcaaattgtgcaatacaacctctttgcattacttattgttctcgagtaggaattcctatatgaattgcttcattataatcaataatgcacaattgtttgaagattctacttttacttatgtgattgagtgtggaacttctagtgctcatctctgtttttgattgagcatagatttggagtctccaatgtgcatgtattggacattgttaaagaactcaatcattttattttctaatcctactagacacattttaagcaatgcatcttttgaaggacataaaaggcaaccacctttggattttatatatagcagccatgactgttgcatagactactcaaatcacatctcatttattttgtccattatttgattcttgggcagatctcttgctgcttgtgaattactgtacaatgctggatatacaaaccttttctgggttcaagggggtctagaggctgccgaagatgaggtacttgtttcatctaaatttgaaataaatttttaatgtactcttattttttttaactaaatatgaaatatgatgcaggatcttgtcatagaaggaccgcagcctcttaaatttgctggtattggtgggatgtcggaattccttgggtaattacgtttattttttttgttcttttttttaaatacatgaagaagaaagaaggcacatacaatggtacatttttttttgatagaatttattaaaatttttttaattattagcagaagatcttgtacttttccaagtaaaataaaaaaggatagtatttcacatgatccagttttatcagcaatgaaattacattaattctgttaatttcagttggactgatcaacaaagagttgtagctgccaaagcaggttggggttaccgactattattctctgctcgtctggtaattctgttttatggtacaaattaacctttaaaacatatagttttagagcttttctaaagactagtgtctttgtttattcttttgacacaggttggagtctttctaattgctgatgccttgttcattggtgctcagcgattaggtatctacatccaggatataagatcacattgatgattacttgatgcattttacatttaggaaaaacattgtgcagtagcagatgacaagactcacaattttctgagtgtcataagtcaattttggtcagtaggattattgtctcaaagtcaaagatgttttagtgtaaattcttcagtgttaacttttcctgctttccctgccaagatttctaccacgtgctgttcaaaattagtgtttggtcaatgtagatgtctccttaagttgcaactagtgaagtatttctttaaattacattatttactacagagttttacatgtattgtttcctcgtttttatactccatttatggctcgcttggtaagccgtgtaagggttgtattgtttgaataataaataacatcatgtttagatataataatatattgtattaattattacgaccaaaaaatttattacaatttaagttgtattatttaatacataacaaatagtttgtattagcttgtattactaatatttacagaagatctggagtcaactctaatctccaacctgaactaggacccatgattgggacccttggactcggacccagatccaagacccaaactcgaatccaagactcgaacctagacctagacctgaacctggatctaaacttgggacacgaacctagacttgaacacggacctggacctggacctgcacctgggaccccggacccgcacccaaacctgcactcgcacccggacacagaccccaaacttggattcagactcggacttggacccagac

SEQ ID NO: 265804 - DNA, 745 bp, Cannabis indica
ctaacctgaataactctggatattgggctctcatgtcagattctaattcccaggtggcttcctccaccttgctattcctcaaaagtactttgaccacagctatggccttattccgaaggactttatcctttctgtcaaggatctgcactagctgttcttcatacagctcaagattttcatagctaagcacatgagcagggtctgaaacgtattttctcaacatagagacatgaaatacgttgtgaactgctgaaagagttggaggcaaagctaaccgatatgctacttatccaaccttctcgagaatctcgaaaggttctataaatctagggcataacttgcctcttttcccaaaatgcttgatccccttcattggagatactcgtaaaaacaagtgatcccctacttggaactcaacatctctgcgtttcggatctacataactcttttgcctgctctgagaggcaagcattctagctttaattttctcaattgcctcattggtccattgtacttattctggacccaggtatttcttctcccctgtctcatcccagtggatgggagacttacacttccttcaatataaaagttcagagggagccatccctatcgtactctgataactgttattgtatgagaattctattagtggtaggtacttactccaggaacccttgaaatccataacacaggctcgtaacatatcttccaatatctgaatcgtcctttcagactgtccatc

SEQ ID NO: 265805 - DNA, 3930 bp, Cannabis indica
taatgtcaaacaattcattattaaatagatatatatttcttaaagtggaagcttagttcataatttgttaagcttgtgcatattcttcattttttcaggcagtgaaggccacatgttagaagaggctaaattcataaattcttctctaacttcccttgggaaatgtatcaatgccttggctgaaaacagtccacacatacctttcagagattcgaagctgacaagactacttcgcgattcatttggaggtcatcccgggaatctcttttggtttcctcttacatgtcttttacttaatattttgttatttttctgagtacaataaactaaatttgagtgaaaaatagcaagaatttgttgtgttgatttgcctgtagaagaatcttgcactttatttattcatttttgtttttatataggctctgcaaggacttcactgataataacgattggaccttcagcaagacataatgtggagacaagtagtacgattatgtttggacaaagagtgagctattcaaaacctcttctggtgttcttagaataatgttacttgttagtcttttcagtgtaatatataccataatgttctttagaactcattttgggctggtaatcatgcattgaaaatagaaaaaaatgttatattgttacttaaatcttgttaatacattatttgcattatctcaattttgtgttatccattttctcaggcaattaaaataataaatacagtaaaacttaaggaagaatttgattatgaaagcttatgtcggaagcttgaaagccaagtagatcttcttacagctgaagttgaaaggcagcagaaggtgagagaagatgacagaaatgagttagaaaaagagctcagagagtgtcaagactcttcctatgaagccagaaagaatctaattacaaggtccgaggtagttatcttttccatgcaattctaattcagttggtaaagaaatggtttacgcgaattctttatgcttcacagtaattgaatgatatggtcacagttcgcatctcactctaatatgtcttcagtttctagagaaagaaaatactcgtctagagttggaagtgaaagatactctaaatgaactgaatcgtcagcaagatcagaacgagtttatgcatgataaggttgctgagctagaaactagattgaaacacagcaaggtgactctctttctttaagatggatagaatatttatttttcatgatttttttcgttctatcaattaatctgtcactgtattaagcatttacatttgttttacttgttagtagcaaaaccaactggaaagttctgcataccagaaagtattggttgacactactcagatgtatgagaaaaaaatcgcagagttgacaaaacaactagaagatgaaaatgctcgtactgaaatcgctgatgaacaattagatgcaatgaagcagctcctgagtgatagtcaaaagaagattcaggtaaattatggttgggaagaatcacatacttgatccaatttcactctcaattaaaaaaagcctacttaggagccatcctttcaatacagaaacattttctcatatgcactgacaacagtactatcattaatgcttatagaaacttgagatggagaattcaagatgcaagaaagaacttgcagatactactcagatgtatgaggagagaatttcagacctaagtaggcaattgaagaatgaacacatccattgtgaagatctaaaggaacaattagattcagctaggaagctccttagcgatcatcaaagttccatgcagatgcaggttacaagaaatcgatatgttttgtggaagatctttaattcaagactcctactgctttttataaattgatatgttttgttgtaaatataggggcaaaacgagatcatgacgcttcaagagaagttacaagaaatgtatcagctacatgaacaagctctagatgaacttcaagtttttgaaaaccgagtacaaggatctatcggagaatgaggtaatgtgtttgaaatttagaacatcaaatttgattttcttagtattgcaccatttcctgtcatgtcatgtgatatctttcaaatttctgtgtgacagttcttttcaatttttcttactatgtttggaaattactaatagattttttgctattttataaataacaaaaggcaaaaacaacggaggaacttgtgaccatgaggcaaagacttctagttgaagaagagcataggaaaacagttgaaaatgagttggtcaatctaaagaaggctgtccctgaaaacgacatttattttgaggtatgtttggttatgcattttagaatatatattttctgttattatttaaaatcttacatatcttttttttcaggataaaatgtcacatgggaaagaaaactcaggcagagtaccttcttcatttgggagtccaacaaggacagaaaagccaaattccttaagggagacactttctggtcagagagctacaattgcaaagatatgtgaagaaggcaagtttgaacaaaaatttcacttgtatgcaaattgactccttaatcatatcttgattttaagtcttttggctttgcaaactcagttgggcttcaaaagatattacaacttttgtcatcagaagattcagacgtccaaattcatgctgttaaggtggtggccaatcttgctgctgaaggtgtagtttacatactcgtagtctgaataattctcctatttcgtgatttatgtccgtgacaaattgcttatgttcttctagctccaacagttaattactttactgcatcatttataaacaccttttatattttccaaattccagatattaatcaagaaaaaattgttgaggaaggtggtttggatgctttgcttacgctgttgcgatcatcacaaaatccaactattcttagagtggcttcaggggcaatagccaatttggccatgaatggtaatcctggcttggctctctaatttttcttctgaatttgcagtctctaatatgtactcaatctaaattttgtactgcatatgcaacatgctaatcagattcattacttacttagtaaaggaaaatgcttgtgtcattattaatttctatcatccttgggattttttgttcacttctcatcaatttccatttacttcagagatgaatcaaggcttaataattagcaaaggtggagctcagctgttaaccacgatagcatccaagtcaaatgatccacaaactcttagaatggttgctggtgcacttgctaatttatgtggaaacggtaacttatgatacttcttactctgctcctttttcatactacttttcactttattttagagtgcatgtatctgaacatggccttatcaacagcatcttaaatttcattacatgtagttgttttatatggtaaactcaacagtttgggaaatagtgttactttactcatcaagagatttcggttatgctgctacagaaagtttgcacgctgtactacaggaaaatggaggtattaaggcactcatggaaatggttagatgtggaagcagtgatgtcattgcgcaaattgctcgaggactggcaaattttgcaaaatgcgaaactcgtggagtgattcaaggtttatttcaagacttgaagatgtatatttctattatatatgctaattgtattgttaaaatgtgctgagaattgaaaaaacatgcaggttataggaaaggtcgttctctcttggtagaagatggtgtcctttcttggttaatagccaattcaaatactacctcaacttcaaccaaacgacatatcgagcttgcgctgtgtcatttagcacaaaacagtaagctgtgttagaactgagagtagatagctccacatgaatagtagaaggctttgagcctgtttggctgtgttttca

SEQ ID NO: 265806 - DNA, 2095 bp, Cannabis indica
ttctctaattttgaatggaagattatgagtccctgagtatccacaattctatttagagcaattacttacgagtgatccaaactaactgaactcgtcttcagttcccttttgcggtgtggattcacgcttactgaaagaaatattaaatctgatgcgtaggcaacaacacatctgaagaggtaccaataatgagaaatcaaagtgcatacaaatatttgttcaaaaaagggcataaaaatattaccaatcaaagaataaaaaaccagtatgctttccaacacaatttgcaattcagttatgttattttctaagatcagtttcagctataaagacccctaaacatatcctaggcataacaaaaattcatcacgtcattgactcattatctgatagattccacaataccaacgacagcaataggcagaatttagatagaaagatgggggtcttttattgagtataatagcataaataaaaatactcaagtattcgatagacctggttcacgtagtcacttaaagaaactgtgtctaagaacaaccattatcaacaagaaaactggatgaatattcaatactcagagcaagttgcgtaccgatgcaaggcttggtcctctgaaagttttcctcttgctctaaaccagtacttcaaactacaatacagttagtgaaaggtgccaataaaagagtaaataaatgccaattttctcctcaaaaagataagttaaggaaattaaactaacaaacaaccccttaaatgagaagcgattgtaggcttcaaccagagatgaacttatacagcactgtaaagaaagcaaaccttggaggagattttgtctgattggttgaagtattcggttcacaaaaacgtatctctatgggccaagggacaaagcttttagtagccaccttgtttcgatatgtcctgaatcaattcattctcacaaatcatataacaaaaaattgacatctttatatcagaaatgaaacttcagtgtgcattgtaactccctttcaaaagcacatgcggctaacgaggcaagcatggaaaagtcagttgcttaatacatctcaacatatcaaaatagtgttcaacaaaattactctttaatggacaatacatgaataatataaatcttcaaatttaacagtggattttttgttttaaggttgacctaacatttgttgtcacaataataaagttatgcaaaagctagagctagtgtcatggaatattccagttaatgtttgatgcagaaactaatataaaagaattagaaagacctttaaaacatgaaaagaaatctaccttggaagacgagtatccataatccgctcatttcgtagttcttccatattgaggagctgtagcagataagagttcaaatattagcaaagcaattatatataaatatatatatcagcaagcactgttactcaccgtctctggatcagacacagatggcattagtgattcctggtgatcaaaaccttcctcatctttctgtaaaatcagctcaagaaaatattattagaaatctgagatgttgaaacagcatggagcataatgcaagaaaaaacacacgctaaagagctcacaaagtaaatgcaggaccaacataaaaattagcagtcaattaatttgagatgtataagcatactgtaccataatctcacaagtataattgctataataattttttttgtttgggatgaattactataatattttattacagaagtgttgatacaatctattgacctgcagtaaagaatggtgggttttgcagccaaccatgcctacaacgtatttttagctttacacttgatttaaaggagggaggtatcaaaaaaatgctgggtgattttagaaaactagaagtaaatgctatccaaattcaagtcacaaaaaaaaaaaaaatcttaataaaactccaatgattaagtgtgtacttgaaatgaagcaagcaacgtgaatatgatgattcctttctgtattgcatctactcttcgggtagcaaagcttctcccttcacgcagtcggtgtacttgatatataattggtactgcagaattttcaaatgaactttagttcc

SEQ ID NO: 265807 - DNA, 1035 bp, Cannabis indica
actaattttttaaaaaataataatgtttggggggtaaaaatcaaacttagaaataaaaggcctaataaaatgacaacgctaaaaggcccacaaaagatgaatgcatccaggcccaaagatatagaaggcggcccaacccggtgcggtccagttattgatccttaagggggcgctacgaacaaaaaaaagaaaggaaacgataaacgacaagaacaactaagaaaagcactgacggaagcagaagaaagaacgggacggaatagataaccgacagattaaagatcaactgtaagtaaaactacaaacgggaacccaataaggcacccaggtaacttgccgacggaggaagtacctgaaacacaacaaagggaggacatcgaggtaacactactattgagacaaagacccccgacggacgaaaactcggatctcttcagacaagagctccaacagaaaaagaaggtcttgggcacaaagtgaaaaattgatactctcaagggtgcgatgctgacggatacgacaccatcggatttagggaaaataatagccataaaacccattaaaaacacaggcacgtgtagcactaaaattatctattagaatacggacacgtggcaggagcaaaaagaataaaagagagagaatacgtgtcaacaatagaataggaggatgatagatcatccatgcaaaagaaagacgtaccatataaataaatgagaaaaggacgtaaaggaggcagattaggaactgggaaaagggagagctcacaaaaagaaattgtgactgttttccaccaaaacaaataataatttaaattaaaaattaataatttttttataaaatattgatattattttttaaaataaatatatcattaaatattattataaggtataaagttttaattgtatacaagtagttgttattctctatactcctaaaatagataaaactattaatagaaataaaaaatttatacatagaattgttatttaaaaaataaaacacactaaaaaaactaacaatatttttttt

SEQ ID NO: 265808 - DNA, 1078 bp, Cannabis indica
gtgcgtttggtaactacttttttaatcaagttttttagtttttaaaattaaaaaagtaaaaatattttccaaaatcatgttctataaaactatttttactttttaattttttaattaagaatctaaaatttttttttaaaaaaaaaaaaaaaatcacttttaaaattttttttaaacagttttttttttaattcaatattttagactccgactccaacttaaacccttagaaacccaacccagacccgaccccagacttggactcgcccccaatcatgacctccctggacccgacttaaataaatcactaaatgaaaataaaaataatatttatagaacaaacttttgtttttatatttaaaattgaaaaataaaaatggttatataacacatttttgttttccaaaaacaaaatttaaaaacaaaattttaattttatttttgtgattaaaaaattaaaaaaaataaaagtatgaccaaatgccaccttaacttttttctcatttgtttaattttttttaattttattatttaaataaaaaaactaaattacttttcagcctattttttaataattattattcaaattttacttaaaaaagatgtttattctatctttctaatgatttttaattgaaaactaaaagaaagaaaaaaaaaatctaaaataccttgcactatcctaaaaatatatattttttaatttataataaataaaattaattctatatttttaataattgttaattagacttttaatataaatatatatttatatattttgactactctaaacacattattttttgttaaagttatagtgagtatgaatcattttaatattattaatttattactttggtagaactttttattacactttttaattattattaaggaatatttatgtttataggtgatgtaaccttttgtatttttttttccacttaataatttattgatttcttctatcattattattttattttaataaataatatttacatgtgtaaatatattggcgggtcccttcaactaaatttaaacataaaccaatctaatatgtatataagcgatc

SEQ ID NO: 265809 - DNA, 616 bp, Cannabis indica
gggcacaaaacccaacatagagacccatatctgtttaaaaacttgtatgttcttggtctggtggatgcattttgatttgattgtagcctgagtaggcatccacgaagcttaatatttcttgccctgctgttgcatccacgagctgatcgattcttgtaagcggaatacagtcttgagggcatgccttgtcgaggtatgtgaaatcaatacagacttgccatttcttgttcggcttgggcactagtacgggattcgcgacccaagccgggtagaaagcttcaattatgaagtcgttgttccgcagcttttcaacttcatccttcagggctattgcttgttctttgtctaacagccttcgtttttgttgaactggccagaagttgggatcgatatccagaacatgtgaaatgatagaaggatcgattccgaccatatccccatttgaccaggcaaaaacgtccaggtttgctctcaaaaattttatcaattctgattttacttcgagcaacaaaccttttccgatctttagctttctggtcgggatatctggattgatttcgatctcttctaattcttctacaggtccaacattgctatttgggtccccaagtcgagg

SEQ ID NO: 265810 - DNA, 568 bp, Cannabis indica
cgtgtcccagtatatttgaaaacttttggtcaaaaagcagtatttatgtaaatttccctaatctaatctaaagatgttataacaaatctggttacattttctgtatctgttcgtgatagaaattatcttaaaattggttatattcaaaaatgaaattattaaaaattaagcttagggttctatttttatcattttaaaaaatataaggtctatattattatttaacaaaataaaaagtccaattaataacttttacaaaactcaagatccaaaaatagtatttatccttataaatacccataaaaaatgctatgtttgaaggagttaccgtcttttctatcatttattcaaaatcgcaacaaaaaaaaaatgactaagcacgttcacattacattttatgtttcgacgtgtaaatataatttattatttttatatgaaaaaaccacataaatttgtaagaactttttctcttttaattttttgaaattaagaacttttaaataatttatgatgctgaaaacatgattcaaccaacttgatgcaggcaatttttttttactttttaata

SEQ ID NO: 265811 - DNA, 660 bp, Cannabis indica
gtgttattcacttgtgattgaaccttgtaaaccttgtgttcttactgttttactgctacattattaattcttgtttctggtttattgcctaattgatttttttggtttgtgttaattgttcagctatcttgattgatctgttttaatgttcttgaatggtgattaaatcaccacacaaacaaataataatactttgacaaaaaaaaaaaaaaacaaaataataatgctctcttcgaaaaagaacaacttataaattccacaacaaacaaataccttaaatctcataaatcaattcatcaacctttccattttctaatgttacgagtaaatgttgtgacttgggaaaattatttgtatactaaaaatcttaaatattgtaatgaatgtatatatatctttatatattaaaagtacctatgtaacagcatttcttggtttaacagaatatacttaaaagtaacagaatattctgttaaatttaacgattactttgatctcacgttaacaaataaacccaataattaaactaaaaaattaaacaatcttttaaatattaataatctctttttaaattaaaaaaatcatcttagccacatatctctctaacaaacctatcttgggagaatattaataatttttttttatttttaaaaaagaaaa

SEQ ID NO: 265812 - DNA, 935 bp, Cannabis indica
acctgatcttcgccaacaactcgttccaaagcaaaaggatactatccaattgtgaatagacaagttggaggacaagttcaagagatatcaaatgggggaattagggagaaaatttggatacgactcagacgaggagcttgagccgtaccacccagatatcatgaatacactttttcccttggaatttaaaaacccacatgtctcatcatttgatggaaccaccgatccagtctcacatttgaacaacttcaacacaagaatgcgagctagtaatgtgacaaacaatttacgttgtatcttgtttcccacctcactagttagagcagcaagcagcaagttcaacaagtttactgaccattcaataacttcctaggaatagttatccaggaatttcaagaaacagttccaggcaagaagggatagacaacccgaagcggcctcgctaaccaatataaagcaacaacctgacaagacacttaaggcataattaagttgttttagcaaggttgctgcaagggttagaaatttggatgatagtttacaacttacaacacttcaggtggggatctttactgatccatcaactgctgggggcgagctgtgggacgacttacagggtcgtccagtgagaaacatcactgagttctacaaaagggctcaggtatttgtttgaaaagaggaagctcaaaaagaaatgaatttgttgaaaacgggctcgggaggcaaacccagcaatgtttcgacaagtactatctcaacgagagttgataactcgggggcttttggctcgaagagaaaggacggttctaaagaaccgtcaaaggataaaaagaaatagaagaagcacgataagtacgtgccagtatatacaatttataccgagattaatgaaactcgagagaatatttaccttgcacatgagcaaaaggttgcct

SEQ ID NO: 265813 - DNA, 505 bp, Cannabis indica
acaagtgggcttccactgagacaccctaagtgtccctctcgatcagagagggaagatgtatacacgtacctaaatagaggatgtgtatctaacctctttcgaaggagaagaccggtacaagacgaagtaagttctagtttggggcactcaaggtctcgaggacacagttgatcaggtaggtaaatgcgagaagggagtagaccttgacgttatgctgatcaagaaagcatgagaaatacgcgaagctctcaatctgagaattactcagaaacgagatctatgagtaatcatgagcgaagacaacttgatcttcgtgaacatttgaaacgaagataacccaatcttcgtgagcgattaaatcaaaatgcacttaacttacgcatcaacttaatgcaaatcaacaacaagtggatcccatccagttgcaaatcactgagctagaggataagttcaggaagtatcaggatggggaacatgggaaattacctggttatgactcggatga

SEQ ID NO: 265814 - DNA, 652 bp, Cannabis indica
tttttttgtttctcattggtttcccaaaattgtttcacaaagcttgtctctttgtttcctattttctttgtgtcattagtaagccagaaatttaaaattcttagaaaaaaaagagggaaaaaaataaaaaaaaaaaaaaggaaaccaagagacaaaaaaaaaaagggtctggaaacctctcttcatttttttttttttgtattttcttagtctccatagtctagaggcttgtttgccgaaacccggcacaagtgtttcaaaaatcataaatttttttttttagttttcatcggtgttcgtttggtttgtttattggaattgctgcttgaatcctctcttatactgtttgactagtttttaaagaacttaaagaagaatacgagtggaaaaaggctgaggtgtgggcttatttgagggtaaaagccattgaatttgagtgaaaacacaagtgaaattgagtgaaaaattattttgagtgaaacacgtgagggagtgtggtgaggtctttctttatctgttctaaatttatttttgtggaattcaatcatgtcaaaagttccagaagaaaataccagtaatgaaactacaccacctacggttccaaatctataacttcaagctttgatggggagatgaggaggatgatgagaga

SEQ ID NO: 265815 - DNA, 757 bp, Cannabis indica
tgccaattataatgattgctttcaatcttcagaacatctgaaattacacgcacaatgatacttgaaagcatatcaaatatcaagtatttagtttctgtttctttcttagccttaaaatcatacaaatcaaagtgatataacacttacggataaaatctttgaaaccacggttttatacaacactcctctttgttagttggccaatattttactttgttggtcaattttgatttggatttctatatggatttgtgtgattcttcattggcttgattagcaatactgtttggatatatgttgaaatttgtattaagaaacaatataagcacaaaatttcaaactaatcactatctatatacatgcacaaatttgttatgaacgattgtctaataaaatatacatggtacctgtatttgtgttgagtgattgttgaagaaagttcttaagaggactggtagatgttgactcatcccacagccacaagttatacatgttcattcacaaagattgtctaaaatggaataagactaatcgagataatgtccttgtttgagtatattgcacaaaacattacatacttaatagctatgtttttagtgaaacttttgtaagtgagccacgtggagttcgttagttggtctgttggtctagtgataaaactctataatatgtaccagacaaaatgttgtgatgtggctcaagcaagcgagcctaacaccccatgaaaaaaaaaaaaaaaaaaaacgaaaataaatgt

SEQ ID NO: 265816 - DNA, 544 bp, Cannabis indica
ccttggaaaataaaatatgttaggtttgcaaacatatctgattacttgttatttttctgaacttgtgtatgaatttattgaaccgaaagcttacttctgtttattgatatttgtagtgccaaaatgtacaacccacatcccaacactcatctagaaattgcctttaggaatgaacttgaaagtgtgaatatgactcctggtcagagtaatacttcacacttgctcatgatgaacataaaattccagaaagcagctaagctaggaattgttcaatctgaagagcaaaaagttcataactccgacaatcctactacttcaagctcagttgagaagattagagaaagtgatttcacttcctcaaattatccttcacaacagattgaaccaacaataataacaattcaaaaatgattaagcaatgatgctttagtttttgaatcatgtgttttagagaatgataaatccatctggattcttgattctggatctacaaaccatgtgacttgttcattgcaattgcttgtaaactggaattatttgaaat

SEQ ID NO: 265817 - DNA, 492 bp, Cannabis indica
aaggattctcacccatgaccagtagattccctgttgctggaattggaatggtccccttctcagctagaaactccattcccaataccacatcaaagtcatccatgcgaatagctacaaggtcaagttgcccttcccatccgtcaatcttgacattcacttttctggccactccactcatggccatggcctttgaattgaccgctttcatgcgacccgcatctttctttagtttttaggaccaccctctttgcttcaatttaaaaaatgaagttgtgtgttgtgccggtgttaatcaacaagctcttcgcctgcttaccatttaaagtggcctctacaaacatcaatcccttcccaggggctttctttcctccgacgccatgcttcttaagagcagccatcaatcgaacgatgcccatgtgtgcgcagtcttcatcctcatcatcttccccacatccttgctcctcttgagcaatggatgcctttatggcactc

SEQ ID NO: 265818 - DNA, 758 bp, Cannabis indica
tgacacatgataagctcgaagacagacaaaaaaactacacgaatataaaaaacacgaattaaatataaatttttgtatttaaattaattatttatttagtcaaaaaaatataaatctagtttttttaaggataactaaattatttttttaatatatattgtgtggtcatttaatataattttttttaaagaaaaaataatactaatgtactaattaagattaacatactaaattatttatatcctatttaaatttaaacatctattgcaaaagagaaaaataacacttgtataaaaaattactcgtatttcatcctgtattcagaccctcacaacacctaatagtttgttctacctaatttgattgttcaaactttttctctcttgagttatcctcacaatttaaataaagtatcaatttataatagagtgttgatttaatccaatccaatcaatatttttttactactaaaaaaatagtgtatattttcaactttttacaataaaaaaattaaaattcgaagacaaaagtaggagaaaaagaaagaaaataattgtgaatctatgtctttcgttttcgaaataactgaagacataagccctagagacataaataaccgaaaataaaggtcttcaatactgtaacccacatatcaaaaactgaaaatccgaaaacataggtctataaatccttataatctcatatctgaaaccgtcatcatatttggattggtgacatggaacttgtgagcattgtct

SEQ ID NO: 265819 - DNA, 538 bp, Cannabis indica
gaaccaaacccgaacccagacctagacttgggacccaaaattagaacctgaacaagaatagccgaactaggaccccagaacaagactaggaccgtgacaaggtcccagagccagacctagaaccgaacacagacctagccacagaccaaaactgagactggaactcgggccggacctagaccttaactgggacccgatcccaaacacggacttggacctagatagggatccggatacgaacctggacttggacaaggacccagactgggatcaaaatgctggacctagatctcgacggagatcctgacccagacccaaactttgacccacactcgtgacccgaacttggacctagactcaaacctacactatgatcggggtctagccctggacacaaacccggacacagactcggacccgaactcaaacacccacacttgggacttaaacccagaccaggatcagaaccaaggacttaaacccagaatggattcttgacttagatcgggattggaacttgggactcggacccaaccta

SEQ ID NO: 265820 - DNA, 690 bp, Cannabis indica
aggaatttcacaggactccctcggctctcaaagctttttcaaccatttcagcatacgtggttgcttcattggtggtgatcaccagatcatgcctgatcttcgcattcaaaccggccaaatacttctctttcttgctaaattcagttggtacgattcccactgcgagcttggccagacggtcaaactttgtagtatactcagtaaccgacatccctttggtttgcaccaactcagtgaactctttccgcttagcactgcggacggcttcattgtagtatttagaattaaacaactccttaaattcttgccaggtcataactgtgacgtcccgagtgagggttatcaactcccaccacacgagagcgtcccattggaactgaaaagtggcgcaggtcacccgatcattaccaaccactcccataaagttgagaatacgttcaatcactgtgagccactgctcagccttcatcacatcaagacctcccagaaacacttgaggtgcttgcttacgaaatctttcgtacaaggttccacacggttaccaacaacaggttgttctgcttgcaccactggaactgcaacggcctgagcaacttgctgaggaggcacggcaggaggaccctgcggcctcaacctctgaatttcttcatcctgctggcggattcgatcttgcatttcttcaaacctctg

SEQ ID NO: 265821 - DNA, 674 bp, Cannabis indica
ataatatgtagtaaatgtatttttataatttttattagctaatcatcaatcatcgatatatatatatataaaggagagatatgaggtggcgatgtggcactctaaaatcattccaaatagttccatcccttctgttatcctatttttcacactacgacgtggcaacacttactggtgacacgtggctcctatttcctacatctggctgaagagatattccaaacaaagctcagcatacatctgcacggatagagtctgcctgaccgaccagggtaagggtagatgattcgaacaatatatcaagacttacatcgtaaagcacaaaagcattccctacaatcaatggatcgcatcaaaggaatatgacaagctgtctaaatttctcaatctatgtattctaaatatgtaatgtgtgttcttactaactatagatattgtaagcaaaagggaaatctttcctcatgcatttagccctataaatagtgatccatcctcacagtaaaaggggtcgaaagaattacttcagagagatctaagagaaaacactcagagatttcattgtgagagctccaatagagaaaacaatgtattctttgttcttgtgttaatacaatctaaggggagtaggctattactgaactaaaggggccgaaccacttcaaaatcttgtattc

SEQ ID NO: 265822 - DNA, 504 bp, Cannabis indica
aacctgtgggtaggactggacatctgatccaatctaactttatttttttctattacaatccaatccaattaataattggatttgaaaaaccatcatctaattctaatctaattagagctcaaaatccaatctaatccaattactaattgtattggatcaattttttaattggatatccaattacacacttaatttttaatattaacttaaaaatatgaaaaaaaaatataaaaaactaaatgttaccatttatttaaatttaatactctataaagatatcatccttacaaatttaatacaattaaaaatttgtaataattaaaataacaacactgtcatgtaataaaatagtacaaaacataatgaaaataaatacaaaaacaaccaagagttacaaatttaacatataataaaatcaaccactgaaaatataattaaaatatgtattttttttttaattttttaatatttataaacataattgaattggatcagtttttaatt

SEQ ID NO: 265823 - DNA, 4761 bp, Cannabis indica
cacatataaagtagtgtaatatataggtataagataccactcttttaagtacctggtgcaacgtagccaaatgagccagcaaaccatgtgtttgattctgtgtttccatcaaactcaaccagtggctttgcaagcccaaaatcccccagatgtgcctccatgttcgagtccagcaagatattgctcgacttaatgtctctgtgtatgatcattgggacacaatcatggtgaagatattccactccttgagctaatcccacagcaatctttaatctattttcccaatcaagactcctcttcttcttggtagttaaaggctgtttgtgaagccaatcccaaacgcttccattctccatgtactcgtatatcagcatattagcaccagctcctctattgctacaatatcccactaactttacaagatgcctgtgtcttatcctccctagcgtcttcacctccctcgtgaagcttttgttagctaggagatcgtctttggatgaaatcttcttgactgctacagtttctccattggacaattctgctttgaagattactcctgaccctcctgagccaattataaactcactgctcagattgtgtgtagcttccatgatgtcttcccatttcaaatctcgctttgctgaaccatttggaaagagaagcctccgctgagtggcagaagaacttgatgagtatatgtagtttacatcactggctctgccataagactctttcctgtgtctgaaaaacttagctgccactaataacagcagagcaattgcagttaatgtacacactgcagaaattaccacaactaatactgggcttaggccagctttctgatttttagagacagtgcatttgtctagagggtctccacaaagttgaaaatttccctggaatgcttcaataggccagtgtgaaaattgtttccctaacttcccttgtaggatgttgtttgagaggttgagctttactaggctgctcatctcaccaacttggggagggacttctccaacaagttgattactcgaaagatcaagggcttcaagttttgtaagcgacccaatagcaggtgggatttcgccactcagattgttgcggctgaggtccagaacgctctgaagattctgcagttgtccaatctccacaggtattactccattgaagctgttctcagaaagcttgagctcataaagcttggccaactttcctatagttggaggaatctgccccgagaaatggttatgttgaaggttgaggacattaagtgaaaccaaattaccaatatcttcgggcacagttccattaagagaatttccatcaagagaaagtacaaggagctttgaacaattgaaaagttgtcgaggaatcgaacccgagaacatattagatgacagcctcaactctcccagctcaactaatcttccaagccaggctggtagcataccggagagaaggttattgtttaaaacaacatgggcaagtttgttacaacgtgagagctcacctggtatggaaccagtgagtgaattgccagagaggtctaacaatgacagttgatggattttccccaatgtccctgggatattaccagtaaactgattgcttcctaatctcaacctctcaagtagaggagaattccccagctgaggaggaatctcatgatcaaatttattgtcagttacatcaaacgagagaaaagaatgagaagtacacaaggcagcaatactaccattgaatctgtttctagagagattcactcttgtcaaatttgatagtctagctagcgaatcaggaagattaccttcaagggaattgttatacaacataagctgctccaaagcaaaaagagaaccgaaagtggcaggaatgccaccagagagatgattatccgctaaatcaaggatagtcattttctgacagtttcccaaagttgctggaagtccccccaccagcccattctgcctcaaatgaagtaagttcaaatctttaagccttccaatagtgatgggaatcgccccagtgaattggtttccgaaaaagtcaaccatttgtagacttgaacaacttccaatctccatgggaatttccccagatagctgattctcatacagataaaaagtttcgagctttcccaactttccaatctctttaggcagagtgccctgtaaattgttgtggtacagcgtgagagtcacgagattggtgaggttcccaatgaagggagatatcgaaccggttaaggtgttgttgttgagcaagagatcagtcaatcccgctaaaccgtaaatttcgaccggaatagacccattaagcgtgttgttggataagtcgagctgagtaagcgaggtacatttactcagctccaccggaatctcaccgtgaacttgagtctctgacaagaaaagatgctccaaactggtggcgttggagcatatttttcttgggattatgcctgacagattgttgtttgatagaaccaagaaccccagttggcccatgttgccaaactcccctagaataccgcccgtgagcttgttgtgtgataaatcaagattataaagattgctcagttgagtaaaagacttggggattggaccttcgagctggttcccagcgaggttcaagtagaccagttgactcaattctccgagttcacttggtagcttgccggagaggctgttgttgatgaggttgaggttttggagattttggagatgacccaactctacagggatcgatccattgatgtcattgttagccgccgtgaatatttcgagactggaacagttgcctaactcggctggaatcggaccgtacagctggttttcttgtaagataagattttggagtctactaagtcgccccagttccggcggtattggaccggtgagactgcacgaagccaaacccagagcttccaagttgagaaggttcccaaacgatgccggaatggggccggtgagcccaacattgtcgcctattcgcatgactcggagggtggtaagggagccaagctgagtggggatgggcccactgagttggttagtaaagagaagcaaagattccaaccgagtaaggttcgaaagggtgggtgggatgggcccagtgaggtggttagaagaaagatcaagctgaaccaggtctcctaaacgacccactgaaggagatatcaaccccccaagtgaggagtcggataggttgagccccataactcgaactgacccatcaactcggccacacgaaactcctctccacttacagaagttggtattgttatgactccaaccatgcaaaactttttctgggtcatccacaatagctttctttatctccaaaagagtcctcaaggtggagctgtttcgatcaattttttctttgccttgtaccaatacagtaaacccagatgagataactaagaaaaccacaaaaaacagagacttattacaactcatatctactttcactctttgttgtctcttcacaatgataaattaaaacgtaagctcactcactcataatactgtcgtttatagtgtatagtacaacttcatgaagtgagctaagctaccattacatgcagcgtgtcaaagatgagatggtagctctgggcggtggcattagctgtacttgatcttgggttgcgataatcttgaatgaattaagagagcctgggtgattcttctttattattggaaacaggtgagaacagcaggataagaaacttgaatgagaccacaaagtttgtcagccattaatgacaatcttttaggtatagctacctattttctactactgctattcagaaggagtcgtattggaaaaatgaaatacgtgtatatatttatatgcatattataataatataatgtgtgaacgtcaaacttggtcagagaatcatttagagagaagaaaaacaatgcatagaagaaaagtcatcacttacttgactatatatgtaatgcaaatgtgaagataatagttaaaagatttgggttacattatacatagagagggagatatgcagtggttgaggtgggtttgccattagtgtattagctccaaagtgaaatagtcgctactcaagaaagcgagcggttgagtttcctttcaaatttttaaatataaattttttttttcatttgattaataataaagagaattttgagcattgttttgaataattgcaaagtcaacagactaaccccaaaacccttctcatacctcacgtaagcaaacaaaaccttccaaactcaaacttaccctcctttttactaattaagtacatctctatcttttccccaataaaagagtacatgtctatctctttctctctcttaatgcttttgttcgattattaatgaaacaatatgcttaatgggatgagactaccaaatcctactgtccttttgtgatctccttttatttgtttggttaagtaatcacaagtgccaaattagttgccaaatgtgacagctttatattaatactaggcggatgatattttatatgttataatttatagagttaattggagtaaacatatcagagttaataaaattgtaatttttttaatataagtaattgtattttaattatgttttttaaaataaaaataattgaccttaatgttatagtaatagttttttttttttttttaaaatagtgtccaaaatagaattttaagaaatatagaatttaaattgataattcgtcgataaataatatttaaaatagtataaatcttatttttttaat

SEQ ID NO: 265824 - DNA, 1264 bp, Cannabis indica
tcatttgccttttcactgttgcccatatttttatttggcttttagggttctcgagctagagctctttacaaagctggcttgcgtacacctttgtcaattgctgaagcatctgttgctgagattgtcaaagctcttttcgaaaagtcttcatgggctggacaaggtaatgattggaaacccttattaatcagaattttttatattagttagcataagttaagaacccttgtgtatttggtcatatataggtccacttctttacgtctcccttattcagctgaaaaaaaaatgtaattcaattgttctaaaccagtgtaagactaaaaattttgttttgactttttacatgtctttaaaaatatctttgtaggagtgcagaaattgttactggggtttatttcatttttcttaatctttggtttcatgatcctcatattaagaagtttactattatcttataacgttcagctcaaagacggatacagctgggagtggcaaagaagatcaagaatggagcacgcaagatggttctcgaaaaggctgaagaggcaagagttgctgccttcgcagctttcaaatcactcggactcaatgttccacagtttccaggacaatcattgtcaactgctgtgggaaattcctatgagcaaggtggtgctgcatcttctggtaatgatacgggcaatagcgctgttaatgtcgagcaagtggaacgtgcagctcagccatctgttcaagaaaccgtccattctgagaaagttgtgtctgcaagtgaagagaagataacaaagacactaaatacgagtgttgtggcttttgaggtaaattcaaatgctgtcgtgcctcggaagtttggtctcgatgaatctacagtcttaactgaacaacctgtcacccttcaaactgagcatgaagctactgtttctcattccaaagatgataatttgacacacctaattaagccacaagaagaaggtgatagaaatatgattggtaatcaagccattgatcctcaaccggggatgcagcagagtaacattcgtttatcttgtggcgttagggtcagtgctaatgagaaaggccctatgcatgcaactaatgttcctggtggatttgattcttttctggatctctgggaaaatgcctgtgagttttgtttcgatgtccattacaacaaaagatctgaagtgaattctgaggcctcttttgaagtacacggaatagccatctgttgggaaaattctgctgtgtattatgtcaatct

SEQ ID NO: 265825 - DNA, 1446 bp, Cannabis indica
cttccagaggttgcagaatactggaaacaggtcatcaagatcaatgattaccagaagaacaggtttgtgaaccgcgttgtttcctccatgttcaacaccgtttcaaacaagaaggtagccattctgggattcgccttcaagaaagataccggtgacacaagggaaaccccagccattgatgtttgcaagggtctattgggtgacaaggccagggtgagcatctatgatccccaagtgacagaggaccagatccagagggaccttgcaatgaaaaaattcgactgggaccatcctcttcacctgcagccaatgagccccaccaccgtgaagcaagtcagcgtggtttgggatgcctatgaggccacaaaggatgctcacgctatctgcatcctaaccgagtgggacgagttcaaaactcttgattaccaaaaagtatacgacaacatgcagaaacccgcctttgtatttgatggcaggaacgttgttgatgccgaaaagctgcgtgagatcggcttcattgtatactccattggtaagcccctggatgcatggctcaaggacatgcctgctgtggcatagagaaagaaaacattgttcggttcagttcaagtgaggccttgggcttcagacacattcaataccaccacccttgagaggcagtcaattggattctattatattttttttgttactttttcctaatttgctctttttttttgttccttcttacttgcaacattgatcaggatagtgattcaagttcggtgcaagtaagaagctttctctgttttgccttgcattaaatttcaacttgtgggtactgtctgttactttgttagaagacatgatatcataatttgttgttccattctcctatcataattagaatgattacattcttgaaaccagtcctctttctctctaaattatataaatatatatatatgcactttttatagagaagtatagccatgtttaacatatgaatctggaaactgtggattttggttagttgtctgtcggtgttaatagttgacaacctaccttataccgaaaaggctattgttgaggcttaatattatatgttgttgaaaaatattataggtaaatcattcgaaagctcttgcttatttggtggttatttttttaagggattatttggtggcactttatagaactcgtgtcatgaaaaatatttgtatagtaatctaataatttctattcacttatatactatgagagaagttggtggaaaacacatggatgaaaaagaaaagaaaatagaatgcttctaatgattctcctagttttcttaaggaatcacattgactaactttttatatattttttgtatatttaaaaaattgaaagacattttccctttatttttttgtacgaatttgattccactattttaaaaacgattcctaaaataccccctaaaat

SEQ ID NO: 265826 - DNA, 854 bp, Cannabis indica
ataaatgaaacgcgaggaacgtcaacatttcatcaacaattgtaaatgaatcaatcccaataaaaatatctaccaacctatattcctataaataggagcagaatctatggaaatagggacgacaaaaaatagatagaaattctattattttcaaatattaagattagtattttgtatcccaaaaaatatccttaataataagaactcgtggagtatgtagattttaactacaaaactattaacacagattttcgttaacgataatgagcctatttttgtaataggtttagcacagaaattatcaaagattaaagaaaagtagtagagagatataacgccagattttttttatgtggttttacagttaactctacatagtccacgagtcaattttattcaaacttttctgatacagaacaagggttttttacaactagagtattcttttttctctcaaggattttccctccattttttggtataatctgcccctatttataataacatagcttggaagttaattacattcaacttcgaatcccacaacaatattttcttgaaattgtgggccttcattacgctccatgtaaataaatgcagttattatttgaaaatttcacagttgtgatttaaaccgcttttaaagggtcaacactgaggtggattaagatacactgcaaagcatatctcgctgaggcgtctcgcttagtacatgaataccttggtttatccatgattcttccagcaatggcatgagcaccaatttattgagcaaacttaagaactgctctttgaccataaggccttgcagactggacaatcatgtcttaggggttctcaatagcaacaataac

SEQ ID NO: 265827 - DNA, 983 bp, Cannabis indica
agatgatagatgatgatgctctatgttgaaactctttcacatttgtagctataaaataaagtaataagaaccgtgtttgttgggggtttaaagttgctttttcttacacattatgggcagaatttatttcagttatgttagtcaaaagtgggaaggaagatcagtagaattaaaagtgatttttccatgtgtcatgctcaaatgcatacttgataagctatcattgaccctcttaatcatttcaaactaaaagtatataaatttaaggacagttacttggaaagtaactgcttgattttcgctggtgtatacctaaaaagtcttcaccatgtgtcaaagggaaaacattcttgaccccatgtttgtgtacaaatactactcgtacgtttttaataaagccttgtacgaaagcgtaataataaaagaaattaactataactttttcattcacattttgtatgattcattcttaccttttttttacctttaatcttgtttaaacataggaccaataagttactaaggttaaaccaaagcagtaaaaaaaaacgtctaatctagaagagtcataattgaagtaaaactacaaaataaaggataagatcaaaactcttatgagccaaaaattaaacatttaactgtttacgtgtgataaaactacaaattacttaggtatgaagcaagatcatgattgaatgaacactgtgcaggatgggttgacctggcttttgaatgacccagagaaaatcttccaatgattttagctgatcgtggctatgacgtgtggattgctacactgaggcaccaggttcagccgtagacacaagtcattggatcccagacacccgtaaattctcttcctctgctttatttactctgtcttctttacacacttactaatggtgtatgtatttgatatggcagaatttttggaattggtcttgggatgagctggtcacattttgatttacctgcggtttttt

SEQ ID NO: 265828 - DNA, 512 bp, Cannabis indica
ttctatttatactaatctttagtagtaatttgtctccctgtggatatgacatataacccgtttactaatgcgactgcagtgtaactaattgggcgacgtcacctcttgagtccttagttgtgttgttgaagtctcagcctagttactcgtcattacattttaacgtacctctgcaaagtacaaccaaacccatttctcaaatccgattccttaaggtataatgcaatcgtaacattcattgcccgaatcttctcaaattctctatgaaattctatttttgaatacgtgtaggaaaatgtgtaaatatgattcatgaatatgttaatcttaaacttgtggttgacgttcatagtaatacgttggtagcatggaccgtggtgtgcatcagggaacacgagctccaaagcatgaacaatgctttgatgcctaactaacaggaatgctaagttatcaacatcactaatcgtttctttcaagtttctcataaaaaaggtccaagagttgtagttttc

SEQ ID NO: 265829 - DNA, 542 bp, Cannabis indica
acaaaacacagggtccaattggtaacttttataaaacagagggtccaaaatggtatttaccctatgattttcgcactcaactaaatttttattaatgatttttttttataattagttaatgattaatttatgaagaataaagttttgtagggtaataatgaaatggaaagaatttgggaccttttagacttaattgtatttttcaaaactcaaatgtatttcccaacttaaatggaaagttgataaaaactatataaataaagttcattgagttttacaaaaatgcaaaataccctaaaatttaattgattactattaataaaattacatgatttattttaaaaaaaaaaactaaaaaataataataataataaaatgccttgtatgcccgggtgtttgcggtgcaggtttaagctattttttcaaaccaaaacacatatgcagtttttgcaatggtacagtgcagtttaagcggtttacactatcatcattatcaaatattaaaattaaaattaaaagactatcttatcaaacttttaacg

SEQ ID NO: 265830 - DNA, 691 bp, Cannabis indica
ttctcataataactcaaaaaagcatgttgaacaccatcaggagagtcgaaccattgttcatcttcaatcgagaagatcttgttttgcgtccttcttgatttcagagaagcatggaaaaacactgaattctcatctccaaatgaagcccaatttatcttagccttctgtgagagaaacattgaataggccttatgaatctccttataacttctagtagcttcttgttcagcttccatcaattgcaaggaagacggatttttggtcagtgcattctgggctgcaatcagctcattctttgccatcaaatctgccttttggatctcagaaaaaccctcttgatttatctgtttcagagttggtttcaaccttttcagcttggacaccaccttacacatctttgcaccattcacatccccctgccaggattgtctcacttttagatcaaaatcaggggctaatttccacatattgtaatacctgaaaggcttcttccccgagcaccaatcacgataaatggacactaggataggactgtgatcaaaagttaattctggtaaaaacactgcttccgagtctggcatagcatagctccatcgcgaattaaccatggctctgtctatcttcgaaaatattccagcttcaggctttgtttgttattccaagtaaaaaaagacccagtagtatttcagat

SEQ ID NO: 265831 - DNA, 536 bp, Cannabis indica
agttttataatgtccaaatctatcaatcgacatagagctgattgtgtgactgacgaagctgtctgattggtgtgaacatcgaagttgctccgttgttcaagacccttcatgtcatagaattcaacaacggatcagatcagctggccattagttctacttgtagaagaggcaatagaaatttgtaattgtgaaggtaagcaagctaaaagagctcttccctttgccatgcatgattttctttactaagaaatattctattatgcacaattcattgcccactattattatcattattatttaaatttaaggatatttgtggcgaaatacttttaacatttacaattgttacatatatgactctaataaagaaagtgacggtaaaatgatcttatcttatgattttattgcagttgtatcttttttttagttgtaagtgtcagttcaaaaacatgtaacaatatatttttttaccttatttaatacatagtccaataataagtcgatatgtgcttttgagttgacacttaatggccaaa

SEQ ID NO: 265832 - DNA, 2123 bp, Cannabis indica
taaaaataaaatttgttgtagtgtataatatataatattaaattatgaattattatacatattttttatattttacataataaaaatattaatgataaattattgttagttatattattttttataaaaattttaattattataaattttgcattaagttttgtaatcatacattgaatggcaaatgctaaaattaatataaacatatatcactaaattaatttttatgtgaaatataacatgtttttaatatataagtaaattagataaaaaaaatattttttttggactaattatgaatattaagactgattagacacgtcgcataattaattctactagttcatgcattgattaaagaaacattttacacgcttattacaattataaccacacggccgtacacaactcataagtaatttccaataaaggacaaaatacaaaaactgaaacatatgcttaatagcatctctaattatactttttctaaatacaatttttaacttaaatagagagtaaattttaaaaaaaaaataaagtctaaccatataaaaaatgacttattataatagagaatatatagtgagttttttttatatttttgctaattttttttttaataatatctttatatataagatatgactattattatttgttcaacagaatattttaaaaatataagaatatttagttaaatttaaccatgttaataaggttagtattaaaaatttatataaataataatagtatttattttaaattaatttaaatatatataaatattaatgttatttattttaggttaattaaacttataccaattttagattataatttaaatatatataaatattcacataaaaaaaatatagataaatattaataatgttatcccattttttgatgtggcaacacatacgagtgacacgtgtccaacattcctgcacatgggcggagatcaatatgtcaagcagacttcaagtagcacatctgcactttcaacctacttgcccgagcagggtaaaaagggcagactatccgaacaggggcaagtttggctttccgaactacttaccaggacttgactacttcatgataatatcgtggagtccaagcacgaagacaatccctacaatcatgggattgagctaaagggatacggcatgctgtctcaatctcctatttcatgtattctatttatgtaatgaatattccttcctattatctatagacattgtaagcaaaagaaaaatcatccatcatgcattaaagccctataaatagtgacctatcttcaccggaaaaaagattaaaagaattgcttttagagagagatctaagagaattactcaaagattttattgtaagaactttaagagagaaaacactgtgttctttgttctcaaattaatacaatctaagagaagtaggttattaccatactaaaagggtccaaccttgtcaaatttaagtgcaattctcatttatatatagagttaattatttgacaataaaggtgaatatatgcattaattattgtttttatatatatataatagtaatatgatggaaagtggagatctcgtgtacatcaagaatatagagaatgatagcatagaaatcaatcaagttaattatcttttgttttacacaaatacatataatgttaattaataattaactattggcgatcatggaagatggttatgcatatatgataattaatacatgattaatgtttttaattaggaggtgaagaggaaatggctaatcagtttgtacatatatatcatatgtagagacaaattaagtccccacactcaaagaaaaaaaaattaagtccccacaccaccaactaattataattattataattttaaaataaaggcaatattattaatggccgaaactcatggcttcaattttgttctccccacacacaccacactaacacccagatatatatgtatggctatataacagaatttttagtttaactatattttttttaggtttaactaactttaacagaatatcttattaattaacagaatattttttattaattttattatattattatatttatttaaaaataaaaattatgtagacattttata

SEQ ID NO: 265833 - DNA, 799 bp, Cannabis indica
tttcatttctcacagacatctcttttgtcctttgctgctcagcacaaggtgcttcaacgagccgagatgctcgaaacagagcttcaccagacaaggaagcatcatgatgccatggctaagcaatggaatgattctcagtctgagctttctcgagttaaaaaggaagctgaagagcaacaaaggactctcaagaccgacctttgaaaatgctcagaagaagatccaagaactcaaggaggcaaacaaggctatccacgctgaagctaaaagaaagctcgaagaggccaaggttgacaccaaaaatagggtcaacaaaattaccagacgatcaatatatcaagcctggtttgctaatcctgagatggatttctgttttctgggtgaaagggctggagagatgcttgcatactacgagaagacaaaaagggaggaggctggagatgctgaagaggttaacatcaagaagaaccaactaagtcacctaccatgtagacttagtcattttatctctccttttttttatttagaaaaatagccttctggccgagacaatttttgcctcttgtggcatttgtaaaatacttttgctatgttggatggccaacataatttaattatatatctactttttatgcctcgtatatagatttttgagtttttgaatgttcactgcatcttatttcaccctctaaacatttctttctcgaatttagcttaagatactttaggttgaatgcatttccattagacttggttttctttgagaattttgagtagttatttgtctactacgtacata

SEQ ID NO: 265834 - DNA, 679 bp, Cannabis indica
gcacaaacatgcaaaaatataaattttcatatatgacatatataatgcattctcaattcaaataaatctccgtaaaataataattcataactaatatgcaagtttcataattaaagcctaattatctgctaaattataacttaaagttaagcggtctttacaattaacccccccgtaaaaaggatttcatccttgaaatctaacttgaacaactctggatactgagtcctcatgtcggactccaacttccagcttgcttcctccacatttccatttctctagagtaccttgaccaaagctatggtcttgttctaaaggcctttatcttttctgtctaagatctgaactggttgctctttgtatgataagtctcgttgcagctcaaaattttcataactcagtacatcagaaggatctaaaacgtactttcgtaacattcatacatcaaacacattgtgaattgcagatagagctggaggaaaagctaaataatatgccactagtccaaccttctcgagaatctcaaaaggtcttgtaaatctagggaacataactttcctcttttctcgaaatgcttgactcccttcattggagacacccgtaggaatacatgatcctgttatagtgagatttctctcacctagaaaccacaagaccagactcctatttaagggacacg

SEQ ID NO: 265835 - DNA, 621 bp, Cannabis indica
cttaacaaataccaatcatccaacctttgctatgaacaacgatgaagacttcaaaccatagtcttccagactagcctcaacactcaagataagagtggtcttgtagacatgagtagaagaagaatttctatcacagtgtgtactcaactcatgagacaatgtgattatgagatgaggataaaaatctctatccctagggggagagagagagagagagaattttgaaattatagagagatgatttcaaaaatttagagaagaaaaaactctttgtattttcttaactatatttctctaatttgttgttcagttagttgttattctgtattactaatatatcttatatatatgtagtattttataattagatatttaatcctataaaataaaaaaatattgtatttaatttgaaaaataaattcaaatgttataacagtaactaaatatctaaattctattaattctttactattttatattatcttcaattataaatatattatcaaataaatatttaattcaaataattaaaaaataatttttattttattttgatttatttaattaataaaataatcaaaacaaaattcattgagtcttatatgtcaccctacacatgtg

SEQ ID NO: 265836 - DNA, 3294 bp, Cannabis indica
atatatgatactaggatatatagagaatttatgtatgataacaggatatatataaagatcaattaatgagtaatatgaccagaccctctagagagagagagagaccatgctggttcacatcaccactgagatatatagctttagtcagtttgatgaaaaagcaaggctctttatggcgttttgttttgctctttcctttttcttttgaggaagaaataaaataaaaaaaaaaaaaaaaaaaaaaagaaaaaagaaaaagaaagagaataactgctgcaacagggagagagtgaaaacaaacatttcatttcttacttctttttggctggacttaataaaacataaacatgcaaagagttgagagtgttattaataaaagaagtatatccattatgcgccaaaatccaaaaatccacaccttttattcaaaaacttttcttcaagacctctatataatcaataatcaattattatttatcctattttttaatcaataatatgaatgcatcactaactaactgtctaactatttaatatgaacacaacccacgacagaggctaaggcaaaggacagtcagaaatatgacaaatttgcccaacacccacctggcctgcattgcatgctgctactgcacaatacaaatactagtactgactttttttttttccagttataaacggtgccgtttagaagaagctgagttggatattgaaatgggtttgggttgagttgagttgggttgggtttactttacctgtattaattgtgaatacagtattgggttgttgggttagatccctatagtatagtagtaaaagtaggtccagtaatagtaccagaagctgcctactgttatgaagtgactggagggacagtttgtcctttgcctcgtgaaatctattgaattgaaggccctgaagagagccctcagataccattaaaaaccaaaatacagtccattaatacggggacacccactatactttactttactactgctatatagctatacttgtaatcattttttcaaaaatcaaattaagctaaagttttttcttttacaacccttgtgacaaaatgaattagttctgtggatttagtagtacatatgtatataaatatattttcatttgttgtgtaatattaattaccaaatatcttctctttaatggagtttttaagtggtctaaaaggaaaagggaaaaaggaaaggaggagcgtagggtaaagggggcaacaaagctaaagaagaggtctttctcatacacagatccctatggaatgcgggaacgatgcccagcattgcttgctggaactcattctttttgtttagtttaaagggacttgctttgttcactctctctctttagaaatcttttcagagagagagaaagtgagtaataggagagagagagagagagaaagaagggcatagcatagcatatagattcagttgcagggagttggatttgcttagatgagaggttagatttggtccaatcagagtacactgaagggaaaacaaaacaaaaaacaaacagaagacccagttatttagtttcaaaaacaaggagagaaaagaaaagaaaagaaaagagcgaaagctctcaaaagaaagatagaaaaatgttttcggtatcattagtgttatttgtaatttgccaatgattgagtttgagagaaacatacttgcctagaatattttcatctgaagtgtagaaaaaaaaggagcaacctttgagagccagatgaagtccatgaataatgatgagaacaacaacaacaacaacagtagtaataataactggttgggtttttcactctctcccaatatgaaaatggaggccccttctaaccctcataaccatcaccacaacaaccaaacacaacaatcttcctcttcctctgctccaacaagctatttccatccctcaccccaacttaactatggactatactacggagttgaaggagaaaataatggtttgtattctcctttatctgttatgccacttaagtctgatggttcactttgtataatggaagctctaaccaggtcccagcctcaaggtttgttcaaaacaaagctcctttttttctttcacacttagaatcacttattctggttttctgactttttttttcttttctgaatgttaagcaacaatggtcacaacttctactccaaaacttgaagacttctttggaagtggaacaatggggtctcatcactatgaaagcaatgacagagaagtaatggctctgagcttagacaacagtatgttctttaatcaaaacccagaacacgaggagcccaacaaccaccaccaccaaaattttctaaaccaactacaacaacaacagcaacaacaacaacaacagcagcagcagcagcaacagagctctaggcaccaagatcatcaagcccagcaaattcaagctcagcaacagtattcatactactctggtctgagaagccatgatattgctgctgctgctgctgcttctgctgactgtaatctccagcttccgacaatggctgataatgggatttctgaaatgaagaactgggtctcaaggaactattcaggtaaccatggattggagcagaagatgattggtggttgcatggctgacaatggaggtgagtctggctctattaatggaatggcttatggtgatttacagtcattgagcttgtccatgagtcctggctcccaatccagttgtgttactggttcacagaagcagcagcaaatatcacctcctgtgaccgattgtgtagccattgatacgaagaaaagagggcctgagaaggtagatcaaaagcaaatcgtccataggaagtccttagatacatttggccagagaacctctcaatacagaggtgtcacaaggttggtcctttttcatttattattattattattatcttttcttgtttagtgaatcttctttaatgggttttggttaataatgaatcaggcatagatggactggtagatatgaagctcatttatgggacaacagttgcaagaaagaagggcaaagcagaaaaggaagacaaggttagagaacactttattagtttaaaagggcatgtccttttattgtctcttgtcataagaggaactgattcttattcttgtttcttcattcttgcttcgacccaatgatgccacttcaattgtttggctacatcagtttatcttggtaaggttctcttttttttatttttatttttttcccttttcatatgttgcttgttgccactttaatatatatatatatat

SEQ ID NO: 265837 - DNA, 1429 bp, Cannabis indica
cttccaccttaataaattaatgtcaaaaagagaaaaaaataaaaacgtggatataataataaaattagaatatataaaaagtagctaaattaaggcttttatttaattaattattagttttgataaaaaaaaaaatataagataagagcgacaatctcaactacaaaagaatgatacgtagtaatgacatgtatatggtgtaaatatatttatattatttatatttatgttattatattaaagtgtggttatataactattttttttaaatattacaatttaaatttattatacatattttttgtcttttattttattttatattagatgtggttatatttaatattacaattaaatttaaacttattacactaatttaaaaaattatttttctattattatttttttactcaaaaaaaatagaaaaattgtataatattaaaaatattatagttaaatctaaattataattaagtataaattttaaatatgttatcatgttttttttttatatatagtactagaattaaatattctttattaaaaataatataatttatagaataacatccaaaataaaataaattatataattaaaataaaaataataaaaatgtaagttaatataatattaacttataaattacgtcataattttttttctaaattattagataataattataattaagaaaagaaagtaagggcatgcaattaaggataaagttagtcagtgtttggtacgtataagtggataagaaaattggaaccaatacgtgggaatgataagacttgctatgaaaaaggtctaattctctatataaagatattcaatattttcatccctttttcttttctttctttttaattttttttatattttaataataagggtcacacacacacacactcgaaaaacacaaatatatatagccaccaatttttacataaatatatatatgtagagaaattaagaacattcatgtttatttccatggggacccacaaattcatttttatgtgtattgttttgttacagtcaaataaagtttctagctaattatattttacatcacatgcataatatattatatatatatatttgtaattgtaatgaataatgtttggccacatggtaagaaaataagagctagggttgcagttataattcatctcttattcatgaccatcttaaaccatatgaatatatatagatgtattaggtaatattgttaattcatatatatatacttagttatatattgatgtgtatttttagttgtatatatatatttttttaaaaaaaaaaagaaattttttgggggtaactacaataggtaagggagttatgtatcataaatatttatctatgttatagtgttcttttttaaaaaaatattgatatatagaaaaatatatatttaaatat

SEQ ID NO: 265838 - DNA, 640 bp, Cannabis indica
gtcattgtagtctttttttttttcgaggaaacattgtagagtcttctttatctatggttaaattattcttttttatttattttactctaaacttttggtaattattattatatatttttgaaagtatttttttttatcactagaaaaaaaaaaagttgcacttgaccgactttaatttaataaatataaattatattatagtatagggtaaatagtgacataaaagtactcatagttttaggatttgtaatcagcataaactcaatgatttttttttagcggacccaaattctagattatttggtctggacgagaatatagtagtatcagttacttttaaaatcctttttttaaataaatttaaaacggagcctgtactgacgaaaaatagagaaaatttacagttttacaaacattaggtacttatgtcaactaaaaaaaataattgggtttatgccgcttacaaactcaaaactttaggtacttatgccgctatttacctataatatatatatagagatgtacatgagagaacattgttattagatatatatttcttaaaattatataaaatataatatttaattatactaataacagtataatattaagtagtagtgttaaccactcatatattttt

SEQ ID NO: 265839 - DNA, 1377 bp, Cannabis indica
taactttttgggaccattttgtatttttagagctagttagagctactagtatactagtctcttgaggcacttgtaaagggcttgaaaaatctttataagagagataccattaagcaatataatactttattttctctctattattgctctaaacattattcttcaaactttctaactcttattgatcttcttgatttttacatcttcacttttgactttttacaatcttaattttgttgatgagaatcagttgtcaaacttaggggggcgttttggtaacacttttacttttttaaattttttcaatcacaaaaaatgaaagtgaaatttgtgttttaaaattttgttttttaaaaaataaaaatatgttctataaccacttttagtttttaatttttaaaaatagaaaacaaaagtgtgttctataactttcatttttaggaaaatattttcacttttataattgaaaaacaaaaaataaattaaaaaatgaattattatatagaaaatataaattgacactttgtttacaaaagtatctccataaggtgtcgtttataccttttatgtgatttaattactaaaatacctattacattatcacttacacaatcagacaatggttgcaaagtggttgctgcatggttgcccagtggttgcatctcacgaaggttctaatcaaatgatggttgcagggtggttggccgacggttgcatcagatgaagatttcaatcaacgaaagtttctgggtagttggctgaaggttgcatcagacgaaggtttcaatcagacaaaataactgttagcaaaatgtttatgcaactgtaatgcaactgttatggaaacattaaaaatcagaacagtgtttccacgcacgtaactctatctacatgtctctttatgattaaatatgacaaaattaaccattagaaatttagaaaacaacaaaaatacaccaggataaatatttttctatagtattgatgtaattatttttggattacacttgagttggattgtttaggaactctagttcaattttttgagatctgcctttcattgatctgaaaattgaaatcaggacattagttttatgcaaattaaactagatttccagtttaattttagtttcgtagtagtttttctatacctttttttttcatgaattcgaaacagcccatgctttgattgattctggtcgtcttctaaggtgaagtcgccggaattaatggtagttctctttctggttgaattttcattttggttgcgttgagtttctacgtggttgcgcgatacttgcccaggaaacattgatccttggttgaaggtgtgtgcaagtggtatttgtgtaaatttttttatttagattgtatatt

SEQ ID NO: 265840 - DNA, 681 bp, Cannabis indica
aaatgggatgtcgtgtgtgctacagtgcacgaactgtagcactcacaacaaaatagtgtgttatatagagcgtcattggatcattaaggagcagcatatttaacaaatacagtctccttagagctggtcttaatacacaatattattatttggataattgtgtcataactacgtaaaattttgagtttgtaagtagtataaatttaataattttttttagtagcgatataaatatttaatatttaaaaagttatagtttttgtccatttttgtcagtataaattctattttcaatttattaaaagaaaatttaaaaataattgatactacatatttttttatccaaactcaatagtttaaaatctggatttatatgtgtcatgtttaagacactaacaaagtttgaactgataaaattaaataaaaattaaagttttacaaacattaagtaattatgcggctaacatatcattaaatttatgtcgcttataaattcaaaactttaagtttacatatcactatttacctattattagtgttagtgtcattcaatatttaatagaagctgtataaattgtcatagggaaaaaaaaaaagcttattatctatttgcatcattttattatttttttagtattgtccttaatggacatttgtaaaacttgatacaacatttaatat

SEQ ID NO: 265841 - DNA, 1167 bp, Cannabis indica
acatacttacactttatgaaacagtagaaaatatgtgagagtgagatcattgacataacatattcggaaagcatatggattacactcaataaagaagtatcaacacaaacagtactctatgaagataatattgcttgcatcgttcaactaaaaggaggatacattgaaagagataaaactaaaacacatttcactaaatttttctttatatattttaagagaatgcatattggtgtccaacatattcaatcaagtgtcaatcttgcagatttattcacaaagttattaccaacatcaatatttgaaaagacgacatataagattgaaattcaatgagtaaaagatctctacgaatgcctaaatgagggggagctaattcatatatattgcactctttttttatcaagtttttttagcaagatttttaacgagatagtctttatagacatctaatagagagtgttatgaaatattatacatggatgtctaaatcaccaaattacttatcgccattagtgcttgattatattttcctttagtacattgatttagttttctattcttttagttatatttttgtataaatagcagttcaccccattagaataaatcattgagaaaatttttcattcattctctaattctcttattctctttctcttgtttttctctctattctatattattttataacattattataattatacttattttcttgtattttttatgactattgatttattttttatgaaatatttttataaatgaattaaagttcattcatgaagaaaaaaataaacatattgagatgattattaataaaacatgtgaagaattatatgaaattaatattaaaaaaaaataaaaatctaataataagaatttaaaattattttttttgaaaaataaatttcaataaatcttgataaaagtaataattttatcaaaaatgtctaatttaatttttttctaaggttttgttcaggcttcgcctaaggccttgtatgagacaaccctggtgattactaatttattgattgtattggcgaggtagccacccatgtggtttccatgtttattcgattctagttttaatctaaaatttatttcaaaaaagtaaaagataaaaaaaatcttgaaatttttacatgaaaaatcactttt

SEQ ID NO: 265842 - DNA, 635 bp, Cannabis indica
aaaataaatttgtacttttttttaatgaaaaaaagacaaaggaacacgagagaaaatcttaggggaatctaagtacaactaaaaagaataaagaatttcaattacggctagtataccacttttgagaacttacttgatgatctatgtatatgttaggtatgtgttgaatgttgagccaatcttctcctgtttctctcttgcaccttggaattaacagaggacactttgctatactcaaattaataagactctggggaagtcctactggcaagcactctaacttttccaacttccaaagattcaagtgttgaagtgaggtgaggtggtgaaaaccattggcgtttagagctgtaagcttatcaaagttctcaatgtaaagagttgtcaaactaggtgggagcagcccttcctcaggaaatgaatccaccactccactataattcccaagtattaattcagtcaactttgagagtctctgcaaattccattgcatacgactttctatcaccgtattgcatgatttaataatttgtagactttccaaagaaacgggcagtaatcccatctcggaaactgactccaaccttatacactcctgtatattcaatcttataagggagggatatgcaacatca

SEQ ID NO: 265843 - DNA, 813 bp, Cannabis indica
aaagaacacaaaagaaaagaaaatcatatatttcattcaaggaacttattaagcttaagcttgaaccatacaactcttttaaatattatacctatagctagtctaagattaggagacaatttttgtctccattttcaggtgttcttgcaaagggaatataacatataataataaatggagaatatttttagaaaatatagattgaactattcatttaatcaaaatactaagcaaatatatacatatacctctatatatactcttttatattccatgtaaatcaaagatattgtgtgtagtatatggtgtttttactatgtagtctcaaaaagaagtgcatatatcaatgcactattttgtgttttgaatagttataatttttttttatatgatggtagatatgataactatttaaaatatttacaaagttttaagaaatttaaaataaattataatacaaaaggtaggtttttaacaatctattttacacgtatataaaataaaagatacacgtgcaatataaactgtttgaaccttatttccgacacgttaaattattatgaattttttgaaagtttgcagaatgtcttaaataattgtgatgtaatcatataaaaatgttaatattgaaaaaccctgacccttcgaagcacttccacaggattttcgagtcggttcatttgcttgggactagagtcgtcgtcttcttctccgatttaggggtgtgtccagcctcaccacgactggttttcctagacgtcttttgatggggttttgtctctatatagaggaaataatctctctctctctctc

SEQ ID NO: 265844 - DNA, 1133 bp, Cannabis indica
tgagcattactattaggcaccagtgtgcctagtaccttctcgacatttggttagcgatactttctaaaagctattacattaaactatttgggacctgatacttagttggaccaatagtaatactgacacataggaaagtgctaggcaccactgatgtcctttagcatttctctaagcgaatgtacttgttatagtgagatttttctcacccagaaactcgagaccagacccctatttagaggacacgtatactcagatttcccaaagaaagctgagatgtccctgagggactcctcaaagttttaaacctcccttaagatagaatcagcgagaggcagcgagcgtgaccgaagtctaatcacattcaagacaagagagtagctcgcatacatcgaactatatgcgagcatcctccccgtgtccgtgtataaaccaggagatcgactctccataaatgcgagttggtcctaagaaccctgcagccttgataaaccaatatagacttgcatgtctgggttctatcagctctcatgcgatgtccacaaaaggtgactatctaaggacgcagacatcttaaacataatgttaacttgcgagtttaacatcagaacgtgaacaagccaactcgcagatttggaagacatgttgatgaacttagtaactgctattttattttattaatattaacgttgtttagtttaattattataattcaatgtgtaaaacggattgacaatgaatgcaatccttgtataactgatcggacacctgctttgtatataaaggggtgatccaactgtgaaatgacacctacgaaactcttgctacagtggactaagtagaccgtgatatgactgaaccactataattctttgtctcattgttatttccagtttttgttaatcatttctcattcccagtttgagtattacgccactctaggttgaatactcgcacttgttcttcatacaaattttcttctgcaattaataatatcatataatttggtgttgcgaaattcactcgacaacagtacttctcaattttgtcttccctttttttatgtctctcatccctgctcctatctcatttaatccgaatggatttcagggtagcacaattgtcattgggta

SEQ ID NO: 265845 - DNA, 1576 bp, Cannabis indica
aggctcttcgatcccgacccagcagcactggcagccctgaaaggtagcaaaatcgaagtggctttggatctgaagaaccaggatctgcctatctttgcttccagcccaccagccctccaacaatggttcgcccaaaatgtggagccctacctaaacgacatcgatttcccatatcttgtggttggaaatgaggtcatccctggtgaccttggtcactacgtttggcctgtcatgatgtccttacaaaatattctggatactaagaaccttcacggaataaaagtcactacaactcttcccggcactgctttgtcgacttcttatcctccctccctcggccaattctccgctcaggccgctgccgacctcaaaggtgttctgaggtgagccatgcatatatattaaccatattttcatatatatatacatgaaaaatacgaggagtattttaatatggagtgtaataattaatataaaaatagctcactaattataaaatatagtaattaagtgcatttacattagtgaaaaaagtttacatatataaatatctcggtggtaaattaataatatagttaagttaaatttctaaaactctataggtatttcatgcctataaatgtcaagttatatcatcaaataattttttttatttatatattgaaattaatttttttaaaataaaaatttaataacctagatcaattgtcacgtgacaatttactttaacacttaacaataaaattcttacagttgagagttaaacttaaatattaaatatagatgacaccagtaatcactaataccttctattagcaatattccgtccaaattatcttcttaccaaatacttaattactcacgagtagtgcattctaatatttctcaataatataataagttttatacttttttttcttttaaaataataaattttataccttatttctacacacatctatattattataataaaaagtactaattactatcttattccctatatattatactggtgtcagctacgtatgaccaatattttccttttaccacaatcaatcaacataatgacaatatcatctctctcaatatatatatatatatacgtttcagtttcttatcgagtcaaggatcgccgttaatgatcaacgtgtacccatacttcgcttacgcatcagacccagcgcacgttcggctagactacgcgcagttcacagctacagaagttgtcgttcaggacggtccctatggttacaagaacctgttcgacgccatggtcgactctttcgtggcagccatggaatcagcaggcgtgccagacgtggagctggtagtgtcggagagcggttggccttcggcggggaacggtgagcttacgacgcaggctttggcgtccacttacaacaccaacttcatcaaacatgtcagttcgggtgttgggacaccaagacggcctaataagcgcctggaaggctatattttcgccatgtttaatgagaatcttaagtctccaggggtagagcagaattttggcctattttatcccgatatgacccctgtttatcctgttttcagt

SEQ ID NO: 265846 - DNA, 693 bp, Cannabis indica
taaacaactgctaatttccaaattaactaagcgggctttacatgtacatgaattaatgattgagaaatgtgtttagttttggttgtatgcactgaagaacaatatttttttaagaaactttgcttttatattttttttaaattatttttttatttaatttcatatgtatcttgcacagaatattgaacattatatatattatttttttcatattgttcatatcttgagaaacaactattattatattttttatttctacatcaagtattggtataattattatttttttttttaaaaaaaaatagttgttagtggctttaaaattgttaacaaccatttaacaacgttataaaagtataaaaacaactgtatatataatttaaggaatctacagattttaaccactgaaactcaacgtacaaacgacgtgaaagcaacatgctcaaaaagcaacaaaatcaacaacgtatttacaactttaaaacaatggtaaaataacgaacaatattattactaaatataagtaatttttttttatatatatttacaatctcttcttatcaatcctcacactttattcaaaattagtataatgtgtgatcttattttacatgtcttaatgtaagagataagataaacttttgttttgacatgtaaaattctattttttacttgttgaacaactagtgtagt

SEQ ID NO: 265847 - DNA, 1216 bp, Cannabis indica
agggtttctctctagaagctcttagtcaccactttagtttttttccttgagcagggctcgctggctgtttcccggccttacgacgtggcttggtcggttcttgttgatctccacactattttcgatttcattggagttgttgcaatccttttgcatgagttctttccttctctgttttctttctttacaggtgtttctcaaagatttgagttgtgcattggctttagattggatcttcaattggtgtgttatttttgtttgctatgttttgctttttatgcttattttcaatagtggtgttgctacatcaccttgttattgttatggcagtaggactttattcattaatggcaggggattatagttttgtttatttttgctacactaggggaatctcaattggctcaaagcacgattgtattagtagcatgagtatttttgtcaatgttcagacctatggtttatggtgtgattatttgttatgattgttatcactatgtatagttatttgattatttttttttattttattttagattgaataatagggttattattatccaatttttattaagagatatttgataaataatcattaataggtgtgatctgtcacatgtttatttagattgatcgcgtttttttaatgcttcaacataatttttatttttgtaacgacatgaaatcttattaattttactctttaaattatatatcagcaatgagcaattatataattatatgatatgtttattaataaaaatttccaattttttctaaaaaaatattataataaataatatagttctataaattggttccaagacaaacaccataatactaaaataattgtctatatcaaacgcctccctttcaccacaaaatcaatcttcacatatatttaatatatttcagaaattccaatgtcacaacaattataaacatcttaacaattgtatttataattatagtatatttttcttcttcttcataatctcttctccttacatacataaataattaattatgtacaaatgataataattataataagagaagacaataatgggattctgcccaagattttgaaaacaaaaaaatagtattaaattaccaactttataaacttcttttcttttgcccctattaaaaaggagtgggaccactaaggtttgattgatgaactcataagtatttttggtgtgccatgtgcctc

SEQ ID NO: 265848 - DNA, 655 bp, Cannabis indica
aaaatcttctcatgtaaatgtcaatattcgatttaaaagatctccttaatcatattgtcgtcgagtgtatatatataataataattatggttgttgcaatgcaggggaagtgactatgtagggaaaacagcagttgagtacaaatcagctcaaaggaagaaagtggaggaagatggatacagaattattgggaacagtggagatcaatggagtgatttgttgggcacaaacattggccttagaaccttcaaattgcctgacccaatgtactacattggttaatattactttctcttattattaagatatccccaccactaagtaatttgtaatttgaataagctagagctacattctactgtactggatctggatgttgtgcaatcttttttttcctataaataatatgtatgttgagaactattctacgtttgaatgtggggacaaaattttaagctttaaaaattactaccataagaggtgatgcacagtaattgaaggagagaaataatgaaagatgacacaatttaattatgtggtgatcgagacacaaattattttcatatatatatacaaacaaacaaacatcttcttatttaatttgagtgtagctaagcttacattgtcattacttagttattatcatcatctaata

SEQ ID NO: 265849 - DNA, 547 bp, Cannabis indica
gcaactcgacgctttacaggaccctaaaccataacgttcaaaattcgatgagagacacgctaaacacttatcggggatttaaaatacaaactaagcttaacactattgataaatagggtgccaataccctaaattacttaaaaacgagaaagaactagggctcgggagaaagccccaaccggcagaccggttcccaaccggaaccccagttcctgggtaccaaccggtcgaccggttgctagaggctccccagaaccggtcgaccggttcatagctgggaacctcaaaaccgatcccctcaactcaaatcaatcccaaactttccacaactttccagaatacctataagcactataataaatcaaatccaagcaacaaattacaacaatttacaaaaattctcaatccaccattaaaggtcaagatttgagttcttaaactcaaatcttagccaaacctcaacaaagccatccatatcaattcaaatcaactacaaaaaaacctattctaattctaagacacgaattcaaaccaccctaacacctac

SEQ ID NO: 265850 - DNA, 718 bp, Cannabis indica
agtggaacaatctgctcggcgaattacaggctcctaaatcacattaatcacaacactgataagtgacacgctaaatcacttcccggggatttaaacttgaaactaaaagtttccctatcgatatataacatggaaataccctaaataacacaaaaatgggaaaaaactagggttcccaaatttgccccaaccggtagactggctccccaaccggaattctcgttctgggaggaaatcctggaagccaaccggaattctggttcctacaggcctctctgaaccggaattccggtttagtgcaggaataactaaaaaattcatatctccaccaaataaaccccaaaccaattcaaactttccagacctgctaattagaccccaatgaacatttctaaagcaacaaaacaaagcttcatgctcaaatacgaaaatcaccattgatgagtcaagcttgagttcaaaaactcaaagcttgctcatccaactaattagccataaaaacctgcttaattcacttcaaataactataatataactacagcaaacatccccaaacacaaacaaaatccagtagctaaaacaccatttcaccattgaatttcaagatttgagttcaaacaccaaacttacttaaaatcaactaacaccaccacaacctgttctaattcaatcatctgaacataattaagcctaaaaaaacaacaacaaacacatacag

SEQ ID NO: 265851 - DNA, 1273 bp, Cannabis indica
tgctttagttgcattgcagcaatgtgcattcttgctgttcgagcagtgattgttcaactagtttttttcttcttcacattcaggctatgttataaattatgtctgatttatcttgttgcgagccaagttgaactttagatgtctatttctacgcatactctgcaccatcctaacattcttatttcttatgcccaaagctgattgtcttcttatttaatcaaattttaatatgatgaattttcatagatatgggaatcgaggatataatttacattttcatagcataaataaataatgcaaaaaaatatgagattaaaaaataactaaaggtttgcacttaaggtaagggtattaggtagaaacataaggtttttgtttacttgtgaattgtttgtgttttctgacgttctggtacaatggaaagtaatgggtcgaatttccaaaagccaaagatccgttgatctgttcgttgattagttgtagtttgccagaacctagaatattgataattgaattacttgggcatttataacagtgattaagagctgctctaaattatatataaattcatcacagaactctgctataaattgtgtagcgagatgtattgcccactcatttattacagaataattgatttgcttgattgtgatatcatacgatataatatgattgtcttagaattgttaaggccattattgataatattgaatatatatggcttattactgcttgatagttgattgattgtttgtttgctttatgtgattacctgcatatttcttttactgggtttaaaagcttaatccccttattttcccgtcgcagaaaaaagtaattgaagttaatggacctcaaaggcagtgtatgtgctcgttggggattatatgacaagtcatcctagaaatttgctccacttatatttttatatttaattaattaatgttgttgctacactattttatattatatattagatatttatttatattttaaactatatgcacattataaattacttagttaatatttaaaggaaaacgactgttttcaatttattattgttatttaaattattacaaatatcatttataatcagataatatatagtaccacaacttagttactaattaatgtaattacggagtttggttggaggtaatgaattggaatggaaaagaaataatccttatttcatttttttatttcgttgtatattaaagtgttggaatgttatttcaatgaatgacatttctaccattttagtggaatg

SEQ ID NO: 265852 - DNA, 2321 bp, Cannabis indica
aatcacgtaatacgcctaaggtagttagggtgttacatatcttctttctctacacgataaaaggctgcaaacatcatatatgcgagatatgttgtctttgccagaaaacaaaaactctaagtaatccattagttctttaaccaattcacaatgattaatcaaattaattacctcattatcgataaaatatcgaatttgaaggaatatcctcatggggccatattttccttgaatcgtctttttctttgggaggatcatcagtcaagtgatcatctttgtaattactcgttagatatagtagaatcgtcttactctattctaaatgatttgaaccaatcaatttatggtccataattttagacatcacgggaacaacatcagaaacaaccactgatttggaatctaattttatctcttcatgatctcgaaagcaaaacaagtgaaaaacaaaaggaagaaagaaaacaccaaagaatgaatacccaaacacgaagaagacaaaagtatcaaaccacaaaatgacaagaactgctggagaccgatgctaggatgtcggggaaggggtgggagcttgacggacggtgaccatcaccaaaaaagaggtcggacgcgctctcacacgtcagcacatgggattcagagtggtggaagttgggctgcgcgtggggcccacgcacagtgatattggctgctggacttcagggttttgtagatcgacaactgggcaatccgtctatatgggcggtgagaaagaaatcacactttaactagggtttctaaaaaaaggaaccctaaactcaaaccctaatttatttttaaagaactctaattttgaattttgaattacaattctatggctctaatactatgtagagaatggtgaataaaattgtatgttattccatagaatagtatatatttatatacaaagtttggagactaaatggaaaactactaaatacaaatcaccctaatttttacaactaatattctaacaaggccaaggtggtagtctgatgctactttggaagtctcatatcactatttcactaaataattattctaccaatcatatcgactgcttcatagagattgaaggcagtccttttttacattttactggattctatggtcatccttgtgttgctcaaagatctcatacttggacagttcttagtaggtgttttgatgtggctccaatatcacctgggcttgtattaggtgacttcaatgaagtaatttctaatgaagatatgattggtggtccatcatgaaatgtagtacaaattgaagctttcagatcaggcgtggtggttgtcaatcatgtcaccaatccaaatttggacatctgaagaaggaaatcaaagaaactcataagcatgttgcagcccttcaaaactcaccaagaactgaccaagacaattttaattctttacaaaactctaaatctattttagatgaattattggcacaagaagaagactattgtcatcaacgatcaataattttatggttgcaattggggaattcaaatacaaagtttttccaccaatgtgcgatggctagacccagcaataatcgcattaaaaagctgatagactctaatggcaacactcagataggcacccttgccattttgaatattatcataacctatttaaaggaattttcagtagccaaggtattgatcaactatccattaacactattttggcaacaatcccaaccacaatagatgttgattctcaatagacaatctcagcaccttacactgtagaagaggtttttaatgcattgaaaactatgagtagtgataaaagccccagttaggatggcatgtctgtcatgtttttcataacttattgacacattattggcccccttgtcactgaatcggtcttcaatgtacttaataatggtgcagatccaaccttttttaatataaccttaatcactctcatctctaaagttaagaagccaaaccatatcactcaataccgtcttataagcctgtgcaatgttctctataaactggtatccaaggctatagtactacgacttcagcctttcttaccaaaggtcatatcgaatatcagagtgcttttttatcacagtgactcatcactgataatgtcctcatgacttttgaactactgcacactctcaaaaataagaaatgaggttccaaaggctatgcgacaatcaaattggatataaacaaggcatttgatcaagtaggtgttgggttttgtgccttaaataaaatccatttcaatataatcagatttaattaataaagatcagaaataacattttatgtt

SEQ ID NO: 265853 - DNA, 590 bp, Cannabis indica
tgcgaatgccaatttctgcatccgcgaataacgagattcagtgtataggagacgattactgacatagtaaactggatattgcttcccctggtctttgtggattagtaccgaactaatcgcatatttagacactgcgaggtaaatggataagatttctccaggcatcggcttggaaagaattgggggccgccccaaatgtaatttcagggcctgaaaaagccccttcacacttctcagtccactgaaactttttattaccttttaaaatttgaacaactctttgcacttatcagaggaacttgatataaagcgattcaaagtagggactttacctataaggctttggacctcttttgatttggtcggagattgcatttccaccaaagctttaatttttgcggggttagcttcgattcctcgctgatttaccataaagccaaggaattttcgtgatctgactccaaagacacatttgagagggttgagtcgcatcttaaattgtcgcagtattttgaacattgcttgtaggtgggtgacatggtcctttgcatgttgagactttacgagcatatcgtcaacatatacttcca

SEQ ID NO: 265854 - DNA, 950 bp, Cannabis indica
tgaaatagtaaaattgaatgaaattagacaaaagtctttaaatttaacaatctcaatagttcagggagaatttttaacgccaaaaaaatttaggggcacgatttggtacatatcaaagtttagggggaaaaattactaattagcctattatttttgcctaggaaataaattaaggacttaactaactatactgtttgcgaaactcaagaacctaattggggaaaaaaaaagtaaactgtcaaacaagtatatgataaaatagttgagtatttactaaaacagaattgaattaaatttatatatctatatctttttataaattttagaatctgactttctagaatattatctaatgtctgaggtttacattttagacatctggacttcgaaagcaacaaattaacaaaagaattggtcattttgtagataggccttgattggtttaaaatttgaatacctttaagaatttcctcctattcatgcattggacaagttggtgttttcagattgtgttaaaggcaatttcaactcatatttggtgaggagttagaagattcagtatttcatataatgcaaaaacaagatggtatatgttacatatacagtattaagttagatgtaatgacaggtagactcgcatattacactcaaaacattctactcagtgatgttgcatgacttctaaactttaaaatgttgtttgtctgtgagtgtaatacttatttgctctatcattactctcaatagtccattagatttacattttgggcatttttaatttgtagtttaagtcctgtagttggagcaacttagcatgtggttttactttaggaatgtatagtgagaatcatactagttgtgagtcaaattatttcctttctgcaaagcaatatcccatttttgattatttgaagagtacaaatagcggcagaggtttgaaagtttagtaa

SEQ ID NO: 265855 - DNA, 1054 bp, Cannabis indica
aaccggttaaaacagacataaacagatatttgaaaatttttgacttgtaggcatgaaaatcgtctcagaccggcacaaaagcatagagaaagcagtagcaacagtctatccaaacatattctatggagcatgcatattccacttgcttaacaacattaaggtcaattttggagtacacggggaagatcttacaataaactttgttaaagccgctaaaacatacaacatgaaattatttgaaggatacacttttctactagcttggaacattccattatttgagacatgattttttcccatgcctaaagttgtataggtatctcaactagaaatgtttctgtatgattgaaattacatctggctaatctcatttgcctaaatagctaatttttgtggactgtggacaccatataggtgctcggaactaagtgacaatttagtgattaagcaagggtttttttttttggttatacaaaaacaatacatataattatgtagtaggtacttatttatgatatgttattacttcttagcaatatgttatactataaaaaaaatttattaatttcttggtatggatacaaaaaaaactatagtagacatatatagcttttgtcttttttttgaacatagtaagtgaccaacactagggaattgcagctcttgatttagctcccccaattcttattgctgcgacactattaaagaatttttgagtaattagggttctagcaaaacttgagaattgttttgcttttcttttttttacttcccccaatatctttgtacatgcactacaagatgggaaatgaaaagtttttatttctcattttatgtatttttagctatatacaaaatacaaaaccgaaactaagtgacaataaagtgattaagtaaggccatttttttggttatatgaaaacaatacatatataattgtgtagtatgtgtctatttatgtgtatgttattacttcttatcaatattcaatattttattacgtactaatcaaacaatctttattactttaaaagaatttctacctagcaacccg

SEQ ID NO: 265856 - DNA, 915 bp, Cannabis indica
ggcactagtggtgcctagcacactcctacatgtcaatatcgctattggtccaactaaatatcgggtcccatataatttcatataatagcttttagagagtatcactaactactgcctcatagcaatgctctattttttatttttatgaaagaattcacaatgcgaatttgtaatctgatgattggtcgattgaccgagacacacccttagcgttattagtttccacatttaccctcttcactaatctagaatgacctccttgcctgtacacggtatacgcttcctcctcgttctcgggttcgacccttcttaggctcttagcgctgaaacgagccgccattgacgatcttttctcctctagttgccaattccatctgcatctcgaatcgctaactttcgatccccgaaaaatgttgtgtcactagaaagaatcggagagaaaacgaaagaaaagacgcacatatttcaagatgaggtcttcttcggatgtaatcaacatcgctgccagtgctcaaaaaatcgaggtcgataataggatttctcttcgatactacaatcggattgctgataacattctcagacaggttcttgttcgcacttccgttatattttgtgattttattagcgattttattaattatcactttgaattccaaagtttggttgtgagccatggatgttctccgttatatatatattttatatataaaatttttcatgtacttaagagtgaaagtagagatatttagttaacctagaaagttaagactcaaaaattaattgccgtagttgttttcttgagcttatcactgtggtgaatgatcaccctaaaaaatgtttaagaaaacacaattcaaactagaactaattacaaaatcaaattagaattatgaaattagacagcaataaatttag

SEQ ID NO: 265857 - DNA, 711 bp, Cannabis indica
acttgtgccagtcgtcccacacccttctctttcactgcgggaatgtcttttgtcatcctattcttgaagtctttcattaacttcccagcaaggatgagacaatcacgtttgaaggaatccggcacaatgaaacccgtctagtttgaaggaaaacaaacacggttagagttaacatttgaattaataaaaaacaaatcaaaattctaacaaataactgcttacctgtatatctgtccaaactttatttttcagcatagggttgacttctttttaatttttatacgacaaccctatcgtctgacgacatcgaactcctaaagttgatacgagcttggcgtagcttttgccgcagtattgtcctttgtcattaacctcgagggccactcttttgccttgatccattagcttggatatttcattcatttgagtaggtcctcgtgtaggtattactgttggacactctgcctctgggtctgaatctgatcctgaattcgagttggccatatctacaccattaacaaacaaaatttaaatatagctatatatatataacaagtaatctatatgaaatattaaatgcataaacaaattatgtatccagcataaacaaacacaatataaagtaagctatattataacaaacaaacaaaataatacaaaaattggtttattctaattctaccaaaatttcggcagcataacggctgtaat

SEQ ID NO: 265858 - DNA, 801 bp, Cannabis indica
gaaaataagagaacctataaatgtgaggaatgtaatagttttcttacattgggatatgctacaattaataatgtatttgtctcgcgctatattataatatgattgtcaaataaaagcgataaaattataaatacaataattagtgagataacaacatcataaacgactaaggggtatgaaccaaaaacgattcatctcgaaatgctcataaacgacgtgagatgattggccataaggagcaaaaaatatacaatcctaagaactatcttaagacttgtcttataccacaaaaacgaagaaaatacctcaactagtatctcgcaaaataggcctagtcattcccaaagttattgaagaatgtgaggccaatttatttatttatttatcctacacattgtaaatattaaacatatagaatagttcacatttcgtacacagtaattcagataatacccaaaaagaataattatcatgattcctaaaaattctataaataaaaagatacaatatagaagggagccaatttttttctctaaaagatcaatctgaaagaataaatgaagaaacccaatatttcttatatttattattgaatattttatatttagtaaagattgagaactcaaaaataatatgaactcgtaaactatatagatttagctacaaaatcacgattattttatcttatttattattattatttattctataaaagtagttccttcgatctcatttaatttcattttaaagaatctcattattattaatgaaatttctgtgttagcaatataatattggatt

SEQ ID NO: 265859 - DNA, 1146 bp, Cannabis indica
ttgattagttttttagtggcatacgtacataatatttgtaaattgtcattttcgttaaattttgtaagtaaacaaggcacatatatgatccagattctaaatcatcaaagtcaagacgaaaatatatagtatgaattacttcaaaattctttctttaataaattgaaaataaaatccgtacttaagggtgggtaacatccattccaatcaaattaaaccgaaccaatccaaacactccaattgcaaaaaaattggatatccaattacaattggattgaattggatattaaaagttgaattctaattggattggatctgttaaaccgatccaatcaaattacatttatgtgtattaaaaaattatttatatttatttatacaataaaaatattaaaaactgatatatattaattatatttttagtggattttttttattgaatttgaaatacttgttgttttgtgtatatatttccatgatattttgttctatttattacttaataatgcttttgttttagttatttaaaatttttagttgtattacacttataacaatggtatttttatgaagtattaaacttaaataaatggtgatatttaatttttacatatttttaagttaatattgacatttaagtgtgtaattggatatctaatttaaaatcaatccaatacaattagtaattgaatttgattgaattgaattttgaggtctaattggattagaatggacgataattttttaaatccaattactaattagattagattggatgacgaaaaaaaatgttagattggatcgaatgcccaagcctatccatactgacgaaacgagatgaaaaattataattttacaaacattaggtacttatgttgctaaaaaaaatcatccacattttaagtacttacgtgacaattatgtattattgtcattatacaaataaaaataagtccgtttcaaaaaaaaaaagataaaaaaaaaataaaaataagttcatcttgtaattattatattattaatgaatttaagggctcattttgaacatcgtattaagtcgtattgtattgtattgtattgtattgaatttgattatatatcatatttctatataatactatgttaaatttttaatttatactaaaa

SEQ ID NO: 265860 - DNA, 4318 bp, Cannabis indica
tgtttgttgttgacgttggcaacttggcattatatctcttacaaaaaaaattattttaatttcaaacttgaaatacaggcagatgtagagaaggtgaaaaagagaagagaagacagagctcttgaaaaagcacaacacgaggaagaaatggtgagtttactgccacatatatatctatttgtttctccagcttaggttatgttgacgaatgaattatggagtcttttccggtgtgaattatttttcttttctcagtttgatccaatttgttttataaactctaccttttttatacaggcattgttggccagagaacgtgctcgggctgaattccaggattgggaaaagaaagaagaagaggtatgatactggtttgctatcaaaagtgttcctccaccccctttttgttttccttgcttttatcattagaaaaggccttcaatatcttgttacgagactgttaactaatgaatgtacttgctcattatacagttccattttgatcaaagcaaaatcaggtctcagattagattgcgtgaaggtcgcataaagcctattgatattttgtccaagcatcttaatggctcagatgatactgatatagatttacgtgagccgtatttggttttcaaggtagaaatttcttgttagtatgctatctttgtattttttctaagaaaaatttcagcttgtgatattttctgaattcagttatagaactgttttttttttttttttgagaaaaatcattacaatgggaatgagaacttaaaattagtatatttattagaagatttttcttttaatgaagtgaacatgtatgttttaaaattattttaatactgtactatccgattcctattcaacaagtgaatcttttccttttgttaggtatccaattcttagtaatcctattttcattctgtaatttgattatctaaattcatctgcaagttaaactatgatatactcaacacgttttgaaatacattatgcagggcttgacagtaaaagacatggaagagcttcgtgatgacattaaaatgcatctggatttggacagaacaacaccaacacatatagagtattgggaggtattactttcacttttcctccttacaatagtattctttgtttttgttgtgtgtatactttctgttctagttgcatactaggttgatgtctttgtgaactgaaatgcaatttatatgattacacagaggttgatatgatcatatgaaaaacttactagcagagatgttggctgaaaaacgttactttggatttacatttcaattttcacttgccctgataagtgcaattggacaggcacttcttgtcgtttgtgattgggagctaacagaagctaggaagagagatgcattggatcgagctagagtgcgtggcgaggagcctcctcctgagttgcttgcagaagacaggggtctgcattctagcatgaactagatgtgagaaaccaattggaaaaaaagagttatggtgaattggaggcattacagtctcatatcgagtcagaaatgcgttctggtactgctaaagttgttgagtattgggaggctgttctaaaacgccttcatgtatacaaggccaaggtaattactaaattctttattttatttagcttcttaaaatatgaagctactgtgtttgttctcactgctggattgttacaaatgcaggcttgtttgaaggaaattcatgctaaaatgttgcgccaacatttgctacgccttgagcacccagcagatgatgaagaaaagttggaggctgatgagagtgagaaatctgaagaagagaaagaaagtgacgatgatattcatgtgaatttggatggtaccctctcttttttgttgtcagtttgactttgttgtaatggtagtagtttgctaattttctttcttttatcatgaaggttatcaagcatattctcctgagcccataccggaagaaacacatgaagctgaagatgatgctggatcattttctccagaattatgtcacgctgatgaaaatgaggaagctattgatcctgaagtggacagggctataatggtattatacaaagtgcaatttgatttgactagcaagcatgtaattaaatcaatatttgttaaccgcatcattggtatcatcaataggaacggaagcgtattgcagtgagagaagagcagcaaaggaggattcaagaggcgattgcttcaaagccagctccaccagaagagaattttgagatgaaggccatgaaagccatgggaagtatggaggaaggcgatgctgtcttcggcactggtgcagaagtgaaccttgattcacaggtagaagatgagtccattctattcttcttttgtttcttttcttctttaaatacctatataatcaagctttccttgtcatatgatacaggtgtactggtggcatgacaagtaccggccaagaaagccgaaatacttcaaccgagttcatactggatatgaatggaacaaatacaatcagactcactacgatcatgataaccctcctccaaagattgtacaaggatacaagttcaacatattttacccagaccttgttgacaagacgaaggctcctaactacactatcgagaaggatgggaacaatagtgagacttgcattattcgcttccatgcaggaccaccttatgaagatattgtatgttttctcatcctaattcagacattttattttttcttcgtaatttacatatacatatgttttgatagttaatgctggtaaatctttctcaggctttccggattgtgaacaaagaatgggaatactctcacaagaaaggatttaaatgcacatttgaacgtggaattctgcacgtctacttcaacttcaaacgataccgatacagaaggtgaaaggtggctttgttatgttacaatggtgatgcttttgaagccactctcaaccaactttataggcaggttatgttttcatttgatacaattttgtgaataataaataatccccctttaatttatccgaccaaaattcatcttcagttatttttagtggagaatactttcaggtgttgttgtatactaagtacaatatggtagcttttttatcaaacttcattgtcttcttgtcttaacaactaatgatttgtagaagacatactatcaaccagttttgaattgagcagtatattaatttcagttggtaggcattcctttttgtagtcttgtaaagtaattataattattagtattattgttttgagatagtataacatgttagtgcttcatttttgttctagagctaactatatatatggaagttgtttcagctaaatatgtaaccattacatgattacattagttttagtgaatggattattatttgaacagttgcaattaatttaaaaattgactaagaataattagtaattacttttaacttgataataattaatatattatctataatctgatacttatgtataatatggaagattttaaacggctacatggatcattattcgaataattgctatttatttaataatgaactaagaatattaataaattactgttaacttgataataattaatttattacttataatttgatacacatttatagtagggatacttattttgtctttatgggtagagatattctattatgccttattgattatccaagggtgataagagagtataaaatataatagtaaaagtggaactttttacaaaattaatgtctcttcaaattttattaatattttaataattagttttctattactatttttttagtttatgcatctttttcactttctaatttagatttcttttaacttaaaaaaaaaattagaataataataattaataataataaagaatttaacattagttttgctttttctttttgaattgtcggtccaattttttcttttctttctttcaaatcaatctatatatatatctttatatattaaaagtgtctatctaacggcatttcttggtttaacagaatatacttaaaaataaaagaatattctgttaaatttaacaatgttaataggtttgatttcccgttaacaaataaacccaaaattaaacgcaaaaaattaaacaatcttttaaatattaataatctctttttaaattataaaaatcaatcttatccacatatctctctaacaaacctatcttgggtagagttaacatctgttacttaatattataaataataaatattgctatttctctctccgtatttccattcaccttatattagatggttttctctcaaactcaaactt

SEQ ID NO: 265861 - DNA, 529 bp, Cannabis indica
aaatcatcccaaataacatcaaaataacaacttccaattcaatactagattcaaccacaaatgtatgatttaaaggagaaattcaaagaaaaattctacaaaaactaaccttgattgctgcgattggggttggtgggattcgactggtgtgtgggttcgactggtgtgggtggttgtcgtgggttcgtggtcgactggagttcgtggtcatcgtgggttcgctcaggtcgattgggttcgtcgtcatgggttcgactggtggccgtgggttcgtgtgtgtgggttcgactggtgtgtgggttcgtgggctcgactggtgtgggttcgtgggtgaggtctggtgtgggttcgtgggttttgcagcgtgggtttgggagagggaacgaagagagagaatgtagaagagagagaatggagttagagggaatgtgagaggtttgaaaacacaggagtatttttggaagaaaattgaaagaatgatatattttttttatgtgtgataattgggtataattaaacaccctatcta

SEQ ID NO: 265862 - DNA, 569 bp, Cannabis indica
actaacttgtaaaaaatcccacattgtttagaaagcagcgtgtatactcaaactataaataatctatacaagcatggaaataagagttattgtcatcacctttttgcaacaaggtgattttgctgcgttgcacaagaaagcttctgtacatttcagcttgagtagagaacctactagctgccattttttctgtcacctgcaaatcgagattcgtagggtctgcttgagcaaaagtaatagcttgtttgtactccttcttagcaagatggtagctcatctccacatcccctatttccttcctgttgaagactttaagagcatgcttgaggcgatgcagcttcagcataatgccttttaatccctttgctccaagcggcttgttctagttggtcttaagcacttccttaaaattcttatgggaagtccacatgttataaaatctaaaaggcttgactcttatattccccagcttgtgagattttatgaggcaaagtagtgatccgaaaccacctcctaatgaaattcagcaaccgaattaggaacttcatccacccaatcttaattagaaa

SEQ ID NO: 265863 - DNA, 591 bp, Cannabis indica
attaaactcacatttatatatattttgattttgaatgtttgtatgtatactacgtgctagtcttgcaaggccaagtggtatttgacaaaccttataaaaatactatgtaaattccagcttaaatttgtgtttaaaaaactaaaaaatcaaagctttgtttgtaaattgttaatttttttgcctttttgattttgtggggatcagcttggccattggtttttcacatgaaacactgctctatgttatgaaatcgaatgctgaaagatcattccttcttgttaaagttgggacaaaggtttgttttgggtgattaaacttaaagtattgtgcacaaattcaattcattgagttgaaggaactttagtcacttgaatatgattttaagaagtttttcattatttgttttgctttggaaggccatattgtgttatgttttttatatcaaaatattatgctgtattttttctcctatgcctcttaagcctcctagtcccctttaacctattatgttttatcaattttttgaatggttaagacacaccattagaagtattgagccaaagctattatgtggcaactcaagaatccttg

SEQ ID NO: 265864 - DNA, 1326 bp, Cannabis indica
atccatttaagccctcttcaactgtgtagtctcatacctacacagtcttagaataatcccacttgacctttcccaggcggtgtgggattgcacagcttactcggtgttttccctgtcacatcttaaatagctataatgtacacgaccatgaaaaaaagactaaacaagtctctcgaataccgaaacaagagtatatctgtgcattatttttggcatgttaaatttttctaaatttctcaaaattttgtaagatctcttaaataactataatatacacgagtatataaagaaatacatcgattaaaaaagtctgtcggatgtcgaaacaagtaggagtacaatcgtacatcacttttaaaaatatgtattgtaaaatttctcaaaaataaattcttaattattataaatacaataatataagtatatataaatatcaattaaattaatatatagataaaaaaatatatgtcatgactacaatgcacgacatatataccgtgcactgtaaaaaacctcaaatatggtgcaccaaatgcaatcttgttggaggatgaatcatagcatatatgaatatgcagcctcctttcaattgctctaagggtcatcttaatccttaagacgtcaagaatcataagaggtgacatcattattgatgtattttaatattgactctcatacattttaatttaatcaataatataaaatttttttaactaattataagatgtaacatcacaatactctttatatatatacacttagctaactgattgattaggtgagactatactcagatcaaacttgaaaatgtatttttcaaccttgactctaaatttagtgtcacactaatactataaatttagtgtcaaaagctcttttcagtttaaaaataacactaaaaaaatattcttaattattgtattattttttaataaaatagaatattaatttgtgtaataaattgtttaaactctattttcagcgtgttaaatttattaaatcttacaaaatattttaaataattatcatataagtgattataaaaacattaaattaaaaaattccctcaaatacggacaagggtatggatatctcccttttaaaataatgtattgtaatttttatataaatatatatatttataaagtaataaagaaaaaacaatgcagggcataatcgcggcaaattagtgtggaacataacatacagctacgttggagcaaatttgtgcagcaaatccaatatatatatatatactagcaaaaagctagggacgtatactaaatttatgctagattttttctatgttatttgaaagtgatacaa

SEQ ID NO: 265865 - DNA, 1014 bp, Cannabis indica
ctaaaaatataaattaggtattacgaccgtaaaaaattaaacttaattatttatctgtaaacgagagataaatttaggtatttacactgcaaattactctaattaatttaacggtttatactacttcaaaaaagcaaacacttttggatttggatattttgtcaaatgatctattgaaattaaatttgatcaataaatataaaattatctattttcaatttttaatttttaattaattgacaaatatttatatatataattatatatcataacattaaactaaaacagtaagaaccaaaatggtataaattcttaatttaacttcattttcttagaactctatagtatggttttctaattattttttattccctcaattttatttgaagttgtcaataggagaatagaaaagggatcttaattcaaaagtgagaatgacaccactctttcatggcaaaaggacaataatcactttattccaccaatttgatcatatagatttttgggtaatgaataagaatggaatagggaactctatttttgacccctatagatgggaacataataagttataaaatcaaaattttattttcttgcaaaatgttctaagctattgattatctatgttggttccacttatttgaagataagtatatagaaaggtgatctcaacaacattaacatgtatattgtttggcactatatataatgtgaaaaaagtataatcggaacatgacacaaataataatataaaatagcaaaattatttattcctaaattatactacaaatattatttaaaattttatattattattaatatgatttaatataggattctgcatagtttactttgataattatataaattaatcacccataaggagttaccttagtttacaaccatatcattaaatagttaattatactaaaatattatgttatatttataggatagcgtagtataaactactaaaagattagtaattgttataataatcaatatctaattaaa

SEQ ID NO: 265866 - DNA, 921 bp, Cannabis indica
taaaaatagaaagattatattttttagatatgtgaaattgggtaaaaaaaaaaagtcttaacaaaatattagattttgagcaagagtttacaatttaactgtcatattaattttttacaaaaatactgttttttttttatataaaacaaagcataaaacaacaaaataaaacaattaaaacaacagtagaacaactaaaaaataaccatagaacaaccgtaaaaacttaacataatacacagtatgaaactaacacactatatttgaaaaaaaatttcgccccacagtaaaaaagtaaaaaaaattagaaatttctatatgtggtgtaaaaactcctaaaaaatgataataaaaaaatatattttaagtatgtacaagaaatttaaatttgaaatgtaatgtgaaaaagaaaataatttatgttatatagtcacatctaatataagataaaagattacaaaaataagtgagctgaaatttaaattgtaatattttttttattcaaaaaaaaaaaaattgtaatattttttttaaaaaaataaaagttcttattttgttgccacttttaatataagagagatatatttaaggggaatttttaattatatacttaattataaagtaattaacaaatataccatcaataatttaaatgatgtaataaacggtaactgtatcgcatatataaacaaatatatgcttggatcattcaagtgacacatttatttattttttttctatcattttctcttttatgtatggttgattatttttttttttgttttttttatttattttctttttgctatctatatctatttttgttttttataattttaaaaaataaataacaattatactgttaattattttgattaaaaaataatattattgtgatctactcctcaagtatcattttga

SEQ ID NO: 265867 - DNA, 697 bp, Cannabis indica
atattataagtcgatgctaaacagcacctaagataataaatttcaaatttcgagaaattcataacatgacttagctgcataacaatgtagctattaatatggatagacaatagtacagagcactagaaatgagtcaatatatagttccaccaacaattggattaattattccaattacacatttggtaaataaccatcaatagtttggtaaataaccatttggatcaaatctctctgcatcaaactcttagcaccttgcaagatgttgttcatgtaagatctaataaatattcattaatgtgatatacatgagttgtgcaagacaaaagttgttagccacataacatccaatgcctactcttaagtaaagacaccatgtatgtaggcaggcagtgctgtgaaattagtatagaaatttattgcctcaaagataagaaatataccatgatgttctctttctctttttctatctggcttgcctacataattaactgtcatatgtatttgttcttaaaaaggtaaacataaaagaactttaataaataactgagttaatgtgaacacaacaagagtgtttatatactacatatagagctcgtttggaacgtagtattaagtcgtagtgtattatattatattcaatttgattatatatcatatttttgtataatactatgttaaactttaatttatacta

SEQ ID NO: 265868 - DNA, 611 bp, Cannabis indica
ttatatctactgaactctggatatattcataactccacatgatctctataacacttaggggtggatgaagctattgacatatgtagttcattttgaactctagactatactcaatacaccacagtatctctatggcacacatattttgattaaacatggatataatataatgaacaaaattagcaaattagtagagcatattcttggtcttaattcttgttccaattaatatgttactgttgtaatagaaatcgataccaataaaagttcctggatatagtatcacagtacctcatttgagtgggagaattttaaaaaattctaagctcatctctatttggatgaaacttgtgataggaacttttagaatacaactgagaaagtaaatctaaccaatcatatggagagaaataactcttctgagttttgagaataagatagtagaattttgcatagtctattcgaatgaaatatattatggtatctctaatgattacttaatcttaagcaagtattatacattaaagtaaatactagattgctatgttgatgactaggtttagaaggaacttacagtttcagactaagataatatgtcacaacaagataac

SEQ ID NO: 265869 - DNA, 537 bp, Cannabis indica
caatgtaaggtttctaaaactttatatgtgtttatttcatagtcgttttagaagttcatatttagggtgttaatcaaaatacttgtgagtagatctaagatcctggtaaaataatttccaacataaacacaatgtcttcttctcctatttcttttgtttcttactaatgtgtttatctattttatgtatgtgattttttgggtttgaatcggtttgggaagggttttttgttcatcgttctgggttgtgttctttgtgttcttcagagaagaaccacgaagaaggtggctcgatttagggggtctggtgtgaactgggctagggagatttatgggttgtgattaattcttggctggtgttcttcatgttcttcagagaagaacattgaagaaagaggactcggctagggaggctgctctagagttcatttagatgccgagtttgtgtttgagaagataaagaatatacatatgtctgatgcaatttagggttcaaaatttaaattaaaacgacctgtagtttgggtaaataggagct

SEQ ID NO: 265870 - DNA, 1434 bp, Cannabis indica
taattttttttatttattttctacacatttttccaacttccaaacatttttctttttgtgtactaaatattattttaaacccaaagacaaaaaaataatgcaaatttatccaaaatacaaaaaatataacataattcattttttgaaatattaaatattatttctaaaaaacttctcaaaaaacctacaaacacctttcaattaaaattacaaaccccttccgattaatataacttaatccaaacaggatcggaccaccattctcattgaattgggcctaaatgtttaaactgaattggagaggggccgcgcgaacgcaggcccccactgccacaaattatgacgttggctctcccacttggggagaccataggtgggcacccctcctaagtgcaatggaggtcaccaacctaggccatgggccttcttgatcacccatagaccccgtccaggtaagtatgtagcccaatcctactcacacctcttttatagccctttcctcctcctaaattttacccatgcccaatgtgggactaaatcccaaacactatttttccaacaacaaacaccttgtcaggtctacaacactcttttaactcttgcactacgttttttccgattcatatttcaatatttataatgcttttttatactaactatatatattagtttcaatctactaatccaaagaaaagtttaaagcaattctttccttatatttaagtttgttaaaccaaatttagttgagtgttgaaaactaagacaaaaccaagtagaaatggagtttcatggctgctacaatatttggttttgactaagagtgaagtttaagcatcggtaagaatttttacatgttataatattattttatatagtttcatagtaagtataaaacaaggttatattagcttaaagagagccattcaaacaaaaaaaaaaaagcttaaagagagaatgtaggacattatgaatacaaagttacacattttatgagattggattcatggggtacacgttgaagagagcatgtgagaggaacaataatattgactaggcagcttttattggctcctccaatagatttaggtcaattcttatgaattatgataaaagtttgtttataattgcattttgttattttatgagctcgctgttctttgaatcttacgggtagattggttcatatttgattctaaatttaagattttaaaaacaaaatccaaatacaaaatcactttcacattttgacatgtaatttgaaaatagcaaaatgatgtttgttaaggaagatttatggagggatggagagaaaggagtggaaggataggacaattcctttgtttggtaggaaggattggaggagagggagaagaagtatagggagagtactaaatccactcaaataaatggctctgatgtgatcaatgcatgatc

SEQ ID NO: 265871 - DNA, 985 bp, Cannabis indica
atggcctcatacgcccaatattgtattgcaggtgcgaagtcatacgttatgtatttgcactcatgctgaacttccaaacttagcttcttctcaaagtctgccttttgtttcaacatgcccttttgaagggagtgcataaaataagtacttcccttaaggaatcctgaagaagaactagagatcttcggcatctaagtatgtcaggcgtaatcaaagtgttagcctcacggtccagtaacactacctcaacaaacatgcacaagccaagcttgtacacgtcttccgaatctgacagtttaagaacctctcttggagtgcttttgtcttcatactatcaaaccagttgaaatatttgttgatcaaccgatctgaccccgagcgggtagcctacgcagccttctcatcttctgttggccctgaggtaaagtttaggcttgtaatgagtgcaaactcaaccactccaaatctgatctccttcttgccaatgtaaaaacgtatctcttccaccttctcaacatcaaccttcatcttatgcagcattacttggtgaaataacaccaagaaaatgtgagaggtacgacattctaaaaattatcaaaaccgcttgcttttgccgtctcattcaaattgtattccctaaaccacatcttaatttctgcaaaagcactagtgcctctatatgtcacgcggcgagtaaaatagtcaaatgctagaacaatgagtcgtggagccatctgagaaaatatataacaaaaacatacagtaagcacatcattgaaaaataatcgataaaatatagataaactattgccaaataaaaattctttaaaatattaaagatggacaataatagaaaattgttgacaaaatattaacatcttgtcgacattttctcaataaccaaaataactgtaatatcccaataagcctaatggtaaataattagggtttatatttatattatgggttaattatgtaataagtg

SEQ ID NO: 265872 - DNA, 489 bp, Cannabis indica
taactataaaacatgcaaaccttagttagcagttctagcttttcttaagttcatgatcaggatatccataaatctagtaacggtttacactaagtacacaactattccatcattctgaaattttcctatcaatagggtatatccctagaaggacttaggcaactattagtaactaatcatagatcttatactatcatcaatatgcaatctgaatttctagggaggtaagtttggatataattcaaaaattctacttaatgatctttgaactgcatatgtaccaaacatttctccacccctatcagttcgcaagatctttaaccacttaccttaatatttttcaacattgctagaatttcatgaaatttctcaaacatttcaaatttatttgcataaggtaaaatctagagtaatcgtctaatgaataaaacgataactcatatccacccctgaatgtacatccatattttcaaatatagatgatcttac

SEQ ID NO: 265873 - DNA, 556 bp, Cannabis indica
attagacatattctaaatttttatgatttgcaaattgtttgaaaaattgaaaacttaatctgcatatttttctagagtgttctatggtactgagtgctaaatatatttttgtacaaatatttatgcaggttatgatttttgggtttattcaaaatacaactgttatgctatcgaattttctagaaaataaaaataaatatgttcttttgttatgcttattatttgcctgctttggttattctgatgagagccatgttgatcatgttcagtgcatattgttgtttcatgacctagtctccgtgacatcataggtagatcaggtgtgcactcacctataggtgaaagacctagaatctgtacaaggagtaaattaaatctaagccctggtatttatggtgggtaacagatgcgactacccggttttggatgtcattttctatgattggtattgaaagctaggggtctagtggactgtgtgatatgcatttgacacttgattttgttattctttgttgtctctctactttgtttatacattttgatactggtgatgaga

SEQ ID NO: 265874 - DNA, 543 bp, Cannabis indica
aaatttatttttcccaatatatttagaagagaaaatgattaccccaaactctatttagaattacgaagctcacagtcgatccatccgcattccacgtcacaaaacattctcatctaaacagcgcgtgcaataacatcccatccggagcgcgtgtcagacagtaccacccatccataaatatataagaggtgaaatttgtgctttccctttttccatttcatattttcttgttcgcggaagctcctttctctttgcttacaaattctctcttcactcttctttctagggtttctaaaatccttcgagatcggaacttcagactcaaaattcacggctgttaagaacggcgatccagtaattcaagatgaagatttttgtcaagactctcaagggtactcactttgaaatcgaagtaaaacctgaagacatggtaataatgttcactccaattggattctttctctatctcttgtgcatttgaatactatttgattttgtttctgtgtttagatttttgtatgtgttgttttgaattcggatcgt

SEQ ID NO: 265875 - DNA, 651 bp, Cannabis indica
aaataaaaagtgtgaccttgaggactattgctgctatttttggaggttggggactaacttgcatcaacgtgaactttttggggacttttgccgcaaatttcccaaaatatatttggtacccagtggttttcaataatacttaattgatacctcatatttctaaattgtacatatttggtgccttaaaagtaaaatttaataaatacagttttatcgttctcagttatatgtaatcaaataattaaatttgacttcaaaatttataaaattttaggtagtttaattgtattaataaaattttatcaaataatttaaatttagggtactaaatatgtatgattttaaaatacatgtaatcaaataagcattaaaaactcagggtactcaacttgtatttagataaaacacagggtactaaatgtgtagacacctatatttttattaaaagaaatattatttaacatatgaatctatgactcataaaaaaaagggaaaattacccatatgtactattttttaacctttttttttttttcaaatttacggtttggatttctttggtggtttctatgtgggttgctattcggattttgattgcgatttagattgctccgttagttgttatagtggtttctatgtggaattccgtaa

SEQ ID NO: 265876 - DNA, 766 bp, Cannabis indica
actagctaggtaacaagataggctctacatcaggttgaaaagtaaagagaggaggattgttataatagatacacaatacaaaccaaaaaccataaatttttaaataataataatgataataatctcatttttattttactttttttctccattgtggttggaaccaagctgaaattatttccgctaagtttcacacgaagctgtttgggaaagtctcttgaggtgaggatgctcatttagttactaatactggaccatttagatcaaacatggtagagtaggtttaccaaataagatcatgattaatggactactttttgttcaaactttgggtaaattttataaacaatgcaaagtaagcagcgtacctgccagggacaaaagtaaaatagccttcaacggaaccttcagaagatggtaaaggagtgcaactctcgtaaataaattccttcgcacctggacgcagtattgggaactgcaaaacacatgacacgtgaagagataagttatccaaagtgagaatgcaaggatgtaccaaatatctacaagttcaatatagagattaagcaaatctattgagcaactggtacaaaagctaatgtatatgtcactttgttcagggaccattcaaaaatatctaacagtaatcagcaaaacaccgattctgcaaacagctcatttataattcagaggaatcgggaacaccacagtgtgtgtgtgtatgtataggttatggatgtaatctctcttttctagtgaacctgtt

SEQ ID NO: 265877 - DNA, 1204 bp, Cannabis indica
taggtcctggtaaaatataatccaacaactgaccttagagccatggtaatgatttactttcaaaaaatatggatttaaaacgatgtatgtgtgatttggatgtgattcatgttgatctatgtgtttattgatgattgattgatgtttgcaaatattttacgcaaaataattggaattttattcttgaattatttttcttggatagtaaggaaaaaaattaaacaattcactattttacagaacttaatttagattttatttgaattaattataaatttttgaaaattaaaaaatatcaggaagtggaaaaatatatatagtagtattctccagtgaaataacattaaataattattaaacacttattagtttatcatgtatgatttatctttcttgatgcaaattatttgtcttgtgttatctcattttctttcttttgtttacatatataataacagtctaattttgtaattatcatacaagtttctactaaaagatattgtggcattgaagaacgagtcaaatctaccaattataacttttcctccaaattaattcagtctatgaggagtgctaagggaattctctatcctactctcttttgcactctctctttaatgtgatgacaaatgtcatatttttagtaagagttagttttacttaataattagttataatattttaatgttattacaattgtgccattgctacttctattattctactaatttttgtttataaaagaattaaccacattaaaaataaatataataatatatatatatacatatattttaaaataaaacaaagtaacaattaatatttataaaaaaattgtatatattctatagtaaaaagtatagcaaattaaaatgaaaatgagctactataatacttttttttttatttttttttattttttttatcattgacctttttttttctaaaaaaaaatacatcattgacttagtatattaatttattgaacctcattttatgttatattaaataaagaaaataattaaaaaatattttaataatactgtattagaagtagagtgaattttcacttgtataagacaaataaaaaacaacttaaaaaacagagtgatcaattcaaaaaaaaaaactagtactgtataataaaagaactaataaaacataaatagtacaaaaagattaataacaatagttttaagtcatt

SEQ ID NO: 265878 - DNA, 498 bp, Cannabis indica
tgccacatcaacctccttaaaaccttcctttatatattgattgattgatattgatagaaaattataaggtgatgttaccactttttaaaaaattaaattgataaatagttgtaaactaatttaaatggcccatcaacacttcaaaactctactttatattaatatattgattgatattgattattattattattattattaataaaaagagtaaaagatgataataattacaatttataattgtattaatatattattgttgttgttattattattattaattaatagagaaaataatttaggcctaagagattgttcatattcatattaattgttattaaattattaagtaatttattatgtgttgtaacttacttattaaaagttaattattaattagttgttatcatcctttatattttaatagagaaataaaatattaaaagaagatgataccattttaattttaagaacatagttaaattaaatagctataaa

SEQ ID NO: 265879 - DNA, 674 bp, Cannabis indica
aataagataaaatgttaaacctaacatattcctaatcttataattttaattaataaaatatatttcaaaaataacaaatttgaaaaaaatatgatatggttagcaaactttgaaatttgaacaagattattttaaaagataatattttaatatcaaagtaagatcattcaaaattaaaaaaaaaaaatgtaatatctgatcttataattaaaataaataaaataatctaaaatttcaaaattaaccataaggctctttttgtgagaaatcaaattttcaaaattcaaagcctactaatatctaaaactaatattaattattaaaaaaattaataaaaattaatattattctgaaaatttgatttttaattgaaaattcagattctacacaaaattctaccaaaaattggcttttgtttcaatgaaaaacgatttttgaatcaaaagttatgaagaaaacaagtttgaggcacaggggtatgcatttgcgcgcgcagaagcatggaagtggccgaggacagaggctgcaagcagcctcatttgaccgagggagctcgacgctggtagcctgttcagacagggcatgtccgagaaaactcggtcatttctgtctgaatggccgagcatgtccgagcggttaaaaggccgtgcacgcgcgcgtgtgactcaaatcct

SEQ ID NO: 265880 - DNA, 507 bp, Cannabis indica
ttgcttacaatgcacaaaataggtaattgcaatgattctataattacaataaacgaaataggaaataggataggttgccatttctctctgactcaatcccacaattatacggattgtcttcgcatttggacaatcgagatttatctctgaagccttgtgcatcgctcgacataaacatgcttctacctgattggatatcttctccgcaaccctgctcggataactgactattacagatgttgattagtcatgtgcaggctgctagggttattttcctctgccccagtatcagaaatatgagacacatgtcatttgatcttattgccacgtcaaggtgcaaaaaactggataaaacacgtgtttcacttctatcagttgtttgtcattatgatgtgttaacgcaaattttggttaactagattaatagcctttttgcaataaatacactacagaaataaatatataataaataacatcagatattttacgtggttttgtagttaaaat

SEQ ID NO: 265881 - DNA, 3410 bp, Cannabis indica
ttttttttttaatttttcttattaaaaagaagttatttttttttagaaaaaaattattttttacttaaatagttattgatggtgtgaattataatgggtaacttagttgtagtatttttttaagagaagatgacaaaataaaaaaaataatattttaaaatgatgtgtatattgtgaaaactataggtgttgcctctattagagatttataagttatttttgttgatggtttagtttggtctggattttattcttttcgaactaaacaagtaatgttggtttttcattcttttcgaaatcaaataaattaatattcctaacataatgttaaagtaattattaatattccagggtccgatggagagtttggaccacttaatttcagatcacctttcccctattaagcaaatggatttagagttaattccatggcatgaggaaattaggcaaacactcttctttatggggagtgtaaaggccctaggaccgaacaatatgtctgttttgttttttaaacactattgaaactcaattggcgcggagttgtgtgaggctgttgtgtggatttctttcatttaggttctttgcataaaggcttcaacgaaacaaatgttgtcatgattcttaaggttcccaatccaaagaaagagtcgcaattcaggcctatctctctttgcaatgtgatttacaaagttagctcgaaaatcattacaaataggattttagaccgattcttcacaggttgatttgtcccacacatgcagtttttgttcaaggatggaatattcaagacaataatgttcttgttcacgagatcatccattcttttaaacccaagaaaggggaatgagggtttttttgcgctaaaaattgaccttgttaaagcctatgataagctaagctggcaatttattgaccattttcttcagagttttaaggctttcgacaagttttgtaattgggtccagcaatgcatttcttcgacttccttcaatatttgccttaatggaggttcaattggcaggattactcctgaatgtggcattagacaaggggaccccctgcccccttatctctttatctgggttgcaaacatcctcacccgtattcttgaaaatgccctagatgccagaataattaaaggtatcaagttgacaggaatggtcctcgactttctcatcttttctttgtagatgatcttattatagttggtagggccaccttgggagcagagccggacctgagctaagacgaaggaggcagccgccttaggcccccaccactcagaggcccattttaaaaaaaataatatataattagtaataaaataaataataatacttttaatgcttgttgtagcctagtggtaatttgattagtttaacaattaagatgttgagagttcaattcccaatagcctcacttttttatttttgcctaaggcccaaattaacataggaccgaccctgcttgggagaagctaagggtatttggcagtgtttgaaaaaattttgtcattggtctggtcagagaattaataagcttaaaacttctgtcttcttcagtaataatactagtgtcgggatggagtggggtattaggcaggaacttgggctcaacaatgactttgggaatattaactacctagggctccctttgtttaggtctcacaataaggacgcgaatttcaatttcattctagagaaccttatctcgaagctacatatggttggaagttaaaatccttatctaaggctgactgagctactctaatcaagtcagttggcctttcactaccaacttacaacatgcagactacaaagttgtcgaagaaattagcctccaaaattgatgtttggtcagggatttttggtgggattgtgatcaaggcaaccggggtatctacttaagggcttgagattgttgtgtctccccatgtcccggggagggttaggcttccaaaagactgtggaaatgaaacatgttggctaaatggagatgtgctctaatcaatgaggaagattctctatgttgtaaggttttaagggccaagtatctacggggtaggcattttttgaagttctcctcaaagaagtctaattcgtgattctagaataatgttctaaaatttaaagaaattctcaaacacggggcctgtaaacttattttggatgggaaagaaacaaagatctgggaggattcgtgaattttacatggccaaacattctatcctcgacctaataaaaatcggcataaggatctagagactgtggcagatttatttctagacaatgggaattgggacatctccaaactaattcatgttatttttgatcaagaaacgaccttcaatatcctcaaaggtataaacctagtgggcaagaaagagataagtggatatagactaaagaatcaaatggttaattttcgacaaaatccgcttacctcattcaagctttgcaacgtgcccctttgtgtagtgttgcttctgctttgtggaataaactgtgaaattcaaaaatcttagaatgtcacaaagttctctagtggagcatcctctcaaacactttgcctatccgatctctcctcgctagaagactaaacattgaggatgtctcttgccctctttgtggggagggtgaggaaatgatggagcatttgttcctttattgcaattttctggtcacctatggaggtcgtccttctggggagttaatctggtgctcgaatctggagctcgggtctgggactgggtccagttcctttcgagtcttaaaactagagggttgattgttgtgattgttcctttgaaggcattcttcagagggtttttagctttattttcttgcacaattttctctattttatatatcatctttttgtgagtatttttttattcttttttccatcttattcctttgatattttctaatcttcttctctttttaatctgcaagaataaaagataaaaaacgtaaaattgctctaaacaagagtagaactaaattaaaaacacactaaaaataatactaaaaacaacctaatagtgatagttcaagattgtttctttatgcttcgattatagtggacacaatttggaaagcccgtataaggtacacaataattctctgagtaataacctcaaggattgtattaattcaatctctttttgctacgcagattatggttcttgtctgttggattcatcgaggaatgttgggtcttctgtttggacccctccacctgtaaattgggtctagatcaactatgatgtgaaagttggttgtggctcgatatgcgtggtggctttagctagggatcattcgagtagggaaattttgtggatagctaccagcatgctcaaattttctgatcctctatagggtaagctacaacctgtctgttagctg

SEQ ID NO: 265882 - DNA, 1005 bp, Cannabis indica
tctaattgatcaagatgaacaacctaataatataataataataatgaaggagatggagattggagaagtgaagttagaaaattaaaaatgggtaaaaggtagactgtacgtgttttaatcaacagaggcagttgcagttatgtaatatgcaacagaaaacagggcatgaacaaaacacaaaatgcctccaatggataggaaatgatggtgcgtgaatccacaggaagctcttgacttgttgttcgacaaagtccctatcaccagcatagacaatccaacggctaatataatcctgatcaacaacaaacaatactaatttaatagaaatagttataataataagaccctatatattatcacttgtacattttatcatgatgcttcactactagacttaacccttgataataataataataataataataatgcttgaccccaagaaaagaccactagattttctaaagtatatatttataccaggtgaatatgaggcatgccagagagagttgtctattaggagaagccttttgaagttcatcttgagaacaaatgcaattttgacagccaccaagcaagttagccaatacatgagctagagccaaaagagctcctgcggctaacccaagcttgaaagcttcttcacttgggtctctgcactcgaatatccacagcctcaaatgcttcaccttttataacatttaatatgaaaaaaaaaaaaaaacacaatgttttaaaaaccattttcaaccatccaaaacatatgtgcatatgatatatatattaatggtcttgggtggtataaacacaccacatcatgattaagtactataacattaacataccttgttttgttcaacttctgcttggatgcctagaatcccagctacaacatcaatagtcacgatcaagaagcaaacaagaacactaccactaaccatttgtgaaatatgatctttgattattaattacctaacttggagttggagatcgagatacagtgag

SEQ ID NO: 265883 - DNA, 659 bp, Cannabis indica
cttcttgaaattgaaaagtggcaaagaccactctatcatttcccatgacggccatgaaattcaagatcttggtgatcacggttagccactgctcggctttcataacatctggacctcccaagaaaactggaggtgcctgcttacggaacctttcatacagaggttccatccgattcactgcaatcactggttagccctggacaacaggggcaggtgccactggaatttcaggaacaggcactgcaggagcaccctgctgtctcaatcgctggatttcattatcttgttcctcgattctggcttgcatttttgcaaacctgttttcctaattctgagcttcctgagtagcttgggcagcctgggcagtctgtggcaggttagcatcaccccgaccacgtgccctgcccctgggacctctacctcggccccgagcatatgggggaaactgagctccctgaccttcatttcacccgactgagttgccctgactcctggtaattcgcctggcgtccatctagtctgaacatcctgtgtaaccaagagcaagcatggtcagatcatgattagcgagaacttactaatgccgcttatttagaaattaaaaacatgtgcctattctactattaggctactaacatgcttccaaacaggctttactt

SEQ ID NO: 265884 - DNA, 1318 bp, Cannabis indica
gttctaccgaaatgtagagcattgcacatgactcaaatttgttaattttggtgttatcttctccttattttcaaggccggccctaagattgggtggaccttaggagaaaaaaaattattgggtcatttatttaaaaaatatgtggatttttaaaaattactaaaatatatgtataatttcaaatggaaaatatttttttaggctctgggttgggtaggtcctaagcacggatctaacctgctttaacccaagcttgaccctacttattttattgctttaattcattatttggttcttgtgtttatctatttttattgttgttgaatgcgtgtttgataattgtattcttttatggttaattattgattgattcaaaacaaactaattaaaccaaaaaaaaatgaagaagtttcttttcaaataaaaattggtggagtgcatgtgctcgatctaaattatatttatctttagttttaattatttaatctttttatgtaaaattgattcaagtttggtttataataatgactttgtacccttatttgattaagaagacaacgctaatctaagcaacattctcaaaagcaattatgtacatattatagtactctaatattggtactaataataattacatatataatctgtttacgagtatacaataagcaatttcattttctatattcttttgtaaaactagctagtattggagggctcgtatgttattttaaattaagttatataaaagtgaataatttgatttatatatgtagttgaaatttgctatcaattaggtaatatatgtatctcccattttcatagcatcatagataagtaatttaaccttattatataatgtggtatttaacttcatataaaatttggtcctattaattaaaggatatattttgcttgcctaattaagtacattaaatcaaattcaagtcgtaataattaagtatattatgcttatccaataagtatatctatctattctatataaagtgtgcctatataaccgaattcttggtttatgagaaattcatgggtgattttttatttatattaaaaataaaatgatttattattaaaaataaaatagtttatgaaaaatttatgggtcactttttatttatatataataaaataaataaaataaattccattaaatctaaaaaaatacgattgggttttgctgttgtacatctacgatttttctcttcttcttcttctcttcttctcttctagaattaccattttcctataaaaacactcattaaagaaaaagttatattttaacacatacagtataattaag

SEQ ID NO: 265885 - DNA, 1356 bp, Cannabis indica
atacaaaaaaaaaataccaaagtctacttagaaaataacaatctagatatttcgtaaactaattattgattttctaatttaaaatataatatattttcgtctatttattttaataaatcattaatgaaagattgtttgattaagttgattcaaaattaattcattaattttcaactttgatcgaactttcaaaattgaaaattttgaaatatctacatttaaaattaaatgtaattcaaaatttacgtcaaaaaatgattattaaaataaaataaaatatactcttatcattattctaatttaagttgatctgaaattaaaaaatttcatcataaatataactttctatttaattaaatttattaaaaacaaaaacaaataattaagtattttaataaaataaacttaatttttaaatctaatttaatatcaaaaaatatattctactttaagtttgtctaaaattaattttctaactaaaatatattttctattgaatttcttgaaatagaaataaataattaagtatcttgaagaaaattaacttaattattaattataatttaagttttaagaaactaatctaatttaagttggtgtaaaattaattttcaacttaaatatttttttacttaattaaatattaaaaatataaattagttacttgaaattagtatctagaatcttttctttcaactaaatgtgtttttctaaattaattttaaaataaatctaatgaaaaaattaatttcatttattttaatactaattatgttgctaatcaatttttaattagattaaattaatataattatcctaattcaataatttaaataaggcaaataagccttcagagttgggtggttcatgtgagagatgactgagtataatatgtcgtacccactagtattagggcccttattctcacacaaaaccccaaagagaggaatttagcctttcattaaataattattattaattgaataagcccaatactaagtgggcctaaataaaattatcaaagtgatattttattttgagcaacctagtccatttatatatcacaaaataaatgggcttcctatatgcatataaactttatcgctgattatcatgtcagtgtcaatctagtgtactgacaaattatgggacttaaactttgaaacatataatcttgattatatttcactgtgttgacaacactataatcatgaataactttatgttctagatttaatataatttatacattaaacatataatcatgaaagtaatcatatgaactatgtaacataaaaatgatttctgaagcgacaattccctagatacacacgtcgtaatttatttattttattt

SEQ ID NO: 265886 - DNA, 1063 bp, Cannabis indica
gaaattgattttccctatcatttatctcatttaatgaaattaaggaaaaacaccaaaaaattgaaagaaacctctccttcccttctctctcatttcgaaaccagcaaaattaaggggaagagctgctgatttttagtgatttcagcaaagaaactttgggagattcaagctaaggtaagccctaatggaacccttctttagttaagcttttgtttggtttgaggttatggttttgtgctattggggctgttaggtttgagaatgcttagggtttgaattttatgtttcatttgagttgattttaagccctggatatcagttttgagctatagtgttggaattaagcaaacttgacttttgaaactcaagtttaggtcattaatggcataatttgatttagtggttttttctcggatttgttggttggaaaatgttgtgaatgcattgtgcaggtgttctggagagtttggtaaagtttggttgaattttgagttcatgggggcattattttggttcccagcacagaactagaatttcggttctgggggacctgtaacaaccggtcgaccggttggtgtcccagaactggacttccggttgggaaccggtctgccagttgggggaatttttggaaccctagtttttccttttttgagagatttagggtattcccatgttatttatcgatagaggaacttttagtttcaagtttaagtccccgaaaagtgatttagcgagtcactcatctgtgttacaattaatgtgattagggcatccatctagtgcgagaatttccgttcaagtcggccagcacacttgaattcggaaatcaggtaagaactgaatataatatgtgatatggttatctgaatgtatgtatatgtgtgtgtatatgcatgcttagattgttatttgcactaccaacacttgtatggatatgatacatagtgcattggtgttgtttgtgagtacaatacagtgataccaacacaagtacgggaaagtgctgaggtgtgtggtatctcactcagtggtactcagggtacgaaacaaaccctaccaa

SEQ ID NO: 265887 - DNA, 1715 bp, Cannabis indica
attcattataaaaaaataaattagtatatatatttgaatttatgtgtacgtgtcaatgtgaataagaataatttttctggtattactgcgtctgcatgttaaaatggtattactgcgtctgcatgtgcctatcaaatgtccatatgcataagtttcattgtaccaaaccaattattatataataaatacacaagtacccacaatgcataccgtacaaacatcaaatgccttttagtaaatccatcaaattactgttgatgggtaagtagggtacacaacagcatagacaaacaaaatccatagagccatacaagcttggcattatttatatattccacacaccaagggagaggcagatttcaagctgcagcatttatagcattaccaccatccttttccacaaaagatttcacatactccttcctgcaaagaagaaacttatgtgaggaccgaaaccgaacaggaaagaaacatgggacaacccgctgttgaagcaaagaagcataccgagctggaagatggtcgtggggacgattgaatggagtccaaactgggtcaccaacaaaaagcctcattgcctgcagagtgtatttttgtaatcattttagtggacaataagataatttggtaaccaaataaccaataaaacacatggcacaaacttaacaaagtatagataatccaatctgagactacattgtgatcaactttaacaataatttattttctttctatgatttcccaattcagaacttcatgctcatgtttagataagtaacagcataaccaatgcttagtagttaacacatgcaaagataggatacagcacccaaaaacatcatgcacgcaacaattgttttctacatgttcatgtatggataaggaacagggtttgcgcactaggaagttttattttttgggctcttagtacaaaggaaatacagtaattttaaaaaataccaaatgaacatgtatattttttgcagttttttttcaagtctctaggctaagtgggccttaggtgcaggcccggtctaccttagaccaagatcgggcctgataaggaaagaagttcaaactcagcatgcaacaatacttattaatgcagcgcaaaagtacaaactttgaatctttttttttattttagaaaaatgtaccttgatataattgtttgtgtccaaagtaaaacggtgataaattccagcaggcaaaacaatcattccacctttcttcacccatacacggatccagcgttcatcacggtctctcacatcaaaataaccttcaagaaaaatataaagaatcaacaactagatctagctggtgaagtgaggacaacaaactgaagagtgaccaaacctaccacttcctgccacacagtagcggatctcttcatcagtgtgaagatgttcctcaaagaaattttttatcttttcttcgtaatttggaagcttctctgggcaaacttcacagaaatccttaacaaccgaacgaagaaaaagggctcatcaaatcaaagttaggaatcaaatgtccaagacacattttaatgttgcatgacactgactaagctatactagatctcaacaagctaaaaaagaaagggtgcatctttgctattttaagcatttactaaattcacttgtaaccaagaaattttcaggagatatattaccaaataataattaaaaaaaaggctataagcctataacaat

SEQ ID NO: 265888 - DNA, 349 bp, Cannabis indica
tttcaatccgaaaggaatgactaggtagcagtatacccccttattggtactgaagctagtgcactcttgatctgctatgtgcatttttatttggttataactggcgtatgcgtccatgaaggacagtagtttgaatccggaggtggcgtctaccatctggtcgatcctgggtagaggaaaacagtcttttgagcaagctttgtttagatcagtgaagtctatacaaactcgccaggtcccgttaggcttcggcaccaggaccggattggctagccattctgggtagtaaacattgcgaatcatgtcgcttgttaatagcttatccacctctttctctaaggcttcgacc

SEQ ID NO: 265889 - DNA, 442 bp, Cannabis indica
ccgataagtctaatggtaaataattagggtttatatttatattatgagttaatcaggcaataagtgggattatgatcctactaatttatttcagtgtaaaatataaattttgctatatgtgagtaaataagcgtaatttgtaaattacggagatttatatagcatgtgtgaatgtaatatgagctatatgtggaataaaatatttttaggtttggcgaccctaaaaattcgataagtggatatataagcgtaatttgttaataacggagatttatttgaaatatatggatataatatgagttatttgtgaaataaaaatattttcaagttcggcgaccctagagacccgattggaggccaaaaatgttgcaacagttttagttagaaatattgatgggattattgggataagttgatttagaaataccagagtatttagggg

SEQ ID NO: 265890 - DNA, 1392 bp, Cannabis indica
acagatttttgttaactaaatatataagcattttatgtaataaatataataaataattgatggcaacaataaatgaacaccagatattttttacgtggttttgtagttaaaatctaaatactctatgagtccatattattagagataataatctgaatatagagtacaattctctcaataaatgtaaaagatagtcttttctctcaaatatgccatcccttttactctaagctttgccctcatttatggtgtatagggtggcagttattttgtttgggatttaatcatttacaactactcatgaaatatggacattccccacatttcatttttatgcacatgggataaaccactcaaccgctcttttatctttatccttaaacgcttatgctgactatgaaggttatttctcgctgagtacgagttgtccctttttactgttcttgtaagaaaaaacgctaagtatagacatacttctcctcgcaataccctttaactttgatggtattagcgaggtggttacttctccgtataaatagtgagatgaatgaatatagttattatctccatgtacacttatgtggatcaatgagcagccaactcttattcccaagtatatgtgggtcaatgagctgcaatctcttcaatatctcgccttgaacacttctgttatgtactctgtctatcccgagatggacacgttgtctcattaaatgtatctattaatagttattattcttatctcacatatgcttatgtgacagcgagtttgaatatttctattaactgtaatttattgagaaaaattatttaagtcgcatttaataatgcaatctaatattataatcatagagttgattcctattcctcctgaagtacacgtgattacttttggttgatagccgaattttaagtataacaaatgattacgaaaattaaaacataaattaaaattttaaactaattaagtgatttaaaattatttatttcttactaaaaaattcatttagatattaaatttaaaatttaatttttgtaaaaattaaattttacgggtaacaaacttgagtatattttatttttcttaaaaaatgtagattcgtttaaataaacataacattttcttagtttaatttataactttttcaaaataattttacacttttattgaattttagttatttttctttatttgttaagatatgagtttacaaatataaatgagtttgattttttcttcaaaaaatcttagtttatttaaattattattagattctcaatcatttcgattttattttttagaatacgtgtttataaataaaataaattttaaaaatatattttaagaataatttaagttttcttttagtaaaattaatatatattttaatt

SEQ ID NO: 265891 - DNA, 2373 bp, Cannabis indica
tttttttttaaaaaaatgaataactaataaatgttttatcaaaataatctcagccaaatataattaaaaaaaaatcagattatataaacttaacttaaatccacaaaaggacaaaaatacaaataggcaaaaagatcatttttcccttcccacactaaaagtcataaaggtcacttaggggtatttttgtcaactctaaaatctcaaatatttctgacattcccaatgtctagctatatgccccgctatactaaaaatactagattgtgattttaatagccaaacaccgcattctaatgttgtcgggcagaaaacatgcaaaattataaaattacatatatgacatacaaaatgcattctgaattcaaataaatctccgtcgattaataattcaaatatgcaagtttcataattaaaccttaattgtctgctaattttcaaattaaagctaagcggtctttacatcaagggaaggtatggcatcaacaagagaccttgtagccaacaaaagttcagaattatgaaattctaaggtatcagagacaattatagagtccgttggatggtgttcatatagaaaggattgggcctggaagaaggagaaatggtgcagtcggtaaagtgagaagaaacgggtccagtaaaattcgagtcaataggagtaggaaccatgacaacattagaagttggggggggtccctaaaaatgaaggccctatggtagatttcagaagggcagtaaaagtaaaagcttgggctaaaaaaaggttcatcattctttgatcatgtgggggaggatgttgtggtaattcagtgatggtgatggctggtggatgggggtaatcgaaaggtccaagcttatccatcaatttttcttttcccttaaggaggatggtgtaaggactaggggtgaaacaaggctctcatcacatttctataaataggcctgacaatactttcgggtatgatcaagcttaccactgtagaaataaaaatcttggagcctctcatatttaaaatccaaccacttagtgaattccctacccatcttgagaaaacagatgttaatacccctcataagaggcttattaacatcaagaagaaatcgacctcgtagataaggtccaatacgttctttgatagtgtcttcatcaacttggataagatcacctaaacccgaagctgtgagcttagcaagctcataagatttacaatgaaaaggaattccatacacttggacccaaaagggaatgtaatgaaggtgattagcagttatggggaaggaatgatctggggaggcaaagacagttaagctttgggcaaaatgccaaggctatccatcaagaatcctccttttgtcaccctcacaacaaaaggtgacgaggaacaaaccctcagaatgctcaaagacaatcacagacattgggaagtcctgatttggaaaagagttttcatgagagaggggcgactaaaatgacgaatagtgaacaatcgtaacatgagattaatggtagaattagaatcatcagggatttcttgaagagtaaagacatcattttcttcttgagtaagggacataaaattagaaggcaagatatgcatgttatccattttaagaaaatttcctagaataaagaaaaagaaaataggggttgaagaagaagagacctggatgtgaagcttaggatgtgctttaaatagaaaaaaccagagactcctaataatatctcttctgcaataattggtcatagtagccttctcttcgcaagaggtagatctcatgatggagtgagatctttgagcttcacgatgactgtcttttcgccttgccgccattagtgtgagataaatgggatctttagggaggtttgtgatttgatagtgaggaaaaaataagagttgaaagagcggaggaggagaaattggtggctgcaaatgatctaaatgaataagtttgcatttgatgcagtaagggaaagaagaaaacattgagattaagggatttagaagatcaaaagcattaaatgtacatttaatgcacatggtattataatgattacaagagaaggaaagtaagaggcaccagaatccaccacacaatgccggtgactagaaacccattttgggtaccagaaaggggaacacagaccgtactcttgaacattctagaagattatacatgtgcataaatatattgttacattttaacgttggagactagtcctttcttactcagcaaatatttaactttgagccttaatctcctaatcaaaatcagtttaaactgaaattgataatttctcaccccaaacaaaatgaattttcctataaaaaatggctaattagtatttttctccctaaattttgacatgta

SEQ ID NO: 265892 - DNA, 597 bp, Cannabis indica
gagcattgtttttttgaatattaatgtctagcaccttcagatatgtcgtcttgtaattaactgacaatactttttaaaaattattatattaaattatataagatacaatacttaattggacaaatagcaatattaacacatagaaatgtgctaagagcatctctaatagtagcatcttttaaaaatgctaaaaatctctacatcatgtaaaaatataatattttattttagggtaaatactattttgaactctttatcttcagaagttacaaattagatcatctattttgttaaatgataaaatagaccttatattttttccaaaattataaaaataggaccctgaatataattttcgacaattttttttttaatataaccaacttgaagacaattcttaacacgaacaaatacaaaaaatgtaaaacaagtttcgtcatacacatttagatcgaatttttattaaattttatcttgacaaaaaatcagttcagggtcctatttatactattttgaaaaatacaggtctattttgtcatttaacaaaacaaatagtccaattggtaactttggtaaaatagagggtccaaaataata

SEQ ID NO: 265893 - DNA, 2419 bp, Cannabis indica
tattattataacatacattaattaacatagcataggacatataataaaaggactttttttttaaaaaaaaaaaaaaacttattaacccattaaagggaccagccataaaagtcattacaaagtcactaccccagaccattaatactaacacaagtatccctttaagaattcgtatagagagaaagagactttgcttaaacatgactacttattccactattctcaccttataggaaggaaaagataagcatttggtttaacataaaaagaagcccaaaatcagctttatgaaattgttgaccacattctcttatagccgagactttgcttcatccaatggagcactctgcaagtagaaaggcagtagttaagagttacatttcagattctttgtaaagatcagtcaacaaaactgtttggaagcatggaaaatattgatgaatgactagtaattagagttacataacagttgtaagtatattataatgaacaagtatggtattagttgttttaccagagaagctccctttgctgctctttcagctaaatatgcacaaggcttgaagaatcctccatagatctttgaccattcctccagttttgagtatatgtatttggaaccaattgaatcagcccagaatatgacaccacccctgataagagaacagaagaaataccattaacttttgtgtgggaagttttatcaaagtgtggttgatcaggtacattgtactacaaacctgtatggagggaaacccatgcccatgacagaagcgatatcaaggtctgctgccttgactgcaattccttcagcaaggacacggcatgcctcgttcactactggaaagaacatcatctccacgatatccttttcagataactttgctagctgttgccagattcaataccgacaatatgagagagtgagacagagaattgagcagaacataacttgaatgcatagaaggatgagatataaaaaaaaaaaaactgagagagagagagagagagagaccttagggtcaatatcaacaccagacatgctcctcaacttctcaatgtactttttcaattcaggatctgggttggctctgcgtttgtcaccataagtatagaatcctttctgagtactttcacctgaagcaagtgaaaaaaaatacttaagaatctatcaagttaactaggatgttagttagtccacataataatatgttgctaaccagtgtcactgtaaatttagtaccttgccttccatcaccctgcatgagtggtataagcaaggacgtgtatgttctctcgggaaagttctcaatgtattgtgtgccagatgcgattgccacaccaaacccgaccagatcaagcaacctgcatcacaaaagaaatgacgatgttcacaatattgtaacaaatcacaaatatctcaaaacttaagatgaccaaactaaatagtaacctgaatgggcccatcggcattccaaatttggtcattactttatcaatttggtaggcatctgcaccacgctcaataagcaagagagcagcttgtggataagggaagaacattcggttgacagcaaagcctgtgcagtttccaaccactactggggttttctttatcttttttccgacatcaaacaagtcaattataacttgaggagatgtcttgttcgtacgaacaatttccagaagtggcatgatgtgagcaggactgcattgtaaataactcaaagattgagttttttctcttttttcttattttttaagagaaaaaaaaaacgaattaaagcaaaagaaaggtaaaagtaaacattacctgaagaaatgagctccaacaatacgatcctgggacttcgtcttctctccaataaggttcaagtcgattgtggaagtgttagtagcaagtatgcaatgtggtgggcaatattttcaagctctgaaaaaatttgttgcttcaatgagatattctcaataacagcctgtttcaaccaatgaaagaaacacatgtaaacatttcattctccagctttgaaatgaggtgcaattacaaagttcaaagagaaagggaaataaaacaggaaagaaaagaaattcaccaaatatttttacctctatgaccatgtccacgtctttaaagctctcgtaacccagggtacccttaatgagagatatggttttgtcaaactttacttgtgtcattttccctttcttgacgcggctttgaagattagctggataataggaaataatatagaagctataagtgatacaaaatgaaaactaactacagctttacaagataattattaccaaaacataactttatccagcattacaaaaatatcagtccatacattattttaactgaatcatgtgataggagaggcataagtgatttagcagttataacactatgcacaaa

SEQ ID NO: 265894 - DNA, 542 bp, Cannabis indica
gatatgacaacaaaaaaagtactaggcatacgtatagcgcttctgaacttctttttaataataacctgttggtaacctatattatagcacgtcgtaaaaaatataaccattatagttatatttttaatgtaaccattgaatagacacctctctctatatataacacatatatttaagatctgatttatcttaaaaataaagaaaaaaaatgatacctacattatatacgaaaaatctataatacacccctcaaatgggattgttctggtacacctcctatttcgtcattcagaagaatatataccattatagttatatttttaatgtaaccattgaatagacacatctctcgatatatataacacatatatttaagatctgatatatcttagaaagaaagaaaaaaaagtaatacctatattatatacgaaaaatcttaatacacccctcaaatgagattattctggtacaccttttattcgtcattcagaagaatatattaattcgatttttttttcataatcgtgtatgttagttagata

SEQ ID NO: 265895 - DNA, 466 bp, Cannabis indica
ataatacatagcgaggcatctacctcgcaatatgcagggaggtgttgacaaggaaaattggttgttagaacacttagcatataatatacattatactaactaagtgtaatagcttgaaggacatagataacgcatagcgagacacctgtctcgctatgtacaggaaggcatactcttggtaggctccagctccctgccagggttattattgctattgagaaccccaaggacatgattgtctagtctacaggccttataatcaaagagcagttcttaaatttgctcagtacactggtgctcatgccaatgctggaagacttatggataaatcaagttgttcatgtaccaagcgagacaccttagcgagatacattttgcaacatgtcgtaatccacgtcagcgttgaccctttaaaacaatttaaatcacaactgtgtgatttataaataataactgcatttattta

SEQ ID NO: 265896 - DNA, 818 bp, Cannabis indica
attatgagcctttcgtaataaatttggcacaaaaattataagagatttgagaaaactaatataaataaaaataacaccaggtttttacgtgattttgcagttaactctgcatagtccacgagtctatcttattccgatatttctgatacagaactaggatttttataatcagtatactcatttttctctataagatttcttgtctcttttttcgtataatctgcccctaattatagtaatataggttgggagttaattacatttaacttcaaatctcataacaatatttcccaaaattatggactttaattatgctttatgtaaataaatgcagttaatatttgaaaatcacatagttgtgatttaaatcatttttaagggagtcaacgctgacgtggattaggacacgctggcaaatgtatctcgatgaggcatctcgcctagtacaggaacaacttggtttattcataagccttccagcaatggcatgagtaccagtgtagtgagcaaacttaagaactggtctttgaccataaggccttgtagactggacaatcatgtccatcaagtcattacacttacttattataacgtatataatacgctaagtaatctaataaccagtttatctcgtcaatacctctttacatacaacgaggtagatgcttcgctatacattttttatgtctccctcaagattatgccttctgatacgaaatgatttctcgtcaatacgtgaatcaatagtttgtacattctgatctcgcttaagactgtgtagtcagggagttataaatatactctataaattatgcatt

SEQ ID NO: 265897 - DNA, 760 bp, Cannabis indica
tctttcttcgacgtggctcagccttcatccataaaccatacgacttctcaatttgctctagtggtacctcaaataatttgtggcaaaacttttcttaatggccaattatcccacatataaaacaaaatattggaacaaactcatatttaaattggcaccacagccactccccattagtcctcttcagtttaattcttctcttcaggagttgctctctattcacagtaactctgttgcgtaagtaatccctccagatgcccataaaattcttcggatcggacttaacaaaagaactaagtataattaccaacggttcctagcattggtttcagtccattaatcccattctaagattatgcagctgaacccacatgtccaaacaaacactcctcggatcttcatcctaccttcagacgttcaaaaattaattggaacctattgaaggtccaaggtactccctttaataactctcttagattatctgtctcatgatagaattggaaaacataaagattaggttccaactcttttactaaacatacatttgccaggttccaacgtgttctgcgatggagtcaaaatctatgtactcttttggttaagaactttccaactagacaccacctatcatcgataggttggcctacatcctcaacgacgatcaccagagtaaccgttccctcttcttcttcctccaactactatatttcgtatttgatcattcagttgaccaacgttcgttgactactgaagccatcag

SEQ ID NO: 265898 - DNA, 634 bp, Cannabis indica
gatattgcttagatatcttcatacgtgagaatgaagaacaactataactcagaggtgattacactatatatgagtcataccttggcacaatcaccaagccagctcataatacttctagcagcttcaaacatctcttctaaagctgtcaacgtagtctgctcatgcagtaaaatcagttcattaaaacacagatacatcatccgtcttcataaaaagtacagttccataaaagaaaatgttcagtttattcacttactcttgcagcatagcaagctgcagcaaagagttctgaatcatcagcaatagcatcacgctcctttaaccttcttttaatttgatcacgtgcacctatgtaagtaacaccatacacagatgtcatgactgtctgttttaccaatttacggtccacctgcacattcccaattatataagcaaatgaaattaagattacttatcagttaagcaatctgaatcaaagactgttctaaatcagcctaaatacttctatttagtttaattaaaactatgctaatgtcaattacaattacaatgttttacattataagcaaacttcattactgatccaagatgagaagcatgagaaaaagacctgatcgattaatttcctggcatg

SEQ ID NO: 265899 - DNA, 1992 bp, Cannabis indica
gctgctggtttcttcacatctctatttatcttttcaatcttgacattctccacagaagactttttctcaatttgaacctttctttctactacattgcgctcaactttctcaaccttaacaggttctgccttgaaacccttctccatcttcccagaggaagttttttgaaatttggaaggcctgggactctcagcttttggagattcgagtttgaaagaaggtttattttccaactttccattctgtatatctttgcttgtttcttttatgacaatgtccttccatatctcaatcaggccggttgcaagagtctgtattttcttcctaggatgtttggtgagaggtcgaagacgctttccaacctgaaagagagcatgttaataatcaaatccaacgtcccaactctaaattgaaagaagctaaatcagaaacactgcgataagcacaaatctgattctgtgacatgtaacattagatgagcactaaaaaaaatacattggacacgaataaataaataaaaatataaattaaacagcataacttattcttttaatgttcaacagtataacactgaagcaacatccagggtaaaaataatctgctaatagaaacggctagtttgtcccgaatactaaataactttctcatgaaatatcagaaataaattaatgcaattcagaaaattttcttggaagaacaactgcctaattttgcacctttacccttaaagatcggattttttctttttaattttcttatggtgacatttagtgattaatcaaacttaaacacattctcatagacaaagaaaatttcctcctttttaccaagtcctgaacattatcacgtagctcaaaacgttttccatcaactaaactcaaaatcttatccaaattatatttaaataaaaagaaaccctaagaaaacaggaagtttcagatctaaattgtcgttcttttgactaatatcgttaagtagaagcattaacttttccattggcctaattttacaaattccattatacatacacccacagaaaccccttttgtatccaagcattgagcttttaaaaaaaaaaaaaaagacattggaaattcacctgagtggagacaaggagttgataagttacgggaaaaatcttaagctgttccaatgcatcaaggcatcggccttcctctgcgcccgattctgtcaacgtcgccgcagcgtcagcggctttcttcgccgcttcaaacagctccaccagttctgactccatttatgttctccctctaatattcacggaaattaatcaatcacctcaaattttccacaaatcacaaaatcgtataaatttgactacaaaccaattagaaatattgcgacgaaatcaatgatcggtatttacaaggacaaaaaataaaaatgaatagaaacttacagagagatctatgagagggggagagtgactgaggcagctgtgttcgttgtcgtctgtatattattctggcgctgaatttggttgaaagagggaaaaaaaaggggaaatgtggttgccgtgactagtatatgtatatccacggaaggaagaagctaaggcacgtgtgatcggatggctgttgtttggcacacgtgtaagaatgaagggaggagataggtgttgggtgagtaggcttgtgttctagttgtagagaaccggtcttagggtttgttactcttttacctcctaaaaattgtcatgggtctcactctcttgtggtatttaatgagtattgacatcacttttttctgatgtttctctttctctttctataataaactttaattgtcctattcctattcctgttatattactttcatcttcttaagattatttatttatctttgttttaagtatttatttatctttttaaataccgttattaaaatatatttttaatacattattttaacaaatgtttttttagtttttacagttttttattaatcctaattacgattttatataaaatc

SEQ ID NO: 265900 - DNA, 606 bp, Cannabis indica
gaaagatgggtaaaattacgacactagtgacgccccaatttatttatattttttaggcgctgttcgtcaaatatagcataacagcatcaacaatagcatatactgaattaacaaaaagaaggcgaataagaaatcagtagtagttaatggatgaaagattacctctaaaatataataataataataataataaatgaaagacactttctttgtgtctctttggtgcatgcactgaaaaaactcagaatggattgaatttagtatcacattgtaaattcaatgttatcaatgttacaatatttgacctgttcacttatgtgagctatatatacttctaattaatctcattttactcatgcatgtctatggcaaactattcatgtttgaatttataacattaacagcttacactcgatacactgtatcaaactctcgtgtgttacattgagtaacttattaaacgaatataatatttatatttatataatttataaggtgcttcacaaaggacccccaatacaatcccgttttaacatctgcaaccaataatttattaatacaattttttttatagtggttcaccttataattatttaaaaaaattaa

SEQ ID NO: 265901 - DNA, 1357 bp, Cannabis indica
gttatgatactcgcatcttttgttggggtccctccgggaactatccttgtacagaggaggtggtctccggtagtgtgtattttgcctagtagcaaagtacacacgctcttgggagtccgtcaactccgtgtactgggtgtattggggagtgtacccccttttttgtcgcttttcctccgtccgggtgctgcctttggaggatcttttactcctcgagccctgagaaggacctgccaggctggcagttggagcggagtgcgagggggcttgtccatttatccccgagggatttccaaaatgggacgatgcgggggccaaggcctggccctggctgtatccgggagtagcagagaattgtatgccgctcattggtggagctgcggtcgggacagtacccgacggctgggctccgggcatataccctgctatcccggtgggataatatcctccataggccactatttgggcctcttcaagattgatgtatttttggactctcttctggaagtcctgaaggtttgcagctccttcctgttgtagttcgttccagaatggagtccctgtacggatgcctgcctggagaagggcaagctgttgtccgtcatcaactttcttggtcttcgaggcttcctctcggaacctctttatatagttctttaaggtctccgtaggcagctgcttgatgttagtcaaggcactgacctccaggttaacctttcttgcggcgacaaactgtctccggaagttggtctgtaacttattccaacagcccacggatcctggctccagtttcttgaaccattcctccgcggacccgcttagagtaagcgggaagcacagacattttgcgtcattgctgactctcatgaccgtcatgacacggttgaaccgcgacaggtggtcgcttggatcggagttcccggtataagctgccatttcgggcatcttaaagttcttggggagctctgcttccaggatgtgcttggcacatggctcccggtcctcacagtctgagtcagagtcgtcgcctttctgtctccgggagactcgggcgatatcttttcggagtatggcgagttccgccatgattccttcatttaacgttcccgtggagaccgcgggtccgtatttcttttggtcaaggtgatcccggaggtcaccttgattcccattgatttgatttctcaaatcgacgggaggacatttctgtcctcttcttcctctacctccgggctcctggtgcacggaaacgctttttcggtcctctcgatcctgagggccaagactccatttttggagtttgcccctctgcggaccattccctttcgggaaatctgagcgaacctttcgcggatcc

SEQ ID NO: 265902 - DNA, 546 bp, Cannabis indica
tgcatgttggtggcatgttgatggttagtttgtacagcagtgacattttttttttgtaaatatcttcaatattgtcttgatttggacaggacatggtattcgccatttatttgggtctacaaatacaatagcgcaatcgaatttgagaaattcagtgatttggtatatggttatatgaccatatgtctatagagcaaaaatcgtatatgtttatggtagaaggctataagcttagaatgctcttaatttaaagaaggagtacttggtgccggctctccaccatctcttgacaccttggtgataagtgagctactactaattagtgcgactagtagagcgggcatatgaggaccactaagggactcatatgtctccatgagttggaataatcatgtacactatcgggctgacccagtaatgtgtctaagaacgctgccagaggttagcgggtatattttcattggcttgccagtatgccgcttgcacggtacgtgcctaaacctcccagagacattgtagtgggcttgaagtaattcttctgagtag

SEQ ID NO: 265903 - DNA, 774 bp, Cannabis indica
aacttcttttaataattattcaataaaatatgtaaaatcccatattttccaatagcttttcaacttcatcctttaaaatattttattaatattcatactttttagttttatctcaatttttgcattatatatatacattagctttttttttttctgcatcattaaacttttatacttttaaaatgatattttatttcttttctaatttctagatagaatataaaaaagaagagaaaaatttataaaattataatgcttcagagcatgaatggttattggttgtagctaaatgtagttagtgctttattgaactaaaatagctaattatatacctcaattaatggagagtgaatattgacataatttttagctatatttttacatctcaactattttattaattcactgttgatccaaaaaaaaatcacctattgagtgtttttagtgcatgaggccttggcctctcccaaaatttgtgatttttttttttttactacattagagcatgtctgttttagtgtaatcaagattagaatggaatagaaattacaattaaaatgtttggttggtccttttaacttttgtaatccctttacattataatgcgtattacaccacttgcatgaattctcattacataggtacaattactaataaaataaataaaataaggacaataaataaaataaggacattttggtcaatatattaattatttagttttatttttatactaaaccaaataaaaaaaattgactacaaaaaatttgttat

SEQ ID NO: 265904 - DNA, 1145 bp, Cannabis indica
acagaggtattttttgatatttttttaattaagtagttaaactaagtataaaaattcaaatttctcttttattattttttattaaattaaaatttgatgatttaatatttttaaaattaatatttatcattaaatttgtttagtaaccattcatggtaatactcattaaaaaataattcatgtatatatgtttatcaaaaaaaaaaaatttatttatatacagtctaatagtttctattgtaaatgtgtacatacaaacaaaaatacattatattatcaaatatttatttaaattttaatatttatatataaatatattagtaaattaggataaggatcaacccgtgattagcccatcatccatgttattcacaaggctgcaattgcataatgattaaaggctcccaacccgtgagtccgacatagaatatgctcaaacaatacgtctatactctatagataactatgtcactttttctattcaagggaaagaataacatgtaatgaaaacaaagccaaaagccaattaaaaagtttcattgccctttcttaaaaactcctttccgcaaagtgcaaaatcaacttcataaaatacatcatcatcatcatcatcatcatagacttctttttcacttaaaacaatatatatcaacttcaacatgtattaacataggtatagtagagacatgaacacgacaagtcaaaacataatagtttgagatgttttttagaagagaaatttaaatttatatgcatatatttaacatatattaaattttttgaatataaatttatcaaaattaaaaaaattagcccactttatattaatactcataatactcttctttgctttcttcttttttaaattcattatctatacttcctattctcattcgatggtggttcgatagtgactcgataatagttttttttttttttttttttatatatatatatttttgtacaaaaaaatgataacatcagactaccattagaccatattatatatttatagatgttaagctccattcattaagctcgtcaggaagacatcatttcactgtcggaccatatcttacagttacatttataggcagcatcggagagagtcactattggactaccatcgaatcttcgtcttcaac

SEQ ID NO: 265905 - DNA, 799 bp, Cannabis indica
taggagtttttccccatcttctttttcttatctatatactatatatatatactatacttggttaattagcttagtttgatttagcaagttgtagttaggtagtgagttaatacatttacatgttactaatatgatatgataggagtctctttttgggacctttattaattaatttaataatttaattaataatctttactactgattaagaaagtcaagatggtggatgcatagtatctctggttgtgatatattgtgaatagtacgtagtaagattttataataagaactgctaaaagatacaggtagcacctaatatattaaaagtgctatatatatattattaatataattaaattttaaattttatttaatttaatataataattttttataaagtattgctaactattttttaagatatcgactcatattaatttacgatattttttggacacatagtgttgttttagcatttcactttaaaataacatttgtttatttgttgtaattaaattatacaaaattatttgttgggaggaggagttctcaatatgagctaataattaagttgtatttaatgttaaacatgcatttagtttgatgaatttcccttcaaccaacgatggattggatatatgaataatactcttatttttgtgtacaatatattattgattaattgtagctctattacaatcttaggtcggccttactttaaggtaggttcggctacgactttaaaatatttaaatacataaaatacttaaagcttatttgctttcatttatatatatat

SEQ ID NO: 265906 - DNA, 717 bp, Cannabis indica
ctgaaatggtggataaggcactgcgagctaagggggcggtgggatgcatgttgagtctcgtgagactccaattgtcagcgggactcctacccttcctacatcaggctttagtaggggaggtagtggctcggccactgaacagaaaagaaaggcacctactgcatctagtggttcaggtcagaacaagaggttcctagggaactagggtcgaggcaatcgacaaggtagctctgagactcgatacagttatccatagtgcctagttgtaaaaggcaccatctaggggagtgtaaagggcaggggtgcttccagtgtggcatgccagggcatttcaagagggattgtccccaactcagaatcgaagcagcaaagactgcagcgaaacccactccagccagcgtgtttgcgataactcaggctaatgctgaagctagcccttcagtagtaataggtcagctctcggtcaataactcttatttctctgtgctgtttcactctagggtcactcattcttatgtggcagccagaatctttagtaaattggatagactgcacgatagttatgaatcagggtttggaaccctactacctgggggagagttagttatctccaaaaggtgggttaggtctatcccgatcaggattgacagtagggaattaagtgctgacctaatagaaatgagcttatcagattttgatattatactgggaatggat

SEQ ID NO: 265907 - DNA, 491 bp, Cannabis indica
tcatgatgttgtgagcaagaagcctattcttcacaaaggctccttggttactttggacaacaagaaggaagcaccgccgagaatctagaaaaaatcatcttcgagatgcatttatatatcgtattgcagcaggcaatgggtctataatcactagcagataagggattcactaccttggggattagaaagatcaccgtttcatttagacttttcggtagtcttccatcattgaagaaacccagaacagatgtggatgtatcttcaccaatttccttccacagatttttgaaaaaacccgagccaaatccatccaatcaggacttttagaggagtgaatgctaaagatggcattctttacatcactcttactaaaaggtctgatgagattcacttgttggatcaaactgaggctagctccatggtggagacaatctgtattgattcggcaagtaggtgaacttttactacccataaagtgttcaaaatgagct

SEQ ID NO: 265908 - DNA, 453 bp, Cannabis indica
cccttaaaaagttctttttaattaaaaagtgctttttaaatgatctcagagggtatatttgtcataatccctttcttcaagaccacgcatgtccttaattttaacggctccacagtttcgagggtcattattagcattaatgaactgccctttcgtcttctacatcattcccaaccgttagattttccaacctttggccttactgttactaggtgttaagtataaaatgatggctcaggctagccatattccataaactctttgttttttggtgaatttcatccagaaattggattgtcactctcctacggagatgtcccatccaggctcagaaacttatccctcaaaacttgtaacaccgaaatataccaaccgcttttcttctccatatgttcttaaaaaattcaaacctcagttaaaattggaaacgaaaagattccaagactgaagatc

SEQ ID NO: 265909 - DNA, 598 bp, Cannabis indica
ggtttggttctttgtctcggtacttgtcctagtctcagtcccacatctagacaccgaccattggtctgttccaggccccaagtcacatttctgagtttgggttcgggatcgagactggggtgcggttctaggtccggaacttggttctgtgtccctagtctgtttccatgtttgggtctgagttcaggttcgggttcgggtcccgagtccagatttgtgttgggatccgggtccggctcccaatttggatctatgtctaagttggagtccgggtcgtggccccgttacggttcgagatctatgtccaatttcagttatgattccaagtccaagtcctagttccagtcccggtcaacttccgattttggttccaattttgggtcacaggttacgggttcgggtccacttttggctttggacttggttcaggtctgaatgagggttcgggtccttgtcagggttcgggtcaagggttgagtcccagtctcgttccatttcttgtgcccggtcacgagctatgtcctaggttcaagttcgggtctgggtcgggaactatgtcccggtcgtagttctatttcccaggtccctatcctgattc

SEQ ID NO: 265910 - DNA, 1155 bp, Cannabis indica
aaaaaaaaaaaaaacaaacaatacaactgaatataccttatctttattatttatatctgatttggattgattaggagctcttgatcttttcgttatttcaagtcagttgttgccaattgtgaaccctatttttttcattagttttatttgtatcaaaatttttttgtaactattataaaacgaatatgtaactattttcataaaactcaccttgtagaagtgatttttctttttcaccgtcaaacgaaaattcctacaaaatagataatctattatgaaatgataatgcaactataaggcaacaaaaaaaaataaacacactcatacataactagttgtagattgattcgaatttgctattcatattgtgtttataaataaatatattccacattggaaatcaaaaaatcaaccaaaatgcaactgtatataacttagatctattattcatgaccttttttttttaatttttcacatcatacctggttttggattcggtggggagctcaagatctgtttgttagagatttacatttcatgaatctggattttgatattagggggagttgttttgatcgaataaaaccgaaaacaaatgtgtaaattcagtttcttcacagtttttctagtctatttttcgtcactttccgtttagatcattgcatatcttattttccagtggattcggcggaattaatagtggtcttcccctcaattttagtttcatttcgattgtgttactgctttgaatgatcgatgactgttgttcttcatcgttttattccgtgcggctgaaggtttagaggagatggtatttttgtaaatatttatttgccggctgtataattgtttaatggaccggcccataatatatttgtaattttttcttttttttttttgtattttcctgtttttttcctaaaataaaaaaaaaaatgtaaattagagaaaataaaacataagattaagagaatgccacatcaattaatatataaatattttaaatttgagtattaattttaataaatattggaattgaaaatttgtaagtgtaattatagaaagggaggttatgattaccatgactacaaaatgtataaagttttttttttttttactaaaatttatttatttaaagaaattaaaattttattt

SEQ ID NO: 265911 - DNA, 551 bp, Cannabis indica
aagtttcatgaagcatgccattagaggtcatgtgagattgaaattgagcatatgtgtactctctggcattatcacttctcaaagtatgaagagatatattaaattgatttggaatctcagctcaaaaagcatagaatatagaaaacaactcaggacgtttttcattaaacataactaagttacacaagaataatcatccataaagtaacaaaatacctgaatctaggttgagacaaaaaaggaggaccccaaacatcagaatgaactaacttaaaagggaaggacaaattagataaatgtaagagtaatgacaaagtgagcataggtgtaggaacaaaagtgctagatccaagaacagaagatgttgatccatcagctaaggtaacaatataagtgggactatgagactgaaaagtgaaaaagagattggaatttcctgtcatatgatttgtggcgccataatcaatgacccattttgaggatttggaaagaaggcgtgcattagaatttctaatttgaaggaactaacgagcatcctcatggagccatat

SEQ ID NO: 265912 - DNA, 514 bp, Cannabis indica
cctagtctggttccatgtttggtcttagttcaagttcgggttctagtccagagtcaaggttgtggttgggatccgggtccggctcccaattcgggtcttggtctgatttggaattcgggtccttgtccggttgtggttctggatctatgtccaatttcagttatgattccaagtccatgtcctagttccagtccaggtcaacttctcgttttggttccaattttaggtcacaaggtacaagttcaggtccactttttggtctgggactaggttcaggtccgggtgttggttcgggtccatatgagggttcgggtccatagctgggtcccaaatcaagaaaccgactacgggtattgtccaagccctgggtccagagcaggatctgaatcacgggtccgcgtctcgttccatttttagtgccgggtcatgagctgggtccacgttcaagttcgagtctgggtcgggtactaggtcccgatcctagttctgattcccaggtccctatcctgattct

SEQ ID NO: 265913 - DNA, 1538 bp, Cannabis indica
aatgagccttaattcacgagtcatattattatcaatgttattttttctacacttttgagaagattttttgctttgtaaatacaagataataaaccctttaatggtgaaatacatgccttatttataagcagtgtgcacataggtcggttgtcccggaccagcgtgtagtttttcatatttcaaggccactagtaggggattttcaaataaacactcattaggccttaggataaagcccaattccataaaaagtaggtttgaaatactgttgtcaaaaactataatttggagccgacgtgtcaggctaggcatggtctccattttgcatgggaaaatgattgtgttagagtagtgaccgtttcgatccctagggtgatgctaccttttgtccaagccctttcctcaaacaagacaaaggagacattctttgaatttggtgggattttgtcagaggggctccatgtaggatgttcccgaagaagatgacattatacgcctttgcaccattcaaattcttcctgagattaatacccgaatgatcgccaagcatttttcactcaggtggtgtgcccagacaaggtttattgcatgtcagttcttccttttactgtgataggactcaagcaagtgatgatatgaagcagaccctcgccattctcgggtcaacataagacatctcttagcttgctaggctgagagtggaacacttccactcctattgaagtggtatttccttaggctcgagaccaagtggttacatgagattcctggttacacctttcctgggtggtacactagatgggcctgggcccgtcacccgttcttgggtcaatcctggtattctttggtcttgacattatcacacgtgtactccacgtcgtgttagggaaaatgtggataacatttacccccaagtccctttctgcacttatggagaggggacttgccatctcgtccaagtttgatcctgcatcttcacgtccctagaatggccccaactagagggggttggcatgttgtggattgccctttcgtattcaaggtatttttcatgtgtgggttaaataggtcgtaatctccatgtgtataagatgagcgagttaagctcacaattaatgggtggacgactaacatgccctacaaatattatgaggtaattctgtcatcattgaaggaagttgcgagtattaatgcatttaatgatggcaccctttcgcattcctggtccggttgatcaggatatctttgtcttttgccagctcatttgagccgtcagatttcaaaggtgtggattgagggtccaattgaaatttttttcaaaacacaagatatttactccaaaaaaatatataaactaaacaacaattgtaccgaaaaattatataataataactataaaataactatataacacataaacaacaatataaaaataactataaaataacaaaaagacaaccataaataaccagaaaaataacaacatcaatcttaaatatgcaaataatatataaattaactctgaataaactacaaaa

SEQ ID NO: 265914 - DNA, 1531 bp, Cannabis indica
aaatgagaggggtagaagtgagatgttaaagaaaaaatgaacatattttaccaatattagaatagtttaaggtttagtaaaaaaaaaaaaaaaaaaaaaaattaggtccaatacatgcataattaattaaatttccttataattatttaggatttacttgcaaattttaaaaaaattctgagtaatttacaatttcgaaaatagcatttacgtattttttttataggcgcgtctatttttcttataaacgtcgtaaaaaactacttgaattttatttttgacactctaaattatttaaaaaattttaaaaatttacaaatatgatctgagatttctataatgtatctcatcatgaaaaaagaattgaactaaattctttttctacatgcccaaataaatacggaattactagaacgatgttaggttatacatgagaaatttctgaatgaatgtgaaggagcagaaaccgaaccaaagtacttgaaatcagtggttagtattcgttgttgtcgtgtgacctgtcccaatggcaatgccaatatctagttagctaatatggccccgcaatatataaacgactaggatagatgaactgtcaggtactgtttatgcttcataagccaaccaaaataaagctacacactatttgttatgctatgctattaatttgtggctttttacatttggaccatttttctttatatttaatgcagttcactgttttgtattatagacatagtcttggctcataatattatattctcctccaatctttatagataagaaactggattctttgttttcttggtccaccaaatttatgatcttcatcgatctcatcttctcctgttaattaacctcagtaacttcttagacaaacaacacaacagatgacctaaagaaaagacctcaaatgtgtggtttcactagtttgatgcatgaatcacgatgatatagacaaattgacattattattagctaactaaatgttaattcattattggtctttattataatatttgtgtatcttatgattggtcatcacttaatttcttctctgttcatcacttaaaatatatagtgaactctgactgcttatcttccttttttgggttggttggtggccacattttgaaaagtatggtggggattctgatcactcatcagcataaagtcttctctcgaattagccattagtttcgtaaagttaataacaagggtttttataatccaagtttgcacaacaagataggtcagtggtcacactacctaccctaatagcaattgttgttagcttaagaaaaaaaaaatactaactataacttcctattacaatttcataattaaatttcacgcttaaaattacatgccggaattttatagtggtatttattatagttataatattatttctgtaaatttttaaaatatttttaatatttacagtatcaaaaatacagtattttttatttcagtttattgtttaaaaaatttcaaacttatatgatgtgaaaagtttgcatagaattat

SEQ ID NO: 265915 - DNA, 607 bp, Cannabis indica
aaaaaatggcaatcatatctttaaattttaaaatattaccagtaagttatgaataaaaaagataactactttaatacatcatattgtatagaaaaaagataactactaaacaaaaattatataactgaaggattagattgctaaagcaatttgtagggactaaattataaagagaataaatgaatttatttttgtaattgaaatttgttgtggttattaagaacagtagttggacgttcttgaatgttggcttgtgctggctgttgttattctactatgatgtaggccattgaaattgaaacctagaattttttatacccaaaatattcccttgtcttttttaaagttgttattatagcaagaagttgaagaaaaaaagaaggttcacatgacgattactacacagggattttgtattttgttcctcaaaacaatagtccaacaatattgttttgattacattatttttagtgtattaatatatgaagaaatcagttacaagttgatgcagatttactactggatattaggtgtggtttagttataatcaaatagagtatgcttaatgtcattttattagataataattccgaaaaagtgattagcc

SEQ ID NO: 265916 - DNA, 1018 bp, Cannabis indica
aacaaaacccccgagcttgctaacgaccttatccacagtgctcgtcaaccacttgaaatttggctcagagaagtagaagtaccccgacctgctttgtttggcggtagacttcgggtcaaagaagcaactgacctcgtgcggagacggcacaccccatttctgaatggcatagaggatgaatagggcagatagatacttaatgcccttgggagtaaactgggtcggacaaaagcgaatggcagatagatacttaaaacccaccttcctgaagtacgagtgcaacggcaacattgccccttgcttagtgtggacagccgagcaagcacatatcccttccgcgggttcgtggctcgtggctcgttgatttggagaagggacgtaacactcaagtccgcccaggtatccagccttttccaaagccctcatgcgtgcctcgctgatcttataaagaggactcacccatctggcacctaaggcaccttgcctcctgtgaggaactgcttcagtgagctccactgtgacgtagtcttccgcttcaaccaagacttcaccctcggcacatatcagctccccaacctcaatataccctccaaagtttggaggtttcgtcacttcttcctcctaggcctctgaggggctgccaggacggacgtcgtcctgctccttaatttcctggacctcaatgtccccttcctaatctccgccctccatgacgggcagatcttgttcgacacatggtaccatggcgagctaggacacatgatgatcaaatgcgttgaccttccgcatcgtttgctttgttcgggccatcatcctctttctggacggacactggtgtgaatgccgggcaacgtaacagtaggaacactaattgggatgccgaagttacccgaacttggacagccaacaggaagagtgtcaacaacacctggccgaacaatatatgtctaattggacgggagataacacctccaacctttcttcaattcccaaatgaagtggtcgtacccctctctgg

SEQ ID NO: 265917 - DNA, 2587 bp, Cannabis indica
gtaggagtatccatataactcctctccttggaaataattaaggtaagaaaaaagtaaaaactctaataagattaagagatgatataatacactgcataataataatgataattactttcccaaaataaacattgctggactcttgttcctgttcatgatatctaataagcttaattaacaaacaaaacaactacgaacaatgttaataaagattattaacaagttgataccagaaataagaaagaaaagattcaaaacttatcacattgcaaagatgatcatgaattcatgatccgattattattgaaactcattaatgactaatatgagctagctcaccattattaatcttctgatcagcaatattttttttattagcatccaaagctgattctggtggcactacaagcttaatactggagcgtttcaactccttttgcgtagaattagactgacatttcttcctaaagccaaaactcttgggaagaagactccaacttttcttggtcttggtgagcttctgaagctcttttttcatgtttgaacactccttttcgatctccgaaacacgtagcttcatgtcatgatcatcaagtacattactgctacacttgataatctgttcttgatctttggaaaccgtctccaatgatcggcagccatgatcggttgatcttgggatcagaccaagatttccagtgctgataggaagattttgagaggtgtcaagattgtcagagacaaaaaaccaaccagagattgatgtcctaaggcgaagctgttcgaagaaaaggacttgaacaataactcgaagagggagcctgtcattttgggctgcatgggtacttgcttccagtgaaagtttctgacagttcattagtctgcagagttgttctctatctgaatctgtaatccatggatgtgcctaaattccatatatataaacatggtttaataattgatattaaacttagacaaactagtaagcataatcacataaatataagacttttactatatgaaatcttttttgctggacagattttctgtcaaataatacatcaaattagtataacttcatatgaaaatagtttgatcagtttaggtaactttacctttaagtagacatcaattgcattataaataccatcatcaacaggcctaacgtaatcaggtatgatagcagcaagagcttgaaacttgggcaacttcaagttaacatcaacagccacctcagcaagatacccatcaacaagattagccaccattgtcataggtcccaacccatcacaattattattctcagcagtactaacaacttgatgaccttcttcaactatacaaggagaagaagattcaagggatacactcaaaaaattatccaaaatcctctgaacacactctatatcataaagggtctcaacagagtaccccatatttggtattaaaagatcgaccaaagaagcttggtccaattgtgtaccaattcttttctccaaattctccctacaagaagagctggcttgtaatatcattgcaactctaagaagcttcaataaactctttgaagaagtgacccctttcttgtacggaatcaatccaacaatctcttcaagaagagtcctcatttctgactcggaaatggtggcaccagatgatgagttgttgacgtaactgtaatcgttcaaactcgtttgagtgttcattattggaaggtatttcttagcatagtacatgattgacaaagctattgtttcgggcttcattcctttggcttcaacagctaagatgaatcgtttgtagagattcaaactaagaaacgacacgtcgtcgaaccaccaatcatctccaagaggcagaggtttcgtttcagagtatattccgttccataaagaagagttttttggactgacattcttaacgtcgttatggtccgttaaaggccagttaaacaaaccaggatcagcacaagctttagtggctagtgaatctatgagtcttgaaacaatgtggagctcttcagctgtagtttgaacctcttcgcaggtttccagagccttaattgagtcaacccagctgctgaaaacttcactaagaagtgattctgtcagtgaaataagatttctttctcccatatcttcagtcatttggagatactctgctgcacatctgagactaacgacgttagaggaagtgatctctgttttgacgccgtaacaaaacttagctacgagctcgaaagctttagctccgccaggtaggtcatgaagctctaaaacacatgaagttgatgatagttctgttgtagcttcctctctcccattgtttaactcttcgataagcttttccagtaacccacttcttgatagcagtggaaacttcacacaaaccaaatccataaaaaattactccatttttgaaaatacttaaaatgggtactttttaatattaaaaaaactaaataagttgtatcattaatatatcatatataattaaaacatttcagtgtttttctttttaatggaaatgtttaaaagagtaagtaacaatatgatcacaaaaattatgaacctaatgtgttcattgg

SEQ ID NO: 265918 - DNA, 854 bp, Cannabis indica
atagagatcttccctgacaaatgtatatatcaacttatttggctagcaatgtcaagttgttgggactagattttattttatggcacttttgaggtacaaaatgtactttgatgcaataaagtatgacaaattttataaaattttagaggggatccccaaaactaaaacctaatgtcatgtttattatattttaacataattagtaaattttttaatttaaatcacttattttattaaactattagtttattattataaactaatttataaaagcacgtgatgtccctaagggttagcgcgttacattggcggccttctttatttacataagttagttggctgcgttcttaatattccttggagcattaggagcagtcttgtttgtaggttcctccatgatacctttcttttaacccttacaggagcagaagttcctggatctgtagaattatccttttttgtggtattattttcttttaaagtaggctcgtcaggaaattttcctggggaacttcattttcaagctcgatcatggcctataattgtgctaaggtttctcgcatttggcaagagaattcttcatgctccaccagttttttttttggttctcaatgagttcttgagcctttcgaattactttgggatcttgctcgtaataatactcctcatcattcttgttataaccatcatccttaggatcatcctcttattcctcctgatcctcctcatcaatgggatcttcatcaacgtatttctcacgttgctaatttttcttggcagggtgacaacttacttctgacatctctccatccccaacaacacccgtattttcatgtgtagtgggaggaggatta

SEQ ID NO: 265919 - DNA, 728 bp, Cannabis indica
gaatatcttaaatcttcgtgctaccgaccgaaaaagtagtttcttactgcactcttctaaaggatgtgaaaaagatgttgcaacatttaaaaataaagaatcaaatacggtttttttttttaaaaaaaaaaaagaaaatgcaaatacagccaaaaataaataataaagagcattgttattaggtattagtggtgtccagtattttttataggtgacaccctacgtttagttaatgatatttcctaaaagtattttttaatttatataggactcgatacttaattacattaatatttgtatgacaccgaaaaaatattaaacagtagacatgtgaaactataatcaaataaaaccaaaaataattaatttaaaattatgcaaaagggtagacttgaaccctagaatcaaacacgaatttttttaaaaaaggaaaaagcaaatacaaccaaaaataaataataaagagcattgttattgggtattagtggtgtccagcattttttataggtgaccgtgacaccctacgtttagttaatgatatttcctaaaagtactttttaatttatataagactcgatacttaattacactaatataaacgtgaaactataatcaaataaaaccaaaaataattaatttaaaattatgcaaaaggatagacttgaaccctagacatcgagggagcaaaccacgtgcctaaccattcaagctacccaactttgtgtgat

SEQ ID NO: 265920 - DNA, 665 bp, Cannabis indica
aggaaaatctagatagataatatttatatttttgcttgaagtatttttctagtgtatttaattaaatagaaaattaatatttaagttgattttcatcatcttacatatataaaaagagtctatatatatactattcattcaaaaaggtcaaccatgagttttgttaatgtataaaagttagtttcttatatatatatatttatatttatatatataatgaattgtcttttagtgcatttatatatataagacactttttttttccttttcattttattttccaaaatctaagatatatatatatatttttgtttttccttttttcttcaatttgttatgtattttatagtttttttttaaagctattataacaattggaaaattatacaatgtattttttttaaaaaaagagtgtattgatacactttaatttatttcggtatttgagagattttttttttatttaatttttttttaatgatcgggtacatttatttaaaatattctctcaaattttaaaaaatttagaaaaatttaacacgcccaaagcagagtctaaatagttcgttgcacgtttgactcttttatttgatacgtatgtgaaatagaccattgaacaccgttttttatattgtaaactattctaaatatctcaaaattttgta

SEQ ID NO: 265921 - DNA, 1728 bp, Cannabis indica
atgggcgtttgccaataatattacgggcatggtagagatatctactgtacctgttaatatcttttgtaatgaccatgaggtctaacttcaattttatttataaacgcatttttaaaaaaaaaaataataaaaatagtttttagaagaaattttaaaaagtgaaaaaatttgaaggacatgatttaaaattattaatagtcaacaaggataataataaatgagactcattttaaataaaaataattaattaaaattatttatactataaatgtttattaaatttaggtaaatgtgtcattagtattaataaatatgtcaaccttggtagacaatttgacatgtttttgtgcaaactaatacaatatgtgctgtgataatgttactggtaaaaaaaaattaaaaattggatttttataggcacatattaataattattattattagtgctaataatatatgctcgtttggatgttaagatgcactaacaaaataaagctcgtgctccaaaattactatatatttgtttgtcttactaatatatacaagatgacaagagaactaatattgttacacaataattattattattattattattgtgtggtatactaaaaaaatatagggttcatttggtatgccgcataagagtcgtattgtattaaataataaataatactgtattttgataaaataatgtactgtattaaattacgaccaaaatttttaatacatgtatgctgtagtatttaatagtacgtattagcttgtattatattatttataagggattcagggtcaacactaatttctgacgcggacctagactctccacacgcggacctagactcggacccggacttgggacctggacctggacccaagacccagacccgagacccggacacagagccgggacctggacctagacccagacccggacctgtgacctggacttgagacctgagacccggacctagactcggacccaaacccggacccaggacacggacccagacccaaacctgagacttggacccgggacctagacttagacccgaaccctagaccccggaccttgaccccagactcggacccagacccgaacctagacccaggacctagactcggatctaagactcggactcgaaccctgacccaaacccagaccctatacttgggacacatacccaaacctaaactcgaaggcttttttagcctctctgataaaaatactgactcgtggactaagtgtaaagatcgcttaattttattatggaaattagtagctaattaggtttaatttaaaacttagatttctaattatgatttatgaatttatggatatatatttgaattctaggtgtgttatttatgttatatatgaaattttatgtttttcatacttatgcccggcaatagtggaacgcgacgtttggctgatagaatcacatttttttatgagtaattttagaagtagcagggcaatttagatatacattaggaatgtcgggaatattcgaggtattaagtttgaccaaaatacccctaggtggcaagtatcctttttggtgtatgcaaggggaaaatagtcttttaccatttgagttatttatcatttagtggattatatgaggttaggaaattggattctatgttaagttttatatcagataagtattgatttattttatgttaacctaattagaaataaacacacacacacacaca

SEQ ID NO: 265922 - DNA, 788 bp, Cannabis indica
tcttggtgacaaggtgaacctctcagtcaacatcatttgtatgtcaacttctatgtgagagaacttcctcaacggagttgtgaaccccattgaaaggtgtctgaagctgattagtgaaggtaccatgagtgcgccttcctatagtgagatggatgcctcactattagcagtttggatttactcgactattatacttagtttgtatagtgtgtattatacactaagtgtcttaccagtcatcatgtcttgtcttttaatgcgtagtgaggttaatgccttgccttgtacatttgaagtcatatggtttctcgttaatgtgcgagacaacagtttgtatatctatatctcgcgtaagaccttgcagtcagcaagttgtaaatatactctgtcaattccacatttaataagttatttaataaatttcaggtataacaattgccccttaaaaaactatttttaataaaaagtactttgtaatattacaaagggtatttttgtcataaccccttttggaaaaatgcatgtcccctgattttggcagttttgtggtttcgaggtacattaacattaaatgaccaacctttccacttctatttcaaattctttccgttggatcaagtatctctctaatctaacagaaactaacccaagagtataaaatagaaaaaagaaaccacctttgtattatttcttccattttagagactctgagaatttttaagcttctttgttgaaaaaccatcatcaattttgcttaaagactttcatgccatctttgtcattaacat

SEQ ID NO: 265923 - DNA, 830 bp, Cannabis indica
ttcgaatcccataataatattcctcgaaattgtgggttttaagtacactccattttaaaatgtgtagataatattagaaaatcacacagctgtgatttaaaccgtctttaaggcggtcaacgctgatatggattaggacacgctgccaaatgtatctcgctgaggcgtctcgcctagtacataagtgagtgacttagtttactcgtattccaccaatgacatgagcactaagcaaacttaagaactgctctttgaccaaaagctcttgcagactggacaatcacgtctttcaaattattacacttagttattataatgtaggttatatgcttagtgttccaataatcaattcgcctcgtcgatacttcttcacattcagcgagatagatgtcttgctgtgcatttatagctcctcgatattaatccttccgaggcaagatggtttcttgtcaatacatgaattgatagtttgtatatcattgtatcacttaagattatacagccaacaagtcatgaacgtactctatttattctatatttaatgagttattcaattttgcatttaatgacataattatcattaaatctattggatcttatcccactagattgacgcgtgtcactttatgaagtatagccgaatttcgggtataacaattgtccattaaaaagttcttttcaatgaaaagtgctttttaaatgattactgagggtatatttgtcataattcattttgaaaaaagcatgctctttaatttggcggtttatgttttcaaagcacatcacaacattaatgagccatctttttcacttctccctcgatttctatc

SEQ ID NO: 265924 - DNA, 634 bp, Cannabis indica
cgagcatcaagtgacagaccagctccctcacaagagctggccggccagcctttgaactgcaccatggtcggtcaatctacctccgcaggggtctagtcgggcaagaggggttctgtagggttcttgtgcacacaactacatctgggctacgaatttggccctaaaagcccaacataataactaaataatatctaagttcaatggcattttggtcttttgtaattaattaattaaatatacaaatatttaaggttttaagtgtaaattagagtttaaggcttcctatataaaggccttaactctaacctaaaaagcttaagctcagtttacgcgggacactagcctccaatctctaagcctaagcctgataactcttttcttcttcacttcctctctcacatgcctatacaagaactctcatcactggaaatttgccaatcccaattcatacattgtatccttaagggtgttatatcagatcccacctataccgatctgaatagtgttaacgctcggtattaatacaaccaaaaggggagtaggtcattaactgctattatcaggggctgaacctttataacaaatttgtgcatttacttcttattctattatgtttttgtgtaacacgtggcca

SEQ ID NO: 265925 - DNA, 708 bp, Cannabis indica
tcagatacataaactgctttcagattttagagatttagggaagaagacttagctgatagtatgcactatcgaattgaagtattgctattatcgaattgaggtaattgctatggatctatcaggtacgcatacctaattattatatattattattgtgttctatgttatatacaagttgatcttggatttattattaatttatctagcatgtggtatcagattgcctattgtatatgatttagaacctataatttgtataacaattaatatgtttatgttaatttcttcaactacatattaatttcgttattatttatggtaaatttttttttcaatcttaaatgtctaggggttttatttgtcataaaattctctttctatcgatatcttatattactaaaatcgtttagtaaattaggagaattttaagattaaatttttagagttaatgtatttttttctttatgaaattaaatttggattttttgattcaattgtttctacactaaaattgatggtgctaatctcattactgattaatttacaatgtttctacacaatttaatttttaattcggctgagaaaaaatcaaaatcaggctcctttgattgttcttagttttcggattgaacacaatttgatcgacacccttttcatcatttataccccgaattgaatctataggtagagtagaaattcaatcccgaa

SEQ ID NO: 265926 - DNA, 387 bp, Cannabis indica
ttttctggtgacaatgctaatttttgacgactttcctgacactggcagctactctggcgacttttccagcaccgacagcaaacttcggaaaagtcatcgaaattggcatagtcaccgaaaatattaccaagaaactcttggtgattttcctagtatattttttgtacgaaaatgtcaattctgacgacttttatggtgtcggcagcaactccgacgattttttcgtacaccagtagctactctagagacttttccggtacagacagcaaactccaaaaaattcatcaaaattggcattgtcaccaataatgccaatactgattattgttctggcactggcagcaactccggagactttcccggtgttggcagcaactccgacgactt

SEQ ID NO: 265927 - DNA, 1468 bp, Cannabis indica
agcttacaagatcactgagagtaaaataaagggtgtggatttagccttaggtttgttgtgttataattggatggagagagtacaccatggcccaaaaaaaggagagagaagcgaagaggctatataggaaagctagaaggataatattgttattgctaacgatgctgctgcttctcctgtactatatatcaaaaaactctctccaaaaacctaactttaattatgttagctatataactagctgcctctataattaataatctgtatagaccttaataaattctataaagtcttcatctcagagaataaagacatactaaccttagctaaagtgatttatataaattttgtaaaaggaaaaaagatagaatgtatactagatttgtttttaaatattaaaaaagaaaagattccagagtataactgcagactacgttgaattaataatacttatcgagataaatacaaaaagtgaaaaaagcatatgctaccaaagtttcacgtggctcgttttgatttggacacgtacaacaaacaagcgacatatagcttatcaagtaatgaagaagctttgtcaacatatattagagcgtattatgatgttaaaatttaaggaattacctcgtgtcactactataatatgaattttcagaggttgtttttttaatttattttataaaatgagaagttaaaatgcttgtttggttcaaaattgacatttagagacaaatttttggtaaaaactataaatataaaaattaactatatcctataaagtcggttgtgagttggaaaattttcaaagttatttactaatcctatgacgtcgattgttaggaaataactgacattataggcacacacctttattgacatgtgtaccctatgtcgttgattattttttaataatttaaaagaatcatgaagcttcgtcttccactttgtcttcgtcttcttcagcatgaaaccacagccaccatagcagaacccaacccacgacgaaaccctcaccaaccatccctaaaaaccctctctctttccctcattgatacaattttacttaatttttcttttaaaatcttctatttttgttacctaaatcaatacactaaaaaagttttattttttctcctatttcactataacgggacctattgaaaaaaaggtgatggtataactctgaccatcgattttagtaaagaaaatattgaatctcaacgtccattaaggtagaaatataatttttattcattttattaatgtatattgctttattttcatttctgtaaattttttttaagattttctatttaattaacattatgttgttgtgtgtgcatggtagccaaatttttgtcggaattggtcgccagattgtgcttataaggtaaatatttattaacttatataaaatatacatctttgtatttagttttttatttgaatttgtgtgtatatatattgtgta

SEQ ID NO: 265928 - DNA, 900 bp, Cannabis indica
cagaatatttctgaaatcatggactgggctgaggagactttagggcatttggatgatgatggaggcctaacaacatatccaccattgcagcaaatccccccacaaagccccccctctaccagatgtggcaccaacagcccaagttaatgcatatatttggcatgttttggctctatattgttgatggtttggctctattttgctggcatgtgtctaatttttaatttgctttttgtttacagggtaatgatggttcaacaaggtctccagaggtggagatcactggttataaagaggttgaagaatctccaagagctagaagacttaggcagaggaggaggttgagattcagtgcccaatcacaaccagaaccccacactcaaccagattcccaccctgaaccagaaccccacactcaaccagattaccaccctgaaccagaaccccacactcaaccagaacccaacattgaacctgaaaccattctcctaacaccccaactagaacctgaaactgaaccccatccagaaattgaaacccaaccagattttaaaccccaccctgaaccagaagaatctacaagaggaaaaagagttaggaagaggaggaagcttaaggaaccccaatctcaaccagaaaccccaccaagagccaaaagactaagacagaggaggaactacaaactcccccccccccccacacagaaacccaactagaaacacaaccacaacctgaaccagatattttaacccaacctgaatatgagtttccctcacagtctacccaaccggaccctcaaacccaaccagattcccaccctgaaccacaaacccaaccagaagctgattttgttttgcatgaggaggaatactacggagagccagaagtagagaggcatgg

SEQ ID NO: 265929 - DNA, 665 bp, Cannabis indica
atatcattttttatttcttttttattgttttatatagttttttcttttaataagtttaaattgattagtccaattgccaaagcttttgtttatttattgggctttagttttcaatttcattctcagtttcttttttgtttttaattgctttcaatgccattttttccgttaaaacctttagtgtcaagtacatttattataattttatttattttggcataaatctttcacacttttatattattagttttgttatttacttttaatttaattaatttatttcttaattaataacgatttttttaatttaattttaattttaattttaaatttttgttatacaaatatgataaaatattttattattcatatttattaattatatacgtatttatctatatatatttatatatgaatgtttgatttatttcttttactagctattcaaatagtattattatatgactaaagtatatatgctagtcctttcaaaaaaacaaaaaagtatatatgctaataagaccataattgtttttgcacattttttttccaaggttttatgccttttatggcttttgtgccttttatggtatttgtgccattgttttggcttgtctttatttgtttaggatattttgtggaatggtcattggacaagagaagta

SEQ ID NO: 265930 - DNA, 2511 bp, Cannabis indica
accgactggtaaagtgtaagcgacgatgcctcacacaagcgtaaagtttactcgtcggttgatacatcggtcatcaacagacggaaattttatttacactccataaaattataagcaccccaatattataaaataattaacttaaattaatttttaaaaaacacttttaatatttatttaaaatttctttttcactttatttttatttaatatcaatagttagttttgttttatttttacatttttttaaaaaaattataattttttaaaatttgtgtctaataaaattttatatagtttttactttaattttttgccttaatatttaaaatatattttatttttagtttataagtatattttttaagaatataaaaaagaagaatttttattttaaaaaaaagtacaaattaaaaatatatattatataaaataaaaattattaaaatggaatgtacttataactttatggaatgcaaataataccttcccaaagaaaattcctaaaaggcatctactaccctcctctttatgataccgctattagtggtgtaattgagtatcaagtctcatataacttaaaaaaaaaaaaaaaattaagtaaaacaataccacctactaaaatagttttagtacaccacttagtgtccgaactagcaatactctttaaaatttactagttttacttttttgtctatcagttagtcattgatggaataagtatttttttttttttttttttgtttttaatacataaaaaaaaaagcatcaggtgaccatcggaccaccatcggaccccatcggaccagatctgctaccaatttttttttttttttaatgtttttgcactaaaaaaaagtatgggaaatttgagaggggtatttttgggttttagataaagtggtcatatattttcaatggtgatatgtgttagtttagggataaaatattaagtatatgtaagtatagaaaatcaaatttccctaagtattttagtcggttcctatgcttcagtggcaaacccacaggaaagaacttctgcctttctattcccacagttgcaagagttgaccatccctttgaccgataaaaatagccaattgtagttgttgatgcctgaaaatatcaaacaagaaccaaccagcaacaagaacacaaaactaaacaaaaatttatgaacaagaatcaaaattaacaaatttaacatacgttctaccacaagttataagtaaacttgggtttagacaacggcagaaggaagtctaaggctttgaatctttattgattctttgatgaaatggaacaattcttagactgattttggttcttaatttctttctcaaaacttctcttctaactaaagagtcagttatataggcttcgagtaatatcataacagcttggttgaactgttattattcacttgtagtcagttaaaatagttagacaactatttgttcaaatgtccgaacctcaacaatagagcattagcctagctttataggtttccttattaagtaagattcatgtaggaaaatataaatatttttgcacatttgcaacctatatggagaatacccattactggtgagaattaattgttaagaatttatttatttaaggtttacatttaaatttgtgtttgtcatcatataaatcaaataaatttatatagtttattttaaaataaaatttatattttaaaagtataattgttataattttaatatgtggacactataagaataatttttaatttaataaagggccaaattaaaaataataaaaaaaaattagttactaactaagtaatggtcctaatttgtatcgtaccatttcatattcccccatcatcgggacaataaaataaagctccaaaggttttttaatgtaaaattagaacatcatacatttctataattgattttatagattttggtatgtttttgttaatttttgattatttattatttggttctcataaattaagtaaggctaaattaagattagattattacttactactagtagcataatcgaggtcgacaaacgatgaagccgaagaccttcgaactgtgtggtccctgattaacttatttcgtttttttttttttttttttgaaagggaccctgataactattccaataccaactttcctcgcttgtactgagaaaattctattatataagctttatcttttgtctctcagttggaatttcattattaattgggtagttatacattgaaataaacttttttcttacatattatttgtataaataaaaataatgatgtgataatattattaattaatcaataattaatgatcataacaaataacaagtcacactaggttcatccttaataaattatatttagttaaaaaataacatatggttatgtgcgcataaataattggtggaacttttttttttttgacaaagtgattaaaatcactcatgaatttacgacgcccacgtccaccaccggcgctggaacctcctcgaacc

SEQ ID NO: 265931 - DNA, 856 bp, Cannabis indica
aagttagtttttttttttttttttgcattataacaatttttgtatttttttttgaattttagggtgcaaataataaatttttgtgtaaaattttcattttgtttttattttaattttgagcaccaaacaaataaattatttgataaattaaaaaaattatttattcttcccaaattaacaaattgaatttttcaaaaaaaaaaaaaataataataaataattacttatataaaatttaattaaaataattaaatattatttcttttagaaatatatttaatgtagtggcacttttaatgtgtcacaatatctccaaaaatattaataaaaaataaaaagaaaaagaaaaaaaacgaatatagtgacactttatttgtattgttgttactttttcagtttgataaatcttgactctatacacctatagtgacgcgcaaaaagtgaatgtaaaagggtttagtgacacgtgtgaagtgtcactaaaaattgtctttccagtaaccctcattagtgacgcgcgttgaagtgtcacagtacaattttagagttattcaatatgggtctactaaaacccatttttctagtagtgataataaaatggcacaccaataatataacattgacaattacccttacaagatggtaactgtatttgatgatgatttcacattcgactggagagtagacatagaaattctactgctcaaagagaatttatatgaacttatagccaaagaatcaggtcacgctgcctggaaggcctttgaacaatggctatgaaagaaataatcattcaaagtatagcttgatgacttcattcaatgaagagattggagaaaaatatgagacttttatc

SEQ ID NO: 265932 - DNA, 496 bp, Cannabis indica
atttttcttaggagcttggctggcaggatttgttctcttttgctgatcattaggagtagctttcttggaagtttctcttacttttctcgtccatttatccttaggaggattatgggtgtcaggatctttttggattcgttttcctcatattattatcctgaggagtagcattatttagtatgttctcgccaggattctggtttcctcctccaaatatggctttcaaaaggggtgttcatggtgcgaatggtgcggtttttgactattttttcaaactaacccgcacatgttgtttttccaattttccaaatcgcacccgcaccgtaaaactaaaacactgcaaaaactgcactgcaaaaaatagtgcggtgtagtgcaatttttgcagtttagactatcaccaataattgaactatcacaaatataacaaagcttgagcaacacttatcaaaaatatcataaggctttaaaataaatatgaaaaaaatttaagttt

SEQ ID NO: 265933 - DNA, 1358 bp, Cannabis indica
atgaattagtaaagtatttgatacaaataataaatatataaaagtttcacatttgacttttttttaagtaaaaaagataatttcatttgactttaaatgatcaaaagaaatgtaagatattgtattaattaggttctgaattatataaattttagcaaattcatcactaaattagttcttaaatataaataattttaaagttatatataaaaattattaatttttgactatatattttgatgaagtgattagaatcactcatgaatttataaagcagacatttgtcaccgacgctggaacctacttgaaccaggataactcatcgtctaattgcagagcacgctttgccaaattatgggttgctaaattctcagagcgagcaacatgggacaaaactgcctccgaaaatttagacaataaaactataacatcttcaaacaacgctcctagctcattcaaatacatctttattgactaaatattaattatgtaattatatatatattttagaatgtgctttccggccatgtgttcaaaattgtttttacattttacatgagtaatttgagagaaatatcaagatgtgtaatatattcttataaagtgttatatcgttattgtaatttaatatcaaagaatttaataattagctttaaatatcaagatgtgcgatatacatattaccacctcataatagtgctaagcacaggtgcatgtctctggcattttaactacagaattgtccgagctgtatagtttttggttttattgaataaaaagtttctttgtacaaaaacccacctttctattgaatgtagttgagaaacgaagttgagagaaaataagcttgagtgaaaactgttactcagctctaagagatgattgtatttatatatgaaaaggagtacaatacaatcaataacagaaaatacaattagaaacagaaaatacaattaggaaaactaattgtccaactgtgaagagtaacaaactcttatcctatacgcacagctagaataactaactataactaaccgtgttcaccaataaatgtgtgttttatattatttataaaaacttaaaatttgaaaaacaaattgttcaaggctgaacaactttatgacttaggttggactcttgtgttaaagagtctcatattttttttcttttgtaaagtaaattaaaaatcccacattattaatatatgaaagtatttaatagttatttcttttataagataatgacttaattactctaatggttagtttattttaagataatgataaaacaacatagattattaaataaatatattagaaaacttttaagggacaatatttttcaaatgtcagttcacc

SEQ ID NO: 265934 - DNA, 958 bp, Cannabis indica
gacggtttattagacattgggaatgtcgggaatggccgggaatttagaattttccaaaaatacccctttagtgttatttatgtggttttggtgtggaggggcaaaatggtctttttgccccaatgactttttgtcttttagtgaatttattaaatgaaaaataaatgtttattttttattatttggctgaaatgaattgatataggtgtctattaattttattttcttttttcaaaaaaattacaagttagaaaaaatagaaaattggaagcatttctctcaacctctctctctctttttcggctctcttgaagcatcaagaaccagccattttctttggtgattcaagccctagtttgcaaaactctagtgatctcttgttgtggtatgtgttccctaactttcttccttagttttcttggaaaaaatgatgaaaatagttgatgcatgcatgaatttttgatattgttgctgctgtgatcttgttgttgttttctgagatgtaagcatgttgattagagtttaattaagcttcttgtaatgcttgattgttaggttaattaaagttatgatttttagctcaaaatatggttttcaaagagaaatgtcttgaatctgttgctgtgatattgttgatgtttgttattgttttcagaggctatctatgcttgtttaagtaagtttagagtgatttgattgcatgttagctaggtttgctcaagtttgagtttagaactcaaagcttgagctttaatggtgtttttcatttctgtgcattctgggtagatttaatgccttagaaatgttatttgggttatatagaataggtctggaaggtttgaattgatttggagttattttgaacaagatatgaatttttgattgttgctgcctgcgaggaaccggaattccggttgtgcatccggaatttcggatgggcttcgaaaattcccagaac

SEQ ID NO: 265935 - DNA, 1215 bp, Cannabis indica
tttttttaatggtagaatacaaatagttaatacatatgttataatatttacaactatcatatgaatttgtttttgtttttagatactataagtcattgatttattaattttttttaattaattgattttaatttagtattagtataaaaatacttaaaacaatcttaaaccatcacaaaatagaataaagataatactatctttatagaaagccacttcaactctcctaattagcttgatcatcatgaatgtaaaactgtaaaactgtaaaaccatcacaaaatagaataaagataatactatcttcatgttgcgagccaactaacatgcaacttaattgtaactaaaaaatgtaaaactgtgaatgtgtatacgtaagagactatttgtcagtattttttgtcactgatcgataattacttataacttaatagtaatatgtggagaaataactgttagcaaaatatttatgcaacgataatgtaactgttataaaatattaaaaatcagaacaatgttttcatgtaagtaactctatctacatgtctcttcatgatttaatatgaacaaattcactattaaaaatttggaaaacaacgaaaatgcaccaggataaatatcttattataatattgatgcaatttttttttttggattatacttaagttagattgtttgggaactccaattcaactttttgagatctgcatttcatgaatctaaaaattaaagtcaggacattagttttatacaaattaaactagatttttagttgaattttagtttcgtggtaatttttatacacttttttcatgaatttgaaacaacccatgttttgattgattatggtcgtcttctcaggtgaagtcgccgaaattaatggtgattctctttctagttgaattttcgtttcggttgcgttgggttgctgcgtggttgcccgatggttgtccgagaagcatggatcctaagttgaaggtgtgtgtaagtgatatttgtgtattttttttttttaatttaggttgtatatttacttatttggctagttaaaagtatttttgtaatattgtaaactttttaggttaaaactgaaaaaatctttaaaaaatatacctatcaaacaaaataaattatatttcaaatattataacaaaaatataatataaaaaattatgtgaaattttattagaaaaaaagttttaagtttgtaagtgg

SEQ ID NO: 265936 - DNA, 1284 bp, Cannabis indica
taatttaaaatacatttaaataaccttaaaaaaaaataaaaactaaatgagttatcatataatataacaagctactatttttatataccgattattttatatatttttttgttattttaaaagctaattagttgtcgtataatatcatataatttaattaacttaattctaaaatgaatgttaactaagatttaaaaaaaaaattataaacagtaactaattactatattagtacttcgcctccttctgagaagcttcattctcaatcttcttatgcattcgattcttcacctctataaagtctttgttacaagtttccatcaacttgttgaacgaaatttttccccacgaatactcatagaaaaatttaaggttgtcaaccattcttatcacaaaaggaggaactgtagtcttctcctccttaccagtgaagacgcccatagcaaataaggttatccctaacttgtatacatcatcaggttcggtacaactcttaaaaactttgcgcagttggccaaagctgatggatggatcaccattgaagtactgcacaattaatcggttcgaatttcctttctcttcaatttcttttttagtaggtcagggtaacaagttcgaccccatcaccaaagcacattcggtccagctgaacctgtatctcttcttcgcaaaataaaagtggacctcgtcttgtttctcagatttgatcttgtgcaacaataactgatggatcaatgccccaaaaaattataatggttgtctctcaaaaaattgtttgaaaggagattctttcaccctatcaaataatttaaattcctcgaatttttctctaatcttcggatagtaaaaactatcatcatgccaagtgacacgacctgtgaaatgctctgaaactgaaagtataaggcgtcgaggtcttttcttcaggaaaaaaacacacaagaaaaaatttagacattctgtaacaaagcatcatactaatatcgggtagatatcactatcagacacaataatataatataaataaaaaataacataactatttgtgccactatcaaccccaatcgtcttctattgggcgtacatgcatatttaaaaaatgaaaaatactcataacccatatcagctaggggtgttcatccgatccaatccgcacttttttggtcaaacaacatctaatccgcactaagtgcagatttcatattttggatcaaatccgatccgcataaaagtgtaaatccaatccaatccaatccgcaatagtgcggattggatcggttattt

SEQ ID NO: 265937 - DNA, 524 bp, Cannabis indica
agagagagagagtcattttagaatgagggggtaaaattgagttttagtaaaaatgatcccattttacaaattttgtatagttttaaattatgtgaccaattttagtccttattatgtatataatttcaaatttcccaaaacaatatactaaaaaaataaaaatgaaaagagaagtggcgctgaaaaaaaaaagtacaagtggctaagaatgtgggtggagcttaaaaatagtaaatccctatctattattttggaagcttggtatataatacacatcatttcacgattaaagttccatttgttacttgtataattatttttcaaattatgtatatatttaaaaaaaaaccctatttgtttttttttacttttgagttatagcccaacccacgttatagatatatataaacaaaagtttgaatatttaaagtaatgttgtcactatgctgtcacaaaagtgaatattttttttaaaaaaaatttacatgagatactaacttttgtcatttttttttacaaaaata

SEQ ID NO: 265938 - DNA, 979 bp, Cannabis indica
ttatgcttgactcccaaattataaattgtttttattctgatgatctttacaagttgtcattggcttctttagattcaacttttaatgttgtgaatactttgggtaaaatacctcatattaaggaaatatccttattgttatgtcataaaagattgggtcatatttctaaagaaatggttgattgtttaattaactttaaagttctttctcctgttgatgcttctggttggaatacttgtgttgattgtacttgttgaaaattgactaaaacaagaaagaagactgtaaaccgtagtcaatccttattagaaattatccacgctgagaaataaaatctgatttcatccatttgtgcatgtagtcgtttcgtcgatcttggagacatcttagcaccttttagttgtgtttccaaactctattcctctaattgttgtctctgagttccttatgtcgagttagcaatctctttatcattagctccctcagattctaagaactcaaccgcctcaatccctaacacctctacttcgagtctcatcgaataagtcaaatctgaccctttcctctttttctttagttacgaacaactagcaaccttcctcaatcatggtatccctaccttagcactagcgaagctgagaggaaaccctatccgtatttattattattactttcaaattttaaggtgtttaaacgttttgtgcattcaggttagtctatttgtactaatgagttgtgctttttaagattttttgtgttatgttgtgcttaattccaaatttttcatgtgaagtatctattttgtgttgtttcaaaattttggcaagcattcaatctcccatcccaaaattaaaacaagtttttaactgaaccaccactggttaccctattaagttaactaatatttttgggttgataaatatttatttataattttatatgtatataatatgccacagtagtacttggtcagtggcca

SEQ ID NO: 265939 - DNA, 899 bp, Cannabis indica
gtatagaggtgactcggggaccacagatctatatttcaatgctccaataaaactaagagtactatcaatctcatcaataaaataatctggtttattaattctattattactccatcctaaatattgaattgaactctttgacaatatagatttatatttatagaattcttacttgtagtccgttgatataatcaatgtaagtagtttttcctcaaattattagttcataattagagtcaaaataccattttacccttctaattatcttatgattccttatgtaccattaattcattgtgaacagttaatgtatcacttattatagatttggatccaactattagcactcccagaattaacaatataagggaactaatattcaatctgttaagaaagcttagaatctaatattgtataatatggtcccagccattcatgttattaagctccaaaaataggagtgattcaaagaactcaatgaacacaaataggagttcatgtatactcatgatggaagctaatctaatagtgatcatcattgtgatatgataaactcttttcatggtaactgataaccttgataatgtatagttcaacactttccttacaaggatgaaaacaaagctatctcgaggcctttccaataccctcagtgttggactaataattgagtccatgggtttcataatagatgacaaccctcttgcactcactattttaaaatgtgtttgtctttattaaaaccatttttgaactattcattttaatcattatccaagttgtaatacattgattaaaatactataacatatgcctaaaataatttaattaatattgttatcccaaaatttgtccacctgacatggcatgtccacgtaagccaaagacagagtacaggt

SEQ ID NO: 265940 - DNA, 689 bp, Cannabis indica
gttcaagttcgggtctgggtcgggtactaggtctgtgtcctagttttgtttcccaggtccctatcctaattcttggtccaagtcccggttattgtgtgggtttgggtcccgttctaggttcgtgttcgagtcctagtctcggtttgggtttaggtctctgtctgggtttcgatctgggttggctttaagtccttgtcccagtcctagtcctagttcagttctagttccatttgcgattctaagtttgagtttgcgtttgagttcgggtcagagttcgagtcctggtctgagtttgggttcgggtccagatttcagtctaggggcatatcaggctccaggtctaggttcgcatcctgggtcttggtctaggttgtgtccgagtcccaagttcgattcccgatctgagtctggattcagttcttggtctaagtccttggttctgatcctggttcgggttcgagtttgggtccgggtccgagtctagctttgggtctgaatctagggggtgtttgagttcgggtccgagtctttgttcgggtttgtttccaggtctagaccccgatcttggtctaggtttaggtccaggtcaaagtttgggtccgcgtgcgggtccaagtttggtctgggttaggatcttggtcaaggtctagatccagcatttccatccaagtctgtgtttgggatcgggt

SEQ ID NO: 265941 - DNA, 991 bp, Cannabis indica
tatattatattaaatgtgactatttaacaaaaataattgatttaacaatttttattttttcgttaaagttagcagtgaaaactattactgttaaatcaaataattaattattttttaaaaaaaacagttttaaatatttaaatttaatttatttattaaaatataacttaaataattatttaaaagtatatataaataaaattagataattattttttatataaattttaattttaattaaatgttaattcaattaattaataaactctaaacaaatatgtataaaaagtgtgtcattataaagtaggataaagtgaggtgtatgataagatatgtaataaaatttcatcttaaaattaattagcaattagagaagtacctcatgtatttttatttatgttatttatttttcatacattaacaatgtgtgactctctaataatctctgaacaaagtgttagtattttttgttaactataacactcctagacaacttaatcgcaaaagacatgtactttttagctcacaacaacacgtcttttattatttggtcaaagtcattatataattaaatcttcaaatttacaaaaaagtatctaaataaatattaattacaattatataattttatatattttgtcagggaagactatcatggcctgagctggtaggagtggaaggtgaggttgctaaagagactattgagcgagaaaattctgcagtgaatgccattgttgtggcagaggatgcccaaggtgacactcaattttgttgtgaccgggttcgtgttcgtgttaatgaaaatggaattgttactaggactcctcaaattggttaacaagccaccaatttccattgattgccatatctaaaggctaaacctatttaattctattgttaagtgtatttaagtacaatctctatgtatcactagtagaaataaaaaaaaaatgggattgtgtatgttttcccttttatatattatatcaat

SEQ ID NO: 265942 - DNA, 3118 bp, Cannabis indica
ctctctaaaaaagttttaagacaggctacatctggcccactatgaggaaagattgcatggactacgcccaaaaatgtgacccgtctcaaaagtttggaaacatcccaagggctcctccaaaccaaatcatcttgatgacgagcccttggctcttcgcaatatggggcattgcccttataggttctctcccaacgggaaagggcagagtcaagtatgaattatttgcagtagattacttcaaaaaaatggacggaagctaagccgatgaaatcaataatctccaagaaagccttggattttgtaataataaataatttctgttggtatggactaccccataagatagtcttggacaatggcaagaaatttgactatgttgcattcattgaattctgcaataaatatagagttattaaaagtttccgcacaatggcaagaccccaagagaatagtcaagcagaagttgtgaacaaaatattaaaagtcaccctaagaaaaaactcttggattgcaaatcaattggctagaggagttgccgcaagtactttgggcatacacaaccactgtcccatacaaccatcagacattcaccattctcaatggtgtatggatgtgaagctatggtcccagtggaaagtatagtcccctcccatagaagaacgacttatgatccaacaatgaactaagcactgctacaaaagtcactgaatctaaaaaaataactttgggaggagtcccaaatacgcatggaaacataccagacgaaggtggtaaaacattttaacttaaaactcgaagaccggaagttttcaattggagaacttttcataaggagagtattctctacttcctaagatttgggagtgggaatactaggcccaaattaggaaggaccatacgaaattgaagatgaaataggctctcggacctacaagctaaagcgcatggacagatctctaatcccaagagcattgaatgtcaatcacctccgtaagtactatcagtagttaggagcttggcatttaatttcatctttaaattttcaagttaagaataccttttgcaaactaagaacctaaatgtaacatattatccttttgaattcagactgaatgacccaaaaattattttaagtcacttaggggggtagtgaggcatatatgcataagcaaaaatagtaaagcatgattaaacatatgtactcacaagtgcccataaaacgtacttaccaaagtatgtcaaaaaaagagagaaggaaaaaaggataatagaagcctggggagaggctatttaatgtctccccaacatgaaaaaacaaacaaacaaaagcaaaatataaagaaaaaaaaacaatattattctggcatgaggaaaaataaaggaaggagttaaaaaagtggttgataatcaatcttctctcagagaaagacggggacccaatctctcatccaacatctgtttaaccttcttgttcttctcatggaattgagccaaggcagcctcaggatctggcaagaaagtgagacaaggctcaaacttgttagttttctagcacatgaaaactttgcctcaaagcatttgacagaattgttacaggtcaccagagccatcaaggattctcttgtagcttttgaagcctcctttgcctggtctcggaactcaaaaagctccttaaattcgacagacatgcttgtcgtcatttgcatatcagcttggtataggtcttcaaggattttaagcttggcaccagtccctgattttcctctcggacaataagcatgtctacctctgctttggttagctttgcttgaactgaggtcaaattgtcatccttagccttcagagttttctccgctgcctgctgatcccattccctaaaggacttctttaccagtgcttcattcgagagggtctccatctgatcttttgcctcttggagcttcttcagtaactccccaatgccaccgcgctacacgatagagaaaccctgattgatcaatgtcttggataggcagcctgcttcagcaacaatcgattcaaaaacattacaagaattagcaaaatttagcgaacacgaaaaatttaaaactattaagtatgggcttaccaaggtaagtgccagactcatatcttaaatttggtagatcaggttggaagaagcgcaaatggcaaacctccttgttggaagttgtgtcaggtcagcaacaaagtggttcaccatcttagaggcaaatagtgccgaagaggaccctaggaagctcgtgaactaatcagtcataggatcaaggcttaagtccaaaacttgtccagcaaaatccccccagaaaggaccatcttggatctgcttgaaccatttcctcaaagcctccacctccgcttacccctttgttttctcatcaatgacataattatgcttaggaatcttgagttgaacatgctcatcatcagggtcagtgggggccaaaatgatcgagggaatgatagggaaggcttcagcctcagacgtgattccaaagtcggtactttgcataggagtcccaaatgacttggtcttcttagaagaatcaaaatcagtggctgcacccttccgtttccaatcaattgtatgaatttcctcttcctcttcctcaatcaccactaactttagtttttcaagcatttccttgtctaggtctctgggaactatcaccatatatggaggatcaacgccaacgggattagggttgtgtgtcgagttcaacattgcaaaaaagttcatccataggcttagctataaaaaagagaaagtgagaagatgaaaagtcaaatatgagaagtgcattaaatgtaaacataaaagcatagcaaacaaggaaggctagtcctaccctagtgtcctaattttgtcctagcaaactcataaataaaagagatggtgtcttcatctcctaaaaaactatctaagggaaggaaccaacttgaggttaggaagcaagagtggtcaaaaaagatggggactaggatgcttgaactgatttgagatcggccaatgaagccccccatgtttgaaaaataaaaatccttttcgctatcaccccatcgagtatgtgttggattatagtttaccaggatctagatt

SEQ ID NO: 265943 - DNA, 537 bp, Cannabis indica
ctctttttccttggtccattagcttggatattccattcatctgagtagctcctcatgtaggtatcgccctaggacactctgcttctgggtctgaatctgagcctgaacctgagttagccatatctacaccattaacaaacaaaatttaaagttagctatataatagagtaactacgtacataaaaaaaacgcctaacaagtaatctataaaaaaaaacaatcaaatacataaacaaatattatcacaagtaagttaccaattacacacaattcttttctttttttgtttaatgtttgcatgaattacgattggcccatattccctcattgatatcgtttccaatgtattgaacatcgtcttcctcaaggttacgatcaatttccattacttgttcatgaattggttgccaaaaaatagaagtcatcataacataaattaacattctcctcatcctcttcattctctaataatctcctttctggtgtcgataaaataacagaccatttatcattagccggatcagaaatgtaaaaaac

SEQ ID NO: 265944 - DNA, 6836 bp, Cannabis indica
aagttcagccaagaagagaggagagtgagaacccaaccaggacccattttaggatggggccgttgggcccaagagcctcccaactggagtaaagaaaaagatcatatcgatctttgttcttgaactagtataaacctctttcttttgtctttggatttatagattgatcaacataattctaccatattagtttatctgacattgttttagttttttgaattgtggtttgtttgagtttacttttcatgtttaaaatcctacataaatgatagtattttatttaaaagctgcgattgttgtaaaattagattaaacagatagggtaagaaaactatgtgatgagagaattttggacatttccagtgatctaattttccatttggccattagttttagagattaaaacaacaaattgaagacaagatttctccaactgctacaatgcactcaacaaaagagagactattctctctctctctctctactattcctaggatctttcaaagatccaaacaaaaaacttttacatatttctaccaacctagttgtttctcattgcaatctgattcgatccagactctctgagacggtcttcatccgaggacgaatttctgggtcgagttctgtgcaattgagggcgatgtggaatgctgcaacaacttgtttctttgcatgaacctcatgaagaagtgcagggtctataatctcggacaacggcttttcctctttaaatgccttcctaatcacactctccagtcccttctcatcattctcagggccctcatccggaaccttaccagtcagaatctctaaaagcacaatgccaaaagaatacacatcgcatttttgagtgaacttactgccgggtattcgagcctcaggggccatgtaaacagttgagggagccgtgattttcaagccagcagtcacaaaggaagagttagcactatgctttttcgatcccgatgaggtgaacttggaggaacccgacacaagacgcgcaagtccaaatccagaaatgcaaggttgcaaatcatcatcaaggaggatttttgttgacttgatgttgccatgaacatatttccgaggactgtactcgtgtatgtacattaaccctctggcacttccttgagcaatctttaaccttgatgaccatgataatggtggtaaagaactggcaggtccccctacttatcatgaaaacataaatcatcccattcatagagagacaaataatcacaaggagcgattgtatgtttcaaaaatctttcttattacttagtttcaatactaccatttgcatgattaagcatgcacatgtttagaaattcaagtctttcatagataaacataagcagtcacggatccacagaaccaactactcacgaaagattttgaaaacaaaccatgaaaagggatccttagaggggattaattgtcagaaattattcatttaggacaggaacaagccaaaaggaaaactggccccagctgaacattattcgaaatattaaataactagtatggacaaaacaatgaaagaatatgtcagaccaaatgaaaagaggccaaaattaaataaataattcttttctattatcaacacgaaataacagaaaagaaatagaaatgaaacttaaatcttatatccctttctaaagagaaagatacaaggacattgactaaattaaaatttgaagaaaagatactgaaaaatagtcaactagaaaaccaatgtagcatgacaagggattattatgttaactacttttggacccatcaaaatcatggattatagaactagatatttagtatagccactaatatttaatgatagccaaatagccaacttttgaaattagaccacttacattactctaaactacaaaacaaatatagtttgtgacaaaaaatcaacaaaaaggagatggtggagtttattggttattattaattaacaagctataataaaatgatctaaaagtatcaatttcaaaagtaaacatgatatagcaattcattagatcccagtgatcagtgcattttaactattggggatatcattcaacatgtcttaatctacagtccttaaacattgatctttgtaataaggttaacaatctttttcaaataaaacatgctttatagacaaatctggctttaattatgagggtacaaaaactattaatgaaaacaacagtaataaattacattggctgtaataaatacaatacacacaacaactaataagatctactgcctttctctttcacatgcatgctactgttttgaaaattgtagatatgtataaaaaatataaaaatatatatatattattatcatttctctttcgttgtaatcttcaatcagtaaaatacaaaggaaaaacaaaagaagggttggtgatataattgttggtagttggtaaaacggtcggatacactatttttttaaatcttagcaagggatctttgaatattttgcagtgatttaattatttaaattccaataaatagcagacattctcataaaatggtgacagaaaattattaaaaatctataaaagaaaaagggtggaaatatatttttactttcaatttgaatctcaagttttttaattttattattatgattaaaataatgttagcctcattaatattattattataatgtttataacatatccatgtgcacattggaaccataccaaaacaagtcagattcatataaatgaaaaaaactgaaatcatatgtagtagactagtagtagtattaattaaattaaaattgaaatgaatattttaatatttgaaaataaaacgaaagggaataggattgttaccgtggagcgcagtgtagagactcccgttgcggatgaaatcagtaaccaatagcttctcatcattagcgtaatagtaagcccggagcggtacgatattcgggtggtggacccgcccgatagcgtcgatctcggactcaaaatccttgaacctccacgtggcgtcttcggattcgctaagccttctaacggctacaactgttgcagccacacctgatcccccaccccgagccaccactctgtacacgattccactcctgctctttcccaccacgtaagccgatgctctcaacaaatcctccaactctaaactgaacccttcgtccatcactacgaatttacctttttgcccctcttcttccactaccacttccgtctcctccttttctttccccattttgccctcgttcccgaaacccgccgttgatttccgccggaaaagccagaccgacacgaagaccgccccgatcaccaacgaaatgcctgatacgatcggtacggtcaccgagattcctccctcttttcctctcccttcgccggagggcaaatcggggttttcgttcagaggcttctctggattctgatccccatcccgatcaccgtccgacgtgctcttagagagattagggttttgagcttcagggcattgagtctctaatggaaatccgcagaggcttggatttccagagaaagcggtgggtccctggttcagtagagaaccgacctgagggattttaccggtgaggttattgtgccgaagatctatgctaaccgggaccggaattcttccgtacgagggagggatcccgccgctgaagctgttataggagaggtttagggttccagcgagggattggagttggccaagggattcagggagggagccattgagttgattggaggagaaatcaaggtgcctgaggtatttcaatgcggagatttgagacggaattggaccggagagggagttgtgagagaggtcgaggatgacgaggctggtggcgttgaagaggtgaagcgaaatgggtcgagagaagttgtttcgagcgagactgagtcgcttgagcgagtcgaggtgaccgagttcagaaggaatgtagccagtgaagcccttgttaggaagataaagatcaataactcggccgcgcgtgcatgccacgccccgccagctacaaggatttggatcggattcggaccatgacccgagaattccagttgggtcagtgtcgatagcggctttgagtgcgaggagtgagagtccatcggagttgagtccgtaggaaattgaaacaaagaagatgaagaagaaggaaaggaattgaagtggagaaaccatttttttgagttggattatttgaaaatgggagttaggattgaggcatttgagctcaatttctcacttctctttctgcaacgagaagttgcttagagaaaaatacagactagttctgctgaagaagaagaagtagaagtagcttttgtgttgagtttgaacagcaacaactctcgaggtggcatagcaacacgtgtcttttctaatttgaattcttttgaccctattattttaattaaggtaaatttcttgaattttattaatatgatttatttttgtattaattagatcacctaaatggtacaatctttctagattcaatattaacatgagtaatagcttcaaatttattatactattaataagaatatgagctaacaaaaaattaattcaatcctactaaaactgaaattgtggtcctatgtcatatcgatttccacttaatataattttggctttttactatttgtgtattaaatagtcacactttatttcaatacaaatatttgaaatgtgcataaagtgctttgtatagtttaagatcatttattttgcctcattattaaacatgtttcttaggcattaaacatattacataaaccacataaatgggattatgggaatgtaaaacaaaacaaaagataaatataagaatatatgattgtttattagttttgtgccgttgtccacacaccccaaagaaaaaggacagtttttgaaaaatcaggagaaataataaaaagaaggaagtgggtttgagtggggacaacaatgtaattttagtgtttatgtcagagaaatcattactacatgaaaatatgtagtgagagcagtaagtagtacactttttcgagggttcagttcagtttttttgtaatggagggtattttagtaaatctaactcggattttgaagattcaaattgaaaggaggataactataaagcgggatcaagtattagaattatacgtaggattaactcctaatacacactacacctttcacggtttccaattgccataacgtatgaccatcatttgagtgagtacacttaaacacactaatttagtaaaaaaaatcttaaaaaaaaattaattaattgaagtagtaaaaattcaaatttgaaggattcatgctacaattttagtctcggccaaatcaccacggacaaactttcctgctttggaggcaatcgtacgagtattaaccccattcagatacggtgtaggaaggcccaacaaaaaagtgaaaatgactaaaatatttttacaaaaaaaaaatattatactattatattaatgcttttaaggataatatagtaattttattatatatattttccttcttatataacaaacaatttaaaaaatgaaaatattttcatttatttttatcttttgtatctctcttaaattttctttatttcttattttatttctttgctatcaaacatagttgaataaataaataaaaaaatctcaacttttaaatgttgaacagattgacaaaatcatcaataaatatgtaaaaattatacaatgaaaatttatgtatgaaataaacatttcatcaatgagagtataaaatgaaatgtaaatattgagaattgttggatattggcactatcttcatattggtaaacatattattgattttgagtctatacctttatagatttgtttctaaactctacctagtaccaatgaaaatattgtctatcatttatattattcatgttcttctcaatttcttttggtttgaagataagaatctataggggtggaaattggcttagcaaaagaaccacacacacacaagatttttttccccttaagtgctgtagagcactatttcatcaaaccagccacatacaataaccagatgcagcttttaagaaaaatgagccctaccaacacgaaaaggtttacttttgttatgatatcattgctgataggatattttcaagtctcaaaccaaaagagaaatggggtatacaatgcaaacaaatccatatataagtcaattctttttcacatatattatgtggtttctataaagttggtataaaattatacaatttgtcataataaatataataataaaaataatatagtacaactttaataaactactacaactaattaataatttcaattaaattatattttcttatgtacctaagaaaaatagtgtgaattaaaactcacaatattaattaataatattagttaaattatactttttcaattcttatattatcaatttttaacaattttaccttaattagtaacaatctataaaatatataaaattattgatcaaaccttctaatttattgaataacaatttggacttatttttttgaaataaaatataataatactctacctaattttagtcaattttttttttaataaaactaaaatataacaaatttaaaatcagtttttagcacaaaaagatactaaaaatgtagtaaacttggtcataacacctctaacacgggatattaaattatataccaccttattaaacatcaaacaaaaatatgctatccctttttctaatactaaatataccccctcaaagaataaaattaaaccttttcaaaaaaaaaataataaataaaactaaacccttcccctctctttcctctctcattct

SEQ ID NO: 265945 - DNA, 514 bp, Cannabis indica
caagaagggtatactgttcgaattcaaattggggtaatgaaaggtgattgtgggatcaaggatggtaatgaaaggagtcaaggaccatgggatctacatactatagggaaataccttatgcagtcaagtcaatgttgcagcatgtgatgtcaaaagaaataccaaaatctggcacaggagattggggcacatcaacaatggaggtctcaaaattctagagaaaaagggtgtctttgggacagacaaactacatgatctagagttctgtgatcaatgtgtgctaggaaaatcaaccaaagtcaagtttggtacagaaagcacacatccaagggcattttagactacatacatttagacttgtgggggccttctaggaccatttccagaggtggtgcaaggtatttctttacacttatagatgatttttcaagatatgtttgggtacacattttgaaaaacaagaatgatgtcctaactaagttcaaggaatggaaaaccctgcttgaaactcaaa

SEQ ID NO: 265946 - DNA, 879 bp, Cannabis indica
ttcagttttgctatgtatctagcaaatttcctaacctttatgacaggaaataagaccaccatgatcttgaacttatatcgaaagttttccttttttgacccaatctgttactacggattccaatcgtgttactacaaatcagaattattttggaaatattgtacattatgaaaacgtgtttgtgactgtctttaggatttttatgaactaaataggacatagagagcaactaaatgttctcaccactttgagcttcatttttttttcttcatattttcatctttgtgaaaagagagtttttttttttgttgaaaacttggagtgttcaaaaatttgatcaagtggatcttccaaatacttacatattaatattgagaacatggtagtacaattgagtgggagagctaatcatagatatagaatctatagctttcataacttttagaagtgaaacaataattttctttgagcttggcttaacgcgataaatgattgaacgctcatttcaataattatattaatttattgaaatatcatttataattagctaagaattttaaggataaaatacaattaaaaggtaaaacggtaaatttgtccctacttaatgtagatcatctatagaggtatctttgactattttagattgaaaactaatgggtaattcaaaattcgcatcttatttttagtaatagtagcgttttatataattaaaggtgcaatttcaaatcggagtcgggagaaattaataagttagaaaatttacttagtaaattttgaatctacttagtaaattttagatctacttaatgaaatttattaatccacttagcccattaaaggttttggctaagtggattaataatgaaaactttacac

SEQ ID NO: 265947 - DNA, 588 bp, Cannabis indica
agtataatttcatttgtatttttatgtttcataatttatttctaactctatttgttatgtttgtaggatgacttttgtaaccaagtggaagacggagttgtgcaagtggaaggtaagaaggacgtgttgaccttggcactagggatagatgagcatggtggccgggttcgagccatgggttttagcatcactaagactaaatatttcaacacaccacaccttaaaaggaaaaatatggatgggttgaaccaagtatcatcagatttggagatacgtgttcctgagacagagtaaagaaacaaaaaactataggagaaagtggatgagctcatttgtccggttagttcccagcatagtagcattgtaggcccatgcatctgcttctggtgttggaggagcatcgaatgaacatgcccatgctggcctttcctccgatcccatagcacaggcatcgggtcgtgcgaatgtctcttctccaccagatctcgtagcacaactatcgagtgttgtcaatgtctttactccatcaccattgcgtgtcagaaaggcaactgctccatcagtagcaccgccaactactggtggtag

SEQ ID NO: 265948 - DNA, 706 bp, Cannabis indica
acgaagagagtgagagggggcagtacagtgggtgggtggtggaggtgagccgtggtggtgcatttgaaggtgtgagcgttgacggcgtgggtggtctaccgtgggtctgtgggtgcggcaccgagagaaagagagaaagaaagaaagagaggcgagagagagggctgatgggtgtgggattttgagaggggtaattttgggatttaggtaaagtaggcatatttttcatagtataaaatgtattagttcaaaaaaaaaattttgaaaacttttaagtatagaaaatcaaatttcccgtttaaaaatacaaccgagaaaaaaaagagatgatctaacaacaaaagaagaggatctaacaaaaaacacaaaaggagtagctcatacatgttattatcattttacacatatacaatgtgggactaattaaaaaattaacttgctacaatctcatattacaagctctttctcaacttttacgtccaaaaatacacacccacaattattttttttcctaattttttctttaacgatgttcattatagttacaacattattattgtagtgttcgttatagttacaaccatatagtgtacgttatagttacattacaatattatcctaatagtgttcgttgtagttacaatattatttttgtaaacctttaccaaattttacatagtttgtagtgtcgaaaataagtttgaaa

SEQ ID NO: 265949 - DNA, 574 bp, Cannabis indica
aacaaaattggggatgctagtaatagtatcatatatgctattacttcgacaaaaatgaaaagtaaattattattattaatatttttatcttttttctacgtggacgcaggggtagaaagtgcttgccaacatataaatagaattgttaaggctaaccttccaccactataaatttaataatttgcgtcataaatatttaagtttagctcacagttgtaaaaaaatatccaattttaatttttggctgtaataatatctaagttataattctaaaacttcggtaggaacctcgctattaaatgttaagtaaattgtcacgtgacaattcttgattagtcaagtcattaaatttttattttttaaaaaaattaatttaaatataccaataaaattgacgtgtggataataacttaacattaataacatgtggataataacttaagtatttatttataactgagagttaaacttaagtacttatgacacaaattactttaagggttcgtttggaacgccgtattacgtcgtattgtattgtattgtattatattgaattgtattttatgcaatattt

SEQ ID NO: 265950 - DNA, 1375 bp, Cannabis indica
aaaatcccaaatgatagcaattttaccctgtcaattttatccctccatactctcttagcaaacccttctagtatatgtaggggtggattcgatcctaggaagtaacaaacaatagaaggtttccaaaacaaaactccatcctcaatgtcatccaaagtaatttttactttactagcactttcagattgcttaaaagtaggctctaaatttctcacaatacccgatcacaatacagttggagtaggggacatacttgctttaaatcactgttacattgatcatttgcacgaaggaaatgtagaaaatccttctgcacttcttcttgcctctgtaatagcttcagtgaagatcttggagaaagtggctgctggaaaacatccgtaagacctagatcgttctcctcctcctccgacatttctagcagatctataccagatgcatcatcaattgaatcagcaatagtagtcgattgtgtcaccgtgatgttcttcttcctcaatttcttgctagccgatttagcctttccctaacttttggatctcattttggccatggccgccagctaccagctgcgagagcaaagcacgagagagaggttcaatgagtatttttttagtaagcaataatccaaattggtaacattttagtttagactttaattaaaaaaaataaatttcaattaaaattaatggtcaaactataacaaattggtaactttaaaatgattaaaaaaaatagtaatttgaataagttggtaactttaaaatattaaaaattaaattgtatattttaactaattgaaaactttagaatgataaaaaaaaattatacttggaactcttttatgtatcgagggcaagtccaagaataccgaaaaagcaagacttgatttggaagacctcaaaatacgtcgtgagttgtgtttgtatgaagaccacaatggaaatcggaagaaaccacctgctagttacacgcttagtcttcctaaacgacgtgaattttgcgaatttatcaagtctgtgcaattctcaaaaggaattgctttaaatttagaaaagaatgagaatgaagacaaaatttctggtgtgaagtctcataactaccatgtgttgttacagtgcttgatgtcagggaccattcgaaattttttgaagaaagaagtctgggatacaataattgaactgtgcatttttccaaaatttatgctcgaagacattgaatattgaagacttgtagagcatgcaaaaaagtattttagacattctttacaaattggaaactattttcccaccgataatttttgatataatggttcacttggttgatgcatttagttaaagaaatacttgggggactagtgcactacatgtggatg

SEQ ID NO: 265951 - DNA, 601 bp, Cannabis indica
ataataaattatatttttttaatgataataacgataatatttatcacaaaattttatcattttatatattttaaaaatagcaatttatgagcttaatttcaaaaaaaaaatagcaaactatgtttttaaatttaatactattaatttatttataacacatacataaaaatatattatattttagattgtatcactcactagaaagtaaaatatatataaaaaaaaattataaatatctaacaataccgcgcgaagcgcggcttcattccctagttagaaaataaagtaaaattttggtgatcattaattgctagcaagaggtatatgttattgacttatttatttttacaaattataataaaactactagaggagtttgaatatcttagatatttatctatagtgaaataagttttacgatatactgtactgcggcgaatggagaattaatatgcatgttacatgggtttgaatatcttaaatatttatccatagtgaagtaggttctgcgaaataaatgtactgcggttggatgggttgtgatgagtccatgtttgtcttataaatataatgaatttatatattaatattcttaaattga

SEQ ID NO: 265952 - DNA, 2279 bp, Cannabis indica
gcagattctacaactaagaaggatgttaaagcagtgataaattggtaaaagagaacgcagcaatgaggaggtgcatcatcatcatgatcaagctcataattagacaataattaatgtgaatgagcttggtttgtgcatagcactactccttaaaaatagtcttcttttactgataattaagttggatagttcgtggtacaataccaaataatgtgtatttatatgaatactgtgaaactcttatatccaccaataaagtttgattatcatatctctgctttaacatttataagcctattttataatttgtagtgaaagattctaattaaattttaactttacctttacaagaaatcaaacaataagttaaaactagaaaatttagtggggcattagaaaaaaaaaatattttgtgcttttatttttttaaagaaaaagtatggtatttttaaaattattaaaaatgtgtatttttaaaaagaaatttattttgggctcctaaattaggtgggccctaaacataggcttattgttatatacgtttttctttctttaaacctatagcaaaagagaaatagctaaaaattaaaaataaattagaaaaggcttgcataggagctttcttctctctcgatgaagaagaagaaaattcactcgaatgcctgtatcacgatccaagatcaaggagccccatttaaactagaatgtttcacctatgacagaagatgccaaagagatccaggaaggagcgatgatacttgagaatacagatatgcaattggtggagaaatcggagtcgatagaacaaccattgatgaagtctgctgggaaatcaatcattagtgattctaagaactctgagatcgagatactgaattcaagctaggttgaggatgcagagaaagaagactatcaatcctcagctcaaaagcattgggcgaagctcaaggggagccaacaaataagggcagttatcaaacttcactatgaggaaccgatgttgaaattcagtaagcgtgtagctaaaattgatttaataaaagtggttgaacatgctcaaaactggagtactactgtaatttgtatggttatgggtgtcaatcccccatttactatatttaaaggttttgtcaagagaatttggggtcatctaggaattgaacgtgtggtgagaatgaacatgggtctcactatagtgaagttccatgatgaggctactcaagacttggttctggaaactggtgtggtgcaatttgataagaaacatgtcatagtgcatccttggacacaagatttggatactgttaggttagttcgattagtttctctttggattagattacctaacctaggtttccaatattggggccaaaattgcatgagtgatttggtgagcaccattaggaaactaattatggtggacagtaactaagaaaagatctatgattgaatttgctagagttctagttaaaatggtgataacagatgatcccatgtccatcatttacttcgagaatgagaaaggccgaattcaagaacgattcgttgaatatgagtggctccccattaagtacaatatttgcaagggatatggacatagcatggataattgcaagaaaacaagccaagaagtgtggatcaagaaaagtttgtaagaagatatgcctgctgaaaaagaatgatatactatgctggtttcagaggctttgactacagcaggggattcgttgttagtcaaggtttcatttaggttagaagatggtgtagagaaggagaataagcagatggctaaatctactccagggcaagttaagaaagataattgggaagtccccaagaaagttgggatttcaaagacaaatgggaagttagtgctgacagttcttactaaagttcacaatgggtttaatgttcttcaagaacaagggaaaggtgttaaaaaagggaagcttctcagtctaatgttgatggattgctccaacataattagttggaatgtcaaaggaatgaataaaagggataagcagtgtaatatcctgagtctcttgaagattaataaggttgatgtgggtgctttgctggaaaataaaatgcagggttctaaaatagatgacatgatgaataaggtgttccttggttgggatcatcattctagtagtgttactaagaaacgtattattgttatttggctaaaatcttttgttgaggaccagatattgtacgaacaccgacaatttgtacattgcttggtgagaatcatgagtgttcagcactccttt

SEQ ID NO: 265953 - DNA, 649 bp, Cannabis indica
ataaaatagattacattgaaatggagttttatttagggcataaaacctaacaaaaccaagttgttcatgtactaggcgagacgcctcaccaagatacatttggcagcgtgtcctaatccacgtcagtgttgaccccctttaaaaatagtttaaattacagctgtgtgatttttaaatattaactgcatttatttacgtagagcgcaatgaaagccaacaaattcggggcatattgttatgggatttgaacttaaatgtaattaactgcccacctatattactataaatagggccagataatacgaaaaggggacgaaaaatcatatagagaaaaaggagtgtattgattgtaaaaaaccttggttctgtatcagaaaaatctaaataagatagactcatggactatgcagagttaactgcaaaatcacgtaaaaatcttggtgtcatcgttataattttctttatatctgtgcttgatttattaaaaaattggctcatagtcgttaacgaaaatctgcgttaacatttttataaatcataagttagaaaaatgatatttaatatcattttacttatcaaaaaattataaatcgtattttaaatatttaaataacctacaatttttttgtagaaatttgaaaaatgctta

SEQ ID NO: 265954 - DNA, 1840 bp, Cannabis indica
tttttatctttttcccatctttttcctctgatatatttctaatcttttattttaaatctgaaaaaataaaagataacaagcataaaaatgctccaaacacgattaaaactcaattaaatactaaatttaatctaaaattaatattaaaaataacctaacaatacgagtcatatagatataaatattacttggatatgggtagaaagaggttcataatatatgaatccaaacttttggtacaactattaattataactacaatttacttatacacacattaaaaattatttaaatttattttgagcattataaattttttataattatataaaaatttataagatgtcttaatgtaatatacacaattatatatgaaaaaaaaaattagagtaaaaagaataatttataatttttcttttaaactttcgataatactgattctgttccctaaaatctacggcttgttaaaagtttctcctgaatattttcacatttacagaaatttagtcattctgttagggtttatctcattattctatttaaatgatgatatgtctttgtaaattagtaagttttctccctaaactttgataactatcaaatcgtactcctcaaaataaaaatgagaaaaaattaatattactgtgctaatttccaagatattacaagtagcatgttgtaatgttgtttacaaaattgctacaaaatttatctgctctagattgagaactgttttgttggatctgatctcacaaaaccatagtagttttgttcaaggtcggtacattgcttacaatattttggtttttcaaaatcttgtgagacattatgggagagttaattctagacccaactacgtgattaaattagatataaagaaggcatatgataccgtagagtgaggttttatcgaagaagtcttacaagcttttgagtttcctcaagagttcattcaactagtcgtgatttgtatcaagactcctcgatttactctcatgataaatggtgcactttatggtttctttgaagcaaaaaggagagcttcgccaaggagattcaatgtcccctcttatctttattcttggtatatggaatatttatcaaggatcatggatacagtgggtaggaaaaaagtctttaagtttcataaaagatgtagaaatctcaagcttaatcacttttattttgcagacgatgtgttacttttttatcatggagattacaagtctatttatttgcttttacaatggctcaaactattctcagaaaattgtggtttgaagccaagtaatgagaaattagctatatactactcaggtatgaaacataatgatgtacaatatgctctagaagtcaagtgccctttcgttatcttggtgttccaaatagataatcattcttattgggagaaaattatgctaatcagcattttgaagaggatcattgccatatgcagagctttcctttggaagggcatagtttggtcatatttatgtaaagctcgaaaagaagggggatcgggattttgaaatttgctcttttgggtacaagactgctcttggtaaatacgtatgggcaatggccataaaacaagataatttgtgggtcaaatgagttcatagtgtatatataaaaagaagtaactggtattggcaacaaattctgcatgtatatgatcatatacgatctattatatatatatatttcagtagcagcttttgctacaccccttgctgctatatatgatctattatatatatttcgagaagaagtaggaatgaagtactttggtgtcaaaaactgaatgtaaagatagaaattacaatgattttgtcaaaaa

SEQ ID NO: 265955 - DNA, 752 bp, Cannabis indica
taaaattgaacaaaaattcttaaatctaataaattcaataatttagaaaaaaatttaggactaaaaatttaaaagatgtaatttaatacattttaaaattgataaacattctaattatcataaatataaaaattaataatatgtacgaaagtactagcacacctaagggactttaacaaccattatttttttcattttattttgagtgaagtgttaaaatggtataatcaaattgtcgtttacacgtgttcatcattcttaacttttttttttaattaaattaaaaaatccatatatataaaataaaacaatagttgtcttttatatatttacatatgtatagataagtaaaatatttgtttgtgttgcttaaatattagggcttcattgatttggactattgacccaattgattaattaacaaaaatatctaatttttattgcccaaaagaaaaaaaaataatgataattatactagaaaagttatttgaaaaaatatattgtcttatatattgtcgagtattgtatggaaatattatatttcacctgctcttgaagagaattccttctctataaattatttaggggccacatatgatgaccaaagatgtttacttatttgtctttaattgactggtcaaattaattaatagataaataataataaaacctcatcatcattatcaaaattgtttgatgaagcaaatcaaaatttgatcaaagggttgacaatactgcatctattatatata

SEQ ID NO: 265956 - DNA, 2333 bp, Cannabis indica
tatttccatgctaacataccaatgttgtatgggtgcaggtgtcccctgagtgaccgaacaagctttagactcttggtcacttacaaatagccagagtattttatatttacatgttcagactttatacttggacgaacctgtttgtacacatgttatatagttttgtgactttaaaaataaattactagaattttgcaagaaatcatatataaaattgacacaatttgaacgataattaatcactttattcatttattggttggaatgtgttgttactgaagtaacttacatttatttgataataaaaagctattagatgatcagttaggatcttagctaattgcaataagtggtcattcaaatcttagcaataaaattttttaaacctttgaacggggaccgtccaaaaggccatcacttaagtgatgtttgagcattatgcaattatgtggtcttcaaacctttgtatttattggtggtattttctcagatattcattattccaatattgtagtactagaattagtttcatgttttcgccatacagcccacacaagaatttcctttctcttacttgcttattaaagtatctagctattttttgttggatgagctttttagctttaagtttgctacatctcttcgtcttttcaagtctgtttagcgattctatcaaaagactgtggttggtctcttgatcataggataatcttctgtgggatggaggctccagttctactggtagcattgcctcatagccataagttaaagcaaaaggagtttgtctggtaaccgttcgtttagtggtcctatacgaccaaagcactttgggtaattctttaggaaaattacccttagcttcttcaagatgttttctcagagtgtccttgagtgttttgtttactgcttccattttcttgaggatgtgtgactactgagaaactttttacaattccacgtgttgtgcaaaaatcactgaacatctaactgtcaaactgttttccattgtctgagacaattttatgaggaagtatgtaccgacatatgattttcttcaccatgaaatctaaaactctcttggaagttatggtggcaagtgactaaacttccatccactttgtaaaatagtcaacatctacaactgcgtactgcgctccaccttttcccttaggaagttgtctgattaaatctattccccatatagcaaatggtcatggattttacatgtagatcaattttttgggcgaggccctaggaactttaagaaaattttggaacttatcacatttcttcacataggtctttgaatcttcaatcatggttggccaaaaatactcttaccgaagggttttcttagataaactttgcccctaacgtggttgttgcaaaacccctcatgaacttccataaggagacgtgcaacttcctcttatgtaacacaccctaacaaaggtagagagaaacctcacctttacattactcggtctaagatcagatactgtgcaacctttctcattatcttttgagcctcatttctgtcacttggaagcttttcactttctagataagttacaattggggtaatccaggtgggagtatcagccaacatttcaatttcttccgtactagtgatgagggtctttcataaattgtattgggaccaagttttccttgtcaaccacggtgttgctcgccaaaccgcgcaaatgcatcagcagttgcattttcctctcttagaatttacctgatggtgtatcatttgaagtgagctaagaggtcttgaatttttcttagacacgccatcatattttctccccaagccatgtgttcccccaagatatgattgacgattaattgagaatcactacaaatgtccaggtattcaggacgtaccttccaagaaagttttaatttggtgatgagtgcttcatactcaactacattgttagatgttgtgaatccaaattttactgccccaaggggaacacacttgtttgttgattttaacacgaatctaattagtgcggttatttgacctctaaacttccttgacttttgttggtgatttcatatccagaagagcttgaatcttcttagggttagcttcgattccttaggagtttacaataaatccaagaaacttgcccaatttgactataagagaacatttaatgggattgagtttcatgttgtactttttgaggattttgaagcattcatccaagtcctctatatgccccagcctttctggatttgacgaccatgtcatccatgtacacctccatattacgtctgatcttatctttaaacatttcgttgactagcctttgata

SEQ ID NO: 265957 - DNA, 713 bp, Cannabis indica
acgtataataataataataataataataataataataataataataataataatacatacagctttatattatatatgttgtcaattcacacaaaatatataaattttatataatgacaattcacataataaaggggggcttctctctcttcaataatgatgagcttttggcctgcttattattattattattattaaaacctttaaaatgatgctcttggatcggtattctgtagtcactatatatagtaaagtgactgtgtctgaggatgaacttctgttttttaagaaaaaaataataataaataaaaaattgataagatatataagatggattttatataattaagaaaaacttgacaattcttcataagtgctgttaacttctatttttttttattttgtttgaaagaccgatttttcgaataataatttgtgagaaattattcataacttgatcattttctatagttcttaatttttttcttccatagatcaagtttctcttttcctcaatatgctatgctatgtaaaattatgtaatgtaatatatattctcttatgttctattgtgtttgtgtgtatatattgaaatttaattggcaactctaaaaaattctctatatttcaagtattttgatcaagtgataaatttccatcttctttttgtttggatagcatttttttttccaattaattctaaaaaaaaatta

SEQ ID NO: 265958 - DNA, 768 bp, Cannabis indica
ttgtattttttggttacaattctggaccctatttttagggggagcggtttatttacaatttgttgaacttttctatttaaaaagttgatttattttatgtgttactatgctttcatgcaagggaagtatttttatactctttgtttttgtttctaacattttaggtggattttcttcttataaaatattttgtgaatcaaattgtcaaaatgagagatcgttaaattcattttggcatatttaattgacaaaattttattattgtgcatttatataatttgtattgatttatctcattaaaagcatattaggtgtctagcttttttattttgaaaaagttacacataattggtaagttttatgaataaattaactctttatttattcagctggattttctatgtggtctgattatatttgagtttctaaaattaatttgatcaggcatgtttaaagaaaattaaaattaaagttttcttttctataaaaggaaagttgcacattctgctcacgaaattgtaggtacagaagtagattttcctaagatgattgaagatctattttagagaattttcttgtgagttgtggtcgtgtacataccgagtataagctgtctaagatgtgtatattgattataaataaataattagcagctaagtttagtatctctttaatttgtttaccttaaattttattcctattattagaaaaggttatctttgttgtgtagaggagagtgtattcaactctacctcattgtttatgtct

SEQ ID NO: 265959 - DNA, 688 bp, Cannabis indica
agtagagaccatacttgatgaagctctctctcgtcacgaacttgtagatattccatcttgaggtgagaaacgagaggatatggttggccctatccctgagttgtagggtaggtattggctgatcaaaggtgggaacccattagaaggtatgatgcacaacctttgcaccatagcccataaaataatctcgggcatagccgccaatcttagacacggcgggatcattcgtgccaccaaaccaaatgtagcccaactggctgaagtagaagtaccttgattgaccctgactagggttggattttaggtcaaaataccatctgatctcgaagggcgaaggttgtggccaacccatatgtgcatataaaatgaagagggaagacatttacttgatcccatttggactcaactgtgctgggcagatcccaaaataattggctatgtctcagaaggacgagtgaagtggcaggatagcccctgctcagcatggggactagaccacaccatctagttcttaggaggggaatgttctaggtattcttcacctggcgagtcaatgtcaagccccccaaccaaatttttggccacgagattctttaaccttgcatgagtcagtgtagagaagggaatacccaagtagcctctggctcccctctttggggcaaaggcactggggctgccaattcctcct

SEQ ID NO: 265960 - DNA, 3031 bp, Cannabis indica
gattcaaactgtttcagttagaaattagttggcttgtaaaatttcttgttttgtactctagttcaataatacgagaattcatcctttgattctcaatctttctctctgtctttctctttctttcttcttctttgttccttcatagtattcaatcatgtataagaaagttaactatggtatcaaagcttgattttactgccattaatggaaaatgctgttactggcaatggctaaagcatttgtctctagtgacactttgaacttaggcaataacaactttcagcagaatcatccatattctacttcaggtcttcaacgagccaaaaagaagaatacaaatgaatcctctctgatctacttcaatcacagtctctagatcaagttgagtgattataatttcctcttgtggaaacaacaagttcttgtggcgatccgaggaaattgattgcagagctttgtccaaggccacgatccaccatcataagtacttgattgatgaggatcgcattagaaatgtctataatcctacctatcttgattgggaagctcaagatcaacttcttgtttcttggattttatcatcaatgactcccatccttctcttcttgattggggagctcaggatcaacttcttgtttcatggcttttaccattgatgactccccactctgctcattcttatgattagttgtgactctacaagtcagaccttgtccacattggaaaaataattcactcttcaagtgtctgccaagattctggagttttaaataaagcgacaaaacctcaagaaaagctctctatcactcaacaagtacatgctcaaagtcaaataaataattgatttgcttgcatctttaggtgatgttctttctccaatgtatcatgttcaagtaatttttaagggccttcctagtgaatatgacacctttgtcatatccacaaatacaagacttgaacagtactctattactgaaattgaagcactcctgctagcatctgaatctcagattgaaaagattcatcgtgaaattgatctgagtgctcatgtagctgtgatggaaccagatccaacactagaagaaaatcttgctaactttggtcgtggttgctatagacaaccgtttcaacaatcatcatacaattgattttacattaactttggtcctagaagctagcatctagaaactatcaaggtggtggttcctatggtaatttcaaaaactacaactatggctcacctttttttgcactaggtcgaggtgatcctaactctggtagaggatcgctaacaatggacttcaatgtcaattgtgcctcaaacttggacatactgtttaaagttgcttttataggtttgacaagaattttccagctacatcatctcccactgggaacacgaattcaacactaactcatgctaatttcttgacttcctccaatgagtgggacatgagatggtatccagacacctgtgcaactaatcatttcacttcagatgctgccaatcttgctcaaagctcaaagtattttggacaagagcaactatttttccgtgatggctcaagtttgtcaattgagcacataggtcaaatatttatgtcttctaattcatttaagtagcctttagttcttaacaactaattacatatgcctactataacttagaatttattgacctaaattttctcaagacaacaatgtttctatcctgacagatgctatgtaaaggactaggacattagattaatccttttgcaagggaaacacaagaatgacctttatattttttaggatctcaacttgcttcctgcaacagctactcataaaatagatacgtattttttatgaagcctgaaaataattaatcttattaaatcttttttcatcattacttttgagagttcttgttcatgtgttgacaatatacaagaacacaatatacaatacatatcttaataccccaaactattctttgtgtgtggtggaagatttggaagactacagtgtgagttcttcgtcatcatccaagggtacaacttacagaaagaaacaatgataccttgatagctaggcttcaagaggtaaattttattttcgtacttttatttcagatttaatatatgtggtgatcctgaggatgtggtacgatgataatcagtaaatattattccgttgcgtacttgattgatttagtaccacaaaaccaacatagacaacaagacagatggagaaaaggtcggatgctgaggtgaaccgcaattattaaattcgaaaccgcaaaccgcaccgcaccgtgcggtttggtaaaactgaaaaccacaaccgcaccgcaaaaaatttcaaacctcattttttatgcggtgaatgcagtttggacggtttgatgaacacccctattacaaacctcccacaccactccaacacattccccgcaatcggattgcaaccaccatgagtaatggaatttctaatgttccaaatataccaggacacaaccagaaaataagcaaaagtgtctgcagtccaagccttagccaatttatccataaacaacaccacatcacttgatttaaactgtcgtatctgctctcatagtcagctttttttttttccaaatctcaatactctctttacacccccactatacatggcagatatcttctttgattttcccatgacaatgtttatagcagggttcgacatccataccacttttggcaagcacattattaatggccagccacccatgacaagtcttccatgttaaaaattacttcacaatgagcagtataaaaacataatcatataagatttaaacattaacaattataatgctcaacaagtaacccaaaatcaaatcattatatttagggcattaaaagataataaacatacctctctaatgtgtattgatttcttgatcaatcctcttctttcaatgtacacatcaaagaaaatatatgggcaaggggtgtgtatgacactactcttttcactctcaaaacacacatacccacacacatcctta

SEQ ID NO: 265961 - DNA, 2910 bp, Cannabis indica
gaattgatatttgttaatcttatcaaatgttcaataaactaagattctttaggaaattatatgtctgaccaaaagaaaagttaaaaaaaaaaaagaaaaaaggaaaaactaccattggaatttagtaaatgcttttacaatcaccaggctatgatgtggttctagttaacttgtcagtaatcatttaacgtaataataaaactaaaaggtcctagcttcctaactattttaataaaggcactagggagcatgcttatatatttctatcaaccatatttttttctcgattggaatttattaaagaaataaaaatggaagattaaaaagtttaatttttaagtactcttaattgtttattttgactattttggttgaacattttatatggaaaaagtagccaaaaagtggttcacattggagaattttgaaaattggacatcctttttcttgtattctttttagagcaaaaaattgtttgtgggaatggcaattcaaaactttagtcacacacaacacaagcacgagaaattaagagtaactttttgcctcattcaaattcccagttgaaaagtctcacaacctgatcagaaaagttagaaatgaaacatccatagacttttttaccactactctttcttcccctttagacaatctttttcaaaatcatcaaaagacacgtccacaatatcagatatcaaatataatgccaaattatctgatgtatttctcttctttttaccatatctttctctattcaaccacagtctacctcaactgttcatatatcaatacaaaagaagaaaaagaccacagccattctacattaaaagaaaattgattaaaatgttggataatacaacctctaattaagttaattaaagttagaattaatctaagattaatacgcaaattaattaataatagaagaaaacacagaaacgttttttcttcattaattaatttaagatccccagtttgtgaacagagcttccaaaatctctgtaaaaacttcaacgatgactctgtgatgatgatccgaattcaatgagagaaaacactgcaaaagctgctcaagatctttggccccgaagatctgtttctctacaatcatctccaccattgacgttctgaaatcgtgatgaggatcgctcgatttcttcaccacagcaaagctatcctttactctcgccggtaacggaacaagacccacatcagagctcgtctttatccggagacccgacttatcacttcggcgattcctccgacgccggcgttgctccgacgagtctgaagataggctcttggaagaaaaaaacagggtttccgtttcgtcttctcgttcgtcgtaggttcgatcttcgtcttcgctgctgaaccaccacccaccgagattactgtccagagaagatgaactgaagggagcgaagtaatccttgtttttaaagctcttttggttcttctttttcttcttgctcttttccttcttagcagggttattattcttactactcttcttctgcctgaaattactatttctcagctcgtaaaatgggttcagtggaaatacaggggacgcccgagaacagcttcggccactgaaagaatcaactcttgagaacggtgttgctcccacggaggaggaggacgagagtttggccctcggaagcatcacgtccatggtggaaacaatacagttgttatcgatttgctccatgggtcgacatatggatggaaaaggtcgaatcttttgaggaataatggggtcagtcatgtgaaagctgtgattaatttcctcaggcggcaatgacgatttttcaattacatcactcaagtttcgagtccggcacgacccgaatgatccccggaacatgcgagagagcttatgcttgaatcgactttccattacagatcaatagagagatcaacagagagagagagagagagagaaaggagttgttgttttgagtttttgaagacagagataatggcggacttttgtagagctgagggtactataaatgcatgagaaaccgaaagttcaaatcattttaatgatataatataaaaatgagtctcacaaaaccttttttgggtggttttcgtcctcttctttgtcctcatcaaccaaaatattaaaatttgtattacttagtttatttattatatgaccattgaaaaaaaaataataaaaattacagtcatttttaaaaagttcaattttttaacagaaaaaaaaagttcattcatttaagaatgtcatttgaattcgtaacagaaatttacccaatcagccttatctaataatacgaacaataataacagaataaagattttctttttcttttttacagaagataaaagtcatgggatatatgggcagtgatatggtgaagtacaactgttcaaagagtcaatagaaaatattaataaggtcacgttgagttaattttcttggtcaaaagtttttttttattattttattttgaaatagagtttaaattgcttaagctttacaactcaatcaaattgaaaatgtgattccaaaaaaaaaatcaaatagaaaatgattttaaaaatgattgcctatgtttgtagaacaaagccaactcttgtgattatgacactttgggtaggcgtaaccaaattaaatgtggaagtacataaaattaaataatcagacagatgtaaataaattttctccatgtccttaaaaaaaaaaaaatactgcatgtccggaattaattagttatataattcctgaaataaaattagagtttaaataacgaaaccatttatatgcaattagtagccttaattaagaaaaaaacaactatacagttaatgccactgtgctgtcaactagaatcttaagtactcattagtatattatattaaaaagaaaaataaaac

SEQ ID NO: 265962 - DNA, 2988 bp, Cannabis indica
ttagtttactagaaaataattatctagaatttatttaattaaattgagtgtgtttttttctaaattaattttaaaataatgtaatgaaaaattaattttatatattttaaaattaattatgttgctaaataatttttaattaggttaaactaatataattagcctaatataattatttaaataagataaatgagtcttcacagttgagatagttcatgtgagggagaattgggttcagtatgtcatacccactactatggcccactaactctcacacaaggcccaaaagagaggaatttaacctttaaataaataattttcattaattgaataagcccaatacaaattgagtctaaataaaactatcatggtggtcattttatttttagaaacctagttcatttaaatatccaaagttaaataggctcctgtatgtatctaagcttaaaagcaagcatataggctcatataaacattaatttggatgggtcatatcatgttactaggtttatgacacagatcattgatttggatgggttcaaaattttctttcatttgagtcatgaaagtggcgagttggtcatggaagttggtttgttcctcattaatatctcattcctccatgtgatatgctattgctcttgtgtggattgactgaacgataaaggtcaaagcactttgctcggtttcagtttgtcaggaccccacggtgggcgctaaattgtaaatgttaaaatccacaatcaatccaagatgattgtacgcgggcattgacaacctatagaacaaagaagagagtaactgggaaaccttgggacattgagatggtgccgattaaagggacttcgacagtcaagtcagcaagattgacaacaatatagtaaaaaagacaaaaataaatgagtgaactaagttaccacctatcttatctgcagaaataagtatgtagttttagagagaatgagagatttcacgataaatcagaagtattgcgatgattgattttgatctgtctctttcagtggctgagagtggctcttataggcatctatggaaggacgttacttatgaccgctcaccccttttggaagctctcctctcccactttatgaggtggatcgttatttacgtggtcagtttaattgcccactttagaaattgttagatgagtgataagactcagtttcatatacaggtcagatcattgtgagctcaatgttgggtcatgggtaatgttaatgtatgacttgattgtatcgtttttggcctgttgagcttggtgttttgatcgtaccatcataattagtcaaatagtccaacatgatcttatttgagcattctttgaaaacatcacataagagattgggccttagcctaattttggcctttacaccaagcatggtggtcaagtggcttccatgtgtggtggccgagtgacttgccaagcatgttagccgagtgattttcatgcatggtggtcaagcagcctaccaagaatagtggccgagtggcttccatgcatggtggtcgagtggcctttatgctaagtggctcgcaggacatgcataatcatacattcggagcgatcttttgggtgtgtgtccattgatcttttggttaagcgccagctaatcttgggacttgaccttgctaattttcaggatttatagtatattatgtcatttttattttcttaattactattttattggttaacataacatttttctcgttgctaatttttaatatttattaacttttttatactaaattatttagattttatttgaattaacttatattggttgtctggttttcttttggatctcttagtaacttttaatttaatttctaaatctattaattggaagaatttttattttaaagtgtttttattattttaattttcttatttttctctctttgaataaacttaattttgtataattgctttcatttttcacgtatatggtatattaatatcttgagtattccttttggattatttatgttctatatttgttttttttgttttgctttgttttttttttcttttgagttttgttggctagtttgtgtcattttattttggttatcttgtactatattatttagttagtttgtggtatgttgttggttcgtttgtttatatatacaaccttaaagagtgttattacatatttttacatattagtttgaatcttgttttttaattttgttttaataaatttggagaaattttctttctattattttatttgattgttttattatcattatttgtaagctaattaagttttgttatctttttttttttacaaaataattaattttagttagaatttgatttattttcattaatctctcaaagtagaggttatattgactagtatatttatgccttggaagtcttagctctaataattggacataacaaattaatttcgacacaatggtgacaatcttagtcaaaaaaaaggcctttaagataagttttttcttgttaaaataataataaatttacggcaaaagtctccaaaaatattgctttgatatatattagtttccatctttcagaaatagcgataatagttcccaaagtcacatttttttgtaagtttatcggtaccacaatttaatagctctgttaagtgctaacaagaagggcacatgtcaaaaatttattggttcacatcataaatttaattaaaaataattaaaaaaataaaataaaataataaaaattattaaaataaataaataaaactttaatatcctttttatttctttttttttttttttctgggattctttttatttattttatttttattgttcatgtctctcgtcttctttttcttcttatggagaatacaaaccatgactattgaaatcagaggtccacgaacaagctcactgcccgttcgatccacacaactggcctgctatttattatttaatttttttttttgcaatctcagtgctcat

SEQ ID NO: 265963 - DNA, 536 bp, Cannabis indica
acataaaaatgtaattttttttagaaaaatacaaaaatgatacgtttatactacccacaaagtaaattttcattattacactttcgctacattactttcgtactattttattcaaaagttaaaaaaaaaaaaaaaaaattagtgacatatatatcaactcattactcttttttttcttttttcttttttttttaaaaaaaaaaaacctaaacgcgttcatatataaatcaaaattatacctctcgatcattacaggtaatgttcttaagtatggaggacacatctaacataccatagtaattgtgggaataggcccacttagtcacattatgggaagcaaaattacattgtcttacaacttttgataataggcaaccaacaaaaataagataagagtcttctatagtggctagtataattatcaatattccatcaaggacaaatatcattgagggaattgattaccacactagagttgctctccaaaatgaaaaaaacatcgcactacttctatcctgctacctctagagctaaga

SEQ ID NO: 265964 - DNA, 577 bp, Cannabis indica
agactgccacatcaccgtgtttgtgctttcctttatttagatatatagatatataacataatattattattattattattattattattattattattattagaattagaattgaatatggaattttaatggacataatttaaaatagattaaatattttgtattaaagaataccaatataatgtaaattagttgcatataattattgtgtagtcttaagttactccattaataataaattaatatgtatgtaagttactctattaataatagcatataataaatttctaactgaaaaataattaaaaaattaaataattgacaaaaatttagaaaataaagaatatggaagaaacttcaaatagagtgccacctaaactccttaaaacattcctttatatatttatatagataggaatatagataaaattagtatattgttttatacgtataggtttgttaattaaataagactaatggtatttataataggaatatatatattgtataagcttgataataaaataaatatatatctattctatataaagtgtgcctatataacagaattcttggt

SEQ ID NO: 265965 - DNA, 850 bp, Cannabis indica
aatgaaaaacataaacatttttcattatcactagccttggcaacattttgtatttggacaaatggtccatggggtccgtttgtccttcatacagttccatcaggggcatcctgaaacactccggcaatggtgcctcaatagttctcctcacacaaggctccatgtcctcttcttcagagtcggatacggcaccactttgttttctaaaaatcttttctgtgatatccatcaactcctcaattttacgttccaggcattgagtcttgtcacttaaggattctcttctacgaacacgatcgtcgatgtgatttctcaaatcattattgtggggtcttactttttcagctttggctcttttcttcttggcatttaatcttctttggagatcattagtggaaaggcttccgccactgtcatctgacaatggatgcacttcttcaacatcctcgtcatgattattggaatcactaggaggaggtgtttcttttcgagactctagctcctgtactccaacatctatcttgtttttctacgggactctgcctctagaattggtttggtcaccgtgcccttaggcgtggtttcctttcctcttctgttgaggttagtcaccagctttagactttttaggctattttgcagaaggagctttctttggttcttccacaatgattcttttgcgtttgtctttgtggacgcctaaagctccaggatcttttggatttgctttctcaggtgcgtctgttgttggaggagctacacgtcaagagatagttttgttagggcagtggtcacaacctccattttggtcatcttactgttgctataattttaaacactacgcaagtat

SEQ ID NO: 265966 - DNA, 703 bp, Cannabis indica
agacctgggacccaaaattagaacctaaacaagaatcgcagaactaggaccctagaacaagactacgaccatgactaggacacggacccagacctagaaccgaagacagaactaacttcaacccaaactgaaacttgaactcgtgttcagacacggtcgtgtacccattccgaaactgagacccggacctggacctaaatctgggacccaatcccaaacacagactaggacctagatagggatcgaaatgctggacatagatcttgaccgagatcctgacacagacccaaacttggacgggcactcgggacccgaacatggacctggacccgaaccttgacccagatcggggtccaaacctggacacaaacccggacataaactcggacccgaactcaaacacccacacctagaatcagacccaaagctagacccggattcggacctaaactcgaacctagactaagatcagaaccaaggacttagacccagaactgaatccagactcagatcgggattggaacatgggactcggacacaacctagacaaagatccaggaggcgaacccacacccggagcttgatatggatctagactgaaatccagacccgaacccaaactcagaccaggactcgaactccaacccgaactcaaccccaaactcgaactcagaattgcaaatggaactagaaccgaactagg

SEQ ID NO: 265967 - DNA, 586 bp, Cannabis indica
agaattaactatgcaatttaatgtagggatttttttggtctcttgttcatacatctaaggaggcctataaatagagctacatccatttcatttgctcatcccatcacaagctattccaagagtgaagagtgaggcccttgagagaaaaatagtgagaacacctcttagtaggagaaatctaagagagaagaagagagttcctacaaaattgtgagaaacattttgtagagagatggtgagattactacaattagtgagtgtgagagttttgagtatattcctcaagtatttgtcaaaacttaagagtgtaatattgtgtacccattattattgttataaatgaagatttaccgtggtttttattttccacgagataatttcttggcacgcatttagtgctctttgattattattcgtaaagtactatttccattggaagatatctaaaaattctgaatatgctttgtgattgcaactgtaactgatctttcacatcaagaaagaatttcaaagactccattgtattttccgcaaatattgatcctaaagggaaattggaatactactggaaggattgatagcgttc

SEQ ID NO: 265968 - DNA, 524 bp, Cannabis indica
atcaagtggtcgaagttctagaatcaagggcataaaagttgggtaagtatgatgaaaaaatgcaactcgttctagtaccaaggtattggaacggggaacatttaagaaaatactaccaatagaagtaccaggtcggatgaccatatcaagtactaaataaaagaacatttgccctgaagtgaatggccttctgagcggaccacgcccaaaggttcagataaaatttttaagtactcaggttggatgaccacctttgaaagtacgatttttatcttcaattttttttgttcatgttaagctaaagatcaggtcaaatcaacataatagctttgatgtaggttactacggtaacaaacatattttcgaccaataaatgaataaagatttttattaaaattccaaattaagtcgagtttattagcatgttattaatttaccatccagtgcgtacaaagggtttggtcgaatccaaaaccccgaacagacaaaaaagcatacttgtaaaaaaaagtgaccaagagtca

SEQ ID NO: 265969 - DNA, 629 bp, Cannabis indica
aataaatgcaattaataacaccaaaattcgtaataaatgtagataaaagaccagaattcaaagaggttcggccccggatgtcggtaatagtctactccccttgagttttattaatttgagttgcaaaagtcaagaacaggctcttgattgcaaagaatgagaagtgtttatttttctaagtgtttctgattgcggatccccctcccaggtcatgggtgaccccttatatagggaaggggggtcggtgcttctcgcttcaggagacgcgatcaacgtggagctatctcaaccgtctccttgattttcggaggcggctggagtctgatttttaggataatatctcgctattttcatgggttgacaactatctttgagcctttcgcgggatttgaacatttgaaggagtcactgatgacaagggtcccttatgggtgtgacatggtcgtcaaccacctttgaggattaagcccatacttgggggtaacacccccgggactctcactaaggggggatgaccaccatcatagttaggtgatcccccaagacccaactttaaagggggggtcccccccttaaacccaacttggagttagtgaaagattatgactgtgagattctctatcaccctg

SEQ ID NO: 265970 - DNA, 2373 bp, Cannabis indica
actgtaagtgcagagaagatattaattacaccatgtaaaaagaaagaagtacttctctttaattattttgatatttgaaaacaggttgaagtgtatggatccatagcctatgtttctcaaacttcttggatacaaagtgggacaattcgtgataacatactctatggaaaaccaatgaacaaaattcaatatgaaaaggctattgaagcatgtgctttagataaggacatcaacagtttcagccatggagaccttactgaaataggacagagagggattaacttgagtggaggacagaagcaaagaatccagcttgccagagctgtctataatgatgcagatatctatctccttgatgacccttttagtgcagttgatgcccatactgctgctactcttttcaatgtaagagaacagaaatttgaaccattttgtatgcatgaaaacatgagatttgtttctgattatacactttttgtttggtaaaaaatatgcaggattgtgtcatggctgctctcagaaataaaactgttattctagtgactcatcaagtagagtttctttctgaagttgataaaattctggtaaataatattcatgaacagctttggaagtttttacttgtttttaattatctttcaatgaatcagaattaacaacatcatagtctgaaaagtgtgataacatatcctgttaatgtgaaacactttgggaaaattctatctttttttgcttataggtaatgaaagatggaaacattactcactcaggaagctatgaagaactcctgaaagctgggacagcatttgaacagcttgtgaatgctcataaagatgcaatctctacaattggtcttttgaataacgaaggacaaggagaatctcatatggtagatgagttaagaacagaggagagttatggttcatactccaaacaaaacactgaagaagaaatctctgcaaatagtgtaccaggagtgcaattaacacaagaagaagaaaaagagattggcgatgtgcgttggaagccatttaaggattatatccttgtctctaaagggtcgcttcttctattcttaacaacagtaactcagcttgcttttttctcatttcaagctgcagcaacttattggttagctctagctattcaagttcctaagatcacaagtggagtgttggttggtgtttatactggaatttcaacacttagtgctatatttgtgtatctaagagccttttttggagctagtcttggaataaaagcttctaaagctttcttcactggcttcaccaatgctatttttaaagctcccatgctattctttgattccaccccagttggccgaatcttgacccgagtaagccttgaaagaaatctaccctttagcttagtgacatgacatctcattattttatttttatttttcatcacaggcttcatcagatttgagtattcttgactacgacatacctttctctgtcgtttttgtactggctggtagtactgaacttctgggaacaattggcattatggcttctgtcacatggcaagttcttattgttggcattttcagcctggttgctagtgtatatgttcaggtaagcataaaaaccttacttagttcattgttctttcttctttctttaataatagagtgatggcagctaaaatgcttggctttttttattgcaagggctattatctagctactgctagggagttaataagaattaatggaacaacaaaagctcctgttaccaactttgtatctgaaacatcacttggtgctgtaacaataagagcttttgggtcagtggatcgattctttaaagattacctcaaacttgtggacacagatgcagtcttgttctttctgtccaatgcagccatagagtggttagttctaagaatagaagtacttcaaaatttgacccttttcactgcagcattcttccttattttacttccaaagggtcagatagctccaggtattattcccaacacctttttatatatgttcttactttcaacactgaaacttgggttcaatactaatgatctcagaatttattgaatgttttcacttgcaggacttgtggggctttctctttcttatgccttgtcactaacaggaacacagattttcctgactcgatggtattgcaacttagccaactatattgtttcagttgaaaggatcaaacagttcatgcatatcccagaagagcctccagcaatcattgaaggaagtaggccaccttcttcatggcccaccatgggtaggatagagttacaatctctaaaggtaaagtaatcaaatctcattggagtaataatgttagcacaataacttgtaaccaatcaattttcact

SEQ ID NO: 265971 - DNA, 1215 bp, Cannabis indica
ctaattatattgaaatgggttttatttagggcacaaaatccaacattttagtcatttttattttattaatttgtaaattatcgctttatttacctatttttaaggaattttagggatgtaagctctcgtatataaagagccttagtaaaaccctaaaaccctaaatctgaagtctcaaaccttaagccttatgctctaagtctaaaaactcatctctctctctctctctcacatgcccactgctatactaatacttgagattttccaactctgattcccacattataatcctaagagagctacttcagatcccattgctaagtgatctaagtagtgaaatctctcgatatcaacaaaactatatgggaagtaggtcattacccgctaactaagggggcctaattgttctaattgtgtaacacgtggcaagcatcaacgttaaattcaacttcggtgtcgattggctaaatttgaggtcaacaaaaggtaacaacaattcctaatgctattacgattaagagaaaattggagaactaaagggaaaagataaatgataagcaaaaggccaaaagtcttttcacttcttcatttctttctctaattttgaatgacacatactaataggattaggattccaatgctattaatcctaatgccataacaaaaaataagaaaatttcaagtttttaaagaaaaagataaaagataagtgaaaaagaaaaaagataagttttttcttctttgtctttgttatttatttttaaaaattcccaaggactaagcaaaagtgttcaaagttctaattaaattgatatttctttaagaatagatacaagagcctaagaatgtcaaaattgatgcccatctggtagtttcaagcgaaacgggctcggttcacgtcaataatcaactccacacaagtataaagttgacttgggaggaaatgttaactcaaaaactttccctggtgatgtgaacatcaatcttttacacatggcatgaaggatgacatcacgaagttgagtagacccaagtcatagtagtcgacctgggaagggaaactagccctgcgcccatgtggactttgggatctccaggatggaagttcataattcaataacttgaatacaacccagtatcattcagtagtttgtaccgtgaagacatggaggaacctgatccaaggctcgggagctgaaattacacgaacctgca

SEQ ID NO: 265972 - DNA, 664 bp, Cannabis indica
caagagagaagaatgtgcctcagtataagaagaacaaatatggtcaatacaattatgaatattaggggagcagttgttgtgtaccacgtcattgcgcaatctccatatattgtccacaacaatcgaggcataaaggaacacatcctctactcgaatacccctcttattaaggctccaaataaacttcacccaatcccagactctaataccagtgtcacccacagggaagatccccaaggagacgagcgccataaatgcatcgctacatcgcaggtaagaaacaaatgttccattgtttcatcacccaaaccacacaacggacagatggaatcttcaatctgaaatcttcttttaatcactgcacgaaccgggagagcttgggagagtatacaccaccagagtaccttatgtcgctccattatgttactattccatagcttatttcaaagagcaggggcgacattacactgaggagctctctccatggcctgggccaaataagccgatttgctagagaaatgcccgttactttccaaggtccacaaccaaccgtcatttcccgagccggggggggggcaattttaggattgctaacacagtctcctgatcgaacagactttttagcttaagaatgtcccacccacccgtaggggataggagatca

SEQ ID NO: 265973 - DNA, 543 bp, Cannabis indica
aagcttgtgtgtataaaaatgggtttcagtaccaaagttcagagtttgaaccaaaagcgaatcaggaaaagagtaatcgaagaagatgaagaagaaaacagttttattttatttatttaacaaacgacagcgttttaataccaatctgatctgtcataactttttctttttgcatgtaactacaaaaggggagttttctctctaattataattacactgtaattattataaatttttcattttaaatattaaccactaaaatatattatttttacatgtaattagggttagaaatttatatgaataatatgaacaattatatgaaatgtgaaataaatcgaacataatataatataactgtaggatcgattctcccttgagtgagatgttagttgtttaagtgttagtgtatttttctttttaatttttattttattttatctctcttcaacattatttttttggcactcttatttttaaaaatactccaatgtataacactttttaaaaatactataattataatttcacacattattaatt

SEQ ID NO: 265974 - DNA, 747 bp, Cannabis indica
ataagtcgggaaactaaattatatgttaaaaaactaggctaactaaagtgatgagaggattattgtttgaccatatatattagcatatttaactatacatatatatatgtacatgtaatgtgtgtatgtgtgtgtttagtcattagctcatccatataatctcagacttataatatcactcttcattgatggtccgctaacatgttatggccactcaactcataatggatacatacctgggcttgtagatgtggattttgctgatgtgcgggctataatggctcttcactgatgggaatacgaactccaacaagtgatggctttatgctacaagcaactaaagtatatgttaaaattctgatattatgacgagtttagttgattttataataattttcttttctagaacaagatccacattaatcttttttgtcatgacttttcattatagcaacttcattgaacactactttctcttgggtagtaaatataattagaattaaatgaattgaacttctcaaaagttatatatatatagttggagcatcaaagaaatatcatcattgggatcaatggacctttgtttacagaaatattatgaataatttgtgttatgtgattgtttaccttatttaagtttctcaaaatgctcatatgtagagctattaatcctgtgcctgcggtgcttatttttgagtagataagaataggacaagagatgctacattaaatgccattcaatctcct

SEQ ID NO: 265975 - DNA, 534 bp, Cannabis indica
catcacagtaaacaacgaacttttcttgatctaatggcaaagctaacaccggagccgatattaaacgctgcttcaattcctaaaaacttgcttcacatttatctgaccacagaaatcgctgattttgcttacttaactcggttagtggcgtagagattttagaaaatcccttgacaaaacgtcgataataccctgctaaaccgagaaaactttgaatttctgtcactgattttgtccttggccaattcttcaatgactcaatcttgcttggatcaaccataatgccatactttttgaaaataagccccagaaaagatacctctgacaaccagaattcacactttttgaactttgcatacaacttgtgatcccttagtcgctgcaataccattcaaagatgatgctcgtgctcctcttccgattgagagtatacaaggatgtcgtcgataaacactatgatgcagttatcgaggaagtccttgaatactctattcatgagatccaaaaaggtcataggagcattagtcaatccga

SEQ ID NO: 265976 - DNA, 959 bp, Cannabis indica
gcgaaggtcgccatgtatcttccctaaaaccacgtctccgcatacggtggtgcgacaaggtttctgcactaacaataattcaattcaatttcagaaaccaaaccaaaaaacaagaaattgataatgaaagttaagaatataacgaacctgaaaggagtaaggaagcttcaacataatcatcccgatcaggatcaccaccaccaccaccgccattattagtagatctagagccagaggaagaagaagaagatttacagagaatgagaatagggtttctgttgtaacgaaaacgacaccgtttggtacgaaaagccaactgaaacgaacaactagaagaagaagatgatgatgaagtgatcatcatcgaaggagtgacattactagtttgatcggagaagaagatccccattccggtagctgtacggaaacttaactgagctccggcgccggcgaccattctgagatttggggtttttttttacagttaagaagtgtgaagagagagagattatatgaatgtgtattgagctaaggaagcaaaccaaacaaagtagtatgattaattatgacgtcattattttaaaataataatttactgcatcaatttaatttcccttattaataaatataattcttaattgatataggttattaattatttaatatactaataaaaaaatgataatttaaatttaaatatttattaacaaaattaaatttagatttttatattaattttatagaaatattaactttatttattttatctttttcttttagttaattagaatttttaacgaaaagatttttatttaattttactgacagaaattttacatgaatgaaagttcagtaaacgcgataaagtatatgttaaacctcgaaaatataatttgatagatattattaaaattttaattttaagtgattttttccgagaagtataatttaattaaatt

SEQ ID NO: 265977 - DNA, 1798 bp, Cannabis indica
aaaacgtgttctcattaacaattttcacatgatattggcacttcaattcgataatcatgttccatatactacactggttcactcagctatggtaatttagtattgcatctctcttattttttttaaaaaacaagtaatatttagttttttatattaagaatattaaattttaaaataaaataaataaatgtaatgtatttgggccctccacgtgtctatatttatgagttaataacggaagtggtagtaacggtgtaagagaattgtaacattaggtatttttgccaccaaaaataaacattaaatatttaagtgtataaaatcaaaaacattagatatttatgccgcaattttcccattatatttttatataatagattttgttcaatttatctattaataaaaatttctattttttctaaacaaaacaacataaaaatctctttcaataaataaataaaagttaaaaagtgaagaagaggtggaagaaaagaatcaatacgtttattggaattaaagaaaaaaatttagtgcaaggacaaactccaatggctgctataagaaaagtatttcatatcctttcgttaggtctacggtacactttcttgtcctctactggtacaacatgttcttaaagtggcgtttatttagaggtaatgaaataaaatagaatagaaataaaataaataacttttatttcattcggttttattttaaaatatttaaatgtcattcctattttagttatgttttcatttctttcaatcaaacacaacctaataaggtatttattatgtgaatttgagttggagataataaatttgaagacagtagactttgatgaaatatgaaactcatacgatgaagagagttaacattactactattttaatttaaaaaattaaatttacttacaaacatcaattccttggtcgactcattaaattttaattcaatttttatattcttattcccatcaagtctttatcccataccaaatgctcccaaagtatactcaagtatatttttttctaattttttatgatagcttttaaggtagtcacataattctttgtcaatcttataaaaatttcaaaaaatttataatactaaaaataaagtttaaaatagttacttttacacgcataaaatcatgcgtacaataaattatttatactgtaatttttgtactgtcaaaatttttaaaactgatagggaaccatctatctattaatgcaataagcaacacaaaagtttaagtagtttttaaaagggtaaatattattttggaccctatgttttgcaaaagttaccaattggaccctctgttttgtttaataataatggaccctctattttgttaaatggtaaaaataggacccagctcaattttaacaattttattttttaatataatcaactttaagacaatttctaacacgaacagatacaaaaaatataactagttttgtcataacatctctagattgaattattattaagttttattttgaaaaaaaatcagttcatggtcctatttgtataatttaaaaaatacagggactattttgttatataacaaaataaaagatccaattaataacttttacaaaatacaaagtcctaaaataatatttatcctttcaatgacaatattaattgtgtttaacaatttatttcttctatttttcgagtgaacaattttgaagtgaaaaatggttttgataagaagatattttgtattgaattttatgttaaccaaacttgaccaatatgttcttaaaaagaaaaaagaaaa

SEQ ID NO: 265978 - DNA, 730 bp, Cannabis indica
actggaactaggactgggacttggaatcataactgaaattggacctagatccggaaccgtaaccggaccaggacccggactccaaatcagaccttgacccgaattgcgagctagacccggatcccaaaccaaacctggactcgggacccgaacccgaacctgaactcagacccaaacatggaaatagagtagggacacaaaaccaggttcgggaccaagaaccgcacccgagtatcgatcccgaacccaaactcaaaaatgggactttggacctgaaccagaaccagaccgagacccgtgacagtgatccagatcttgacttgggattcgagtaacaaggcctggaaaagaccagtagtcggtgtctagatcagggactcagactaggaccagaacccagacgatgaaccaaacccgaacccagacctagacctgggacccaaaattagaacctgaacaagaatcgccgaaccaggaccctagaacaagacaaggaccgtgaccaggacccggaccaagacctagaaccgaacacagacctagcctcagacccaaactgagactggaactcgtgcccggacacggtcgtgtacacaccgaaactgagactcggacctggacctaaatctaggacccgatcccaaacacagacttggacctagatagggatccgcatacgaacctggactcggaccaagacccagactgggatggaaatgctggacctaga

SEQ ID NO: 265979 - DNA, 718 bp, Cannabis indica
tatgtataattagattatgcatgtaataaacatcttcattaacattttgtttaccataaaaagagtttatcatatcacaatgatgatcttagtagatcagcctgaatcctgactatacatgaacttctatttgtgttcattgagttttttgattcactcgttaaagtttctcaaagaagatgattcttacaacttctgttttgggagcttaataacatgagtgactgagaatatgttatacaatagtggaatccaagctttcttaacggatcgaatattagatcccttacagtgttaattatggaagtgctaacagttggatccaaatctataataagttatagattaactgttcacattgaattaatggtacataaggaatcaagagataattagaagggtaaaaagtattttgaccaactctcattatgtactaataattggagggcaaacttcttatattgattatatcaatgaactataagtaagaatctgtaaatataattctatattgtcaaagagtgcaattccatatttatagtacagtaataatagaattaataaactagattattctattgatgagattgataataatcttgaatttattggagcatcgaaatatatgtccatggtccccaagtcacctctatacaacaatgtcaggaaaaggttttatttgatgaatgaatttcgagtgagaattaatttttatgga

SEQ ID NO: 265980 - DNA, 519 bp, Cannabis indica
tttgttagttattatgtatgattaggttattttaactattaatataaatagatatttatttttatttaattatttatcacgtagtttttttttttttttttatttttatacttcaaaacagtttttttatatatatttttacgaaattacacacagaaactcctatagcaactaacggagcaacttaaatcgcaaccaaaatccacataagcaacccatataggaaccattagagaaactgccatagcaacccaaactgtaaattttaaaaaaataaaaatagtatatgaagtaattttcctatttattattaaggtattatgtatatatttttttaaaaagtaaaatttagaaaatatatacgtgcgtaaatttgaaaaaaaaaaaatactattacctatgttgatataatttattttagttagatacttttttgttttttattattattattattagcttaattggaggtttttaaaaaaataataaaaaagtaaaaaaaattagagaattaagaaa

SEQ ID NO: 265981 - DNA, 813 bp, Cannabis indica
ttttaggaaagattcgttacataagtctctaagcctgagacataaatcatatcacaaaattgcacaagaaattatgccttcaatacatctctctctttttttctggaagtataatacatctatttttgaagcctgaatcattgtagcctctttgagcttgcacaacctgtgtaatagttcctacatagtcttttatcagagtatcccctgaatcagtagtttagaactgttaagccttttcaattatgtttctgataagtgcaaccacagccttatctagggacccaagtgattcaattttcttataaaatcttagagactatgttgactgcactcatttaatttggctgtcattcaccactgcccctcctctctctatttcttaagatataggatctgttgccttcaactaattctcattcctactatcctttgacttctataacctccgtacccatttctgcattcatggcatttgtatgatttattactttcttaattttgcagtatggtcccatacacgatcagatatctcttgtctgtttgaactagctgatgttatgctttaacctcaagatactatctatggcttacattgtaacttccataatttcatatcagtttatgaaggtttgaagtctttttacaaagaagaagatgaagctgttccagtgaatgtttatgggaaatcaaaagttgcagcagaacagtttattactgagaaatgctctaattttgcagttctgagaagcagtatcatctttgggccacagacaatctcaccagtaccgaaatctcttccaattcaggtat

SEQ ID NO: 265982 - DNA, 1944 bp, Cannabis indica
ttttttttttcaaattttacgatttcgggttgtttttgtagctagtttctccggtagtttctatgtgggttattatacggattttagttgcgatttaagttgctccgttaattgttatagagatttctatgtggaattctagtaaaaatatatatatatataaaaataataaaaaaaaactgtttttaaggtgtgaaaataaaaaaactcctataaaaataccaaataatttattgacaaaataaatacactttttttttttgctaatttaatcattgtatgatgtttaagatattatttagtttctttatttatttttattaaaaaaaagacttgttgaaatttctctatgaaataagcttatataaaatatagggaaattttgaaaaatactttttttttatatgtttatttataattttacagcctaaaaattttatttataaaaatatggttgtaaaattttaaaattataaaaatacactttttttagcaaaaagtaagaaaacaactaaaagtcaacgataaattaacctcacaataactattaatcaactataaaaaataaaaataataagaaaaacaatctcatgacaactataaataactcaaaaaaaaaatagtttattatttttgctaaaataatatttttgtaaataaaaaattcaaagcgtaaaaatgaaaaaaaaaaaaattgtgttgacgaatttttgtaattttaatagtatattatgtaattttttctaaaatatatatcctttgataacttttaggtatgaaataacaaataatttttagaagtctataactagtacatattgaattttgtttaaattattggctacttttttttttattattattaacaaattcaaaagaaactacaaaattgttttttgtttaattttgaatatattatttaataataataaaaaatttatgcttctcacatatcaaatgttcatctcgaaaaatagatcacaatggtactaattttgagctcaaactactaacgatgtaggtaaaatttaatttttctataaattattttacaatatatcaaaattgctctacaaaagaaattgcaattatttaaaaaaaaaatatataaaaacaataaaaaaaaattacaaaaatacgattgtatgaaattttagatattttttacggtttttaagattttatttacataaaagacaatctttcgatgtattcagggccggccagagggtggggcggtcggggcctaggccccaggccccgaaaaaataaatttaatataaatatatataccaaaaaaatatgtaatatattaattttagtgtgatgtattaaataaatatattctggctcaattggttatagacttagggtgatgagttcgatccttttggatgtttaaatttttttaagttttaggtatataaatgaattttatatatagttatgtagatagttagagagttaaaaaaatttagagattagaaattttttttattatttatttaagataagaatataatattttaaaatgtctttaatgcattacttaaaaaaaaatatataacataatatttatatatatattcattttttattctaccgcgaggtgttggggttttcttttaatacatttttttttatttacaaaattgctaatatcagggccgactttatgttaatttgggatttgaactctcaatctcttaattgttaaactaatcaaattaccactaagctacaacacatatttagcattaaaagtattattatttattttattactaactatattttattttattttttcgaaatggggccctgagcggtggggggcctaaggcggctgcctccttcgtcttagctcagggccggtcctagctaatatatagagcatttcaatagcaatgctattataatcaaatattactttaaattagctta

SEQ ID NO: 265983 - DNA, 611 bp, Cannabis indica
aaaaaagtaaaaaaaaaaaattaaaggtgcaaaatcgggttggtcggttgaattgggttcaacccgcccaattaacagattgggcggtttgtaatttttttgggttatttcagtttgtaatttttatcggttttttcggttcgatttggacgggttattcggtttgggcggtttacgaattttttttgtacaaccctaatgtatatacactaatggagttattttttttctgttttaagttaacagtcgactttgttgttttaatatttttttttgttattaaaaaaatatatatgttaagaaaaacatatataattttaaaaataataaacaaaattagaatgtgtcataaaaattatattatgttcataaaaatgtgttagcatgtgtaatttatgacatttggctaaactaaaatttgtgtataaataagaaaatatgtatgaatctaaattgtatagagagtagcattaaagagaatctcaaaagtaaatttaatcttgtacaagaaaggaagttgtttagcatagataaaattatgggagtatttcacaaatacacaaaaataacaaaaaaattacaaaaatacgatttcacggaattttaaatat

SEQ ID NO: 265984 - DNA, 584 bp, Cannabis indica
gttgataaatgtaaaacataccatttcggtatacaacagcagccaacattccagatgttcctcgtcgaaatccaagctccagatctaggtctcaaaatgaggaagaacacgaaccagtgtaatcttctcctacacctccagttgacaacgtaactcaacccactcgaaggtctcttcttgatcgactggctgatgaagacatctccagcccgttctttctcagttcagccaaccatccaggcctcattcttgtttccatcgtcctcaatggcacaaactttcagtcctggaaaagaggcataacaatggcgttgacagcaaagaataaatctgcattcatagatggcacccttcctcgacccgcatctggtaatcctctccttaactcttggaatcgttgtaatatcatggtgatgtcttggctcataaactctgtctcttcagaaatagcacagagcatcatgtattttgatcttgctacatatatgtggcatgatcttcaagaaaagattcaatgagggtaatggacctcgaatctttcagttacaaacacaattgacctgtttgcaacaaggtgatcaatc

SEQ ID NO: 265985 - DNA, 606 bp, Cannabis indica
atctacaaagagataagtggtagcagtagtagtattaataagaagccagataggaaaagcaatttcagtgtgttttgaatttaaatgaaaaaaggtaatgattatgccattataaaatgttatggttaagggtggtagcttggtttctatgtggggtgtgaagtgggtgactgactatcatattggctaaggggaaaaagtcataaccaatgaaaatgaaagataatgatcattattttttcaatctattatcaatatctatatatgtatatatacacacattaagtaagaagggttactactatattgctaggggagggagacttaaaagggacttgtatttcaaaatttgaaatcttaggaggaagaaaaagtttttatttttttttctataagggtaggtggaatatccaaaggattcaactttagctacacttgggccacgtggaaggccttggaccaacaccatcatatacacataacaataatttctctgtttgttttatttgaaaacatgtatgagagaatgagatatcatattcataatattatataactttatttatcttcaaacttcaaagtcatagcctaacatttctcaaaaaa

SEQ ID NO: 265986 - DNA, 890 bp, Cannabis indica
aattatttaaactttaagaatcgttgtttatctcactctcttgctaaacaaacacgtaaacttattaaaagaaacaaaaataataccaaaataattttaataataaataaataaaagtaagtaaaaagaacaaattaaagtttggaacataaatatgatttagtttattttgtctgaattataagtgaccaatgtttgtattttaatatagttttttatcgtcaccagatcttaacagcaatttttatacttatattaattaatataataaaatagtattaattaatttaatattatgcattaatgcatcgtatctgaaccaaacaaaattaaagcttaaaatatatatatcttagctttatgggcggcgtaagtgttttccttcctaaaagataagactaaaattaattaatataacacatattaattaatcataattaattttcacaaaaattagaccaaattaaaggaaataaattctggtaataactttgaattaataagaagatcaacaatagtgggtaacgtaccatgttttaaatgcaccaaagaattatattgaacatggaatttagacaaatattaagatgataacctttgactgtaaaattttcttatttatcatttttatatttttaagattttcttttcacttttttctttgattttatgttccatatagtggtgtaattgataattaatattttgaacataatttataataactttgttacaaagaacatagggatatgcaaagattctctctcatgccattttatgttttatgtgcatgaatgtaataaagcttactttattcaaaaatgtcaattttttatgatgttattcgatgtaagttaaaatatcatgtctgtaaatttttaaaaaatttc

SEQ ID NO: 265987 - DNA, 819 bp, Cannabis indica
gagcattaaagaatactaacaaccgatctaaaaggaagtgggaatcaagaaatggatcagtctctacaccacgacaccacattcgacgtggaatggacttagcttcttccacaggtcaaattgaaacatggcgtttgaaacattatgatatggaaaagggatggactggaccagatcttgagacattatatgtaagtaatttatttattaaatttaaaattttgataagttttatgatgtttaaatactaactaataaaattatatacttagaatgaaatgaaagcctttaagggatcaacacactccagaagagttgtctgataaaaatattatggaacgtattcttggacgtcgttctgtacacttgcgagggtggggcggtcttttaatggtgcaagtggtacttcacaacgcaatactacccaacctgaacatccaacatatgaagaattactccaaaaacttaatgaagcatataaccgtcttgatagtactaatgaacgacttagccttgtcgtagacattcttcaccataacaatctcatgcctccacctaatgtacctccatctgatcaagcatcaggtgcacgtaatagagattcatctgaaatacaagagcaacaatatgatagctaggttttgttacattttatttattattttgaatttttaaaatggtttgaactttatcaaatgttggaacatgaatattgagctcaattagctattttgtcattatttttaatgaatgaactaattattctcattgttatagtgtatttatttaattatttataagaaaattaatattattttg

SEQ ID NO: 265988 - DNA, 902 bp, Cannabis indica
tctagaaaaatataaatagcttgcaattacataataaatgtcaattaaaaaaaatgtataggtatactatccgattaggtcgggttgaaacaaacaaattatgagtttgactacaaatgagtgatgggcaaaggaggaattcctagttaagtaatacaatagtaataacagagttgaaaactgccttacatttcgtccttttctttgtttttggttcaaagtctttataatacgtttattcttagactcagttcttcatgacatcataatttgtttctctttgagattccacccacaaatcatgctgcttcttttcaatgttgaaatgtggatatttaccggaaggggccagatttgagattttattttagacatgggggtaaacattaaaagaagactaatttgccacagtaatactcagttattaaattctggtcatatttaaatgctaagttttatttttgaccatacaattatgttttgttacatagttaaaatttttgtatttttttttttgttgttttgcagctattttttgtaaaatttttgtaagtactataaatattagtgtcaaataaaataccaaatattatcataaattacgctttgtaaacaaaaatttaaattatttgacacattattaaaaaaatatatataagaaaagacaatacatacaagttgtaaaagatatatatacataagtaaaaaattaagttatacaaccaatataaacaatattatattaaaattaagaaacaaattatgttttgtgtgcagttctaatattttttatatgggaactataactacaccccaaatatttaattatatttttttcttttgagaataaactgttttatattaaatgatcaatattaagatacaacatttcaaagaggagg

SEQ ID NO: 265989 - DNA, 642 bp, Cannabis indica
taaactacttggtcacttgaggggtagtgggacataaagcatattactcataaggttagaatgtaaaaaaaaagagcgtatataaaaaaagagtatatatatatataaaaaataaaaaaaataaaaaaaaagagccttggggataggctaataaagtgtctcccttgatagtaaaaaaaaaaagtctcacgaacaggctaataaaaagtctccgcaacatacaagaaaaattaaaacattagaaaaaattccagataaataacaaatcaatcatctattggaggaaggcgaggacccaagtctcaacaagattgacatccagttttttgtttttctcccaaaaatgggtcagaacagcttcaggtttgggtaagaaatgaagtttagtctcaaatttgttaattagacctccaacacatgaagacaccatgctcaaaatgcttcacacactagtcacaagtgactggggctgcaagagccttcttagtagctttgtggcttcctggttggtcttctcttgaaaatcacaaagctgcttgagctccacagacatgctgactgcattctggatatccgtttgatggagttcatcaagttttttccaccttggcctgaagtaccttgatctccttcgggggtcta

SEQ ID NO: 265990 - DNA, 303 bp, Cannabis indica
gttaaggtactatattctattataaatgactcacttaaagatatttaattaactaatatttagtagagaaaattacacttactatgagattataacacttttaagtttgaccaatttatatgatatttttttaattttagttatttttatagtatttgatatgtgatatatatatatatatatgtaaattaggtttccaaatcccatatttaatatttttatttgtttagccagttttattagtcactcatgctgaaaaaatcatcagagtttgctgtcgatgctggaaaaaacacaggagta

SEQ ID NO: 265991 - DNA, 502 bp, Cannabis indica
tttattaccaaaacaaaaatcacaaaattatttgttcatattatcactatttattaaccttttgtttctaattttctactaatgtttttgtccataatcgcctccctgtggaatcgaccgcccaatctatactacaaccacggctagtggtagtcacattttgggcgttacacaaccagcatcccagggagaatgcttcaaaatttactgatttctcagtcctaatagatgatatagaaacaatctatgcaagtaccaagatccgaagaccataacggtaatgggacaatttttggtcaccaatgtcccttaagattttaatgtcttgttaggccaaccagccctatatgacttaaaacttcacatctgtaacgccctaaataattaggcacgctacccaaaatacttataaagccctaatcccctaaccgggattactaattaaaatagcgcagaatttaaacttttatattaaacagactgaaaataaacttgtaatata

SEQ ID NO: 265992 - DNA, 1391 bp, Cannabis indica
gtagtatttttcgataggagtggtatctttttccatttttgatgctagggttttagagcagtgagtaaattatttaatgaggaatttaattaaggctaattaggttttataccctgaactttgacatgtaccaaatcatgccccctaaatttttaaggctgttaaaaatgacctcctaaactaatgagattgttggatttaaggacttttgtctaattttactagaaaagcctaacatggatgaaagttcaggggacatgatattagcacatgtgaaagttcgagaggcataatttagtagatatcaaagtctggggagcatagtttagtacataaacaatcactgaaatagtaaaattgaatgaaattagacaaaagtccttaaatccaacaatctcaatagtttaggatgcatttttaatggccttaaaagtttaagagacatgattttgtacatgtcaaagttcagagggcaaaaatcataattagcctttaattaaagttgtgaaaaataaaacaaaattgcactagagaccaaataaattagcgcaaaaataggaaaattttatgttgtataatgcaaaagggtattcgccaatgacctaatttctgagtgataaaggcatttatacctatttttgatattgagcaagcttgcatctttgggtcttcagagaatgaatagctcgatctacgtttgtgatctttagtttcttcacgaacaaattccccatctcttcgatgagctcctctatacatcccaggctctatttgtgcccagctcctcctcctctgaccacctgctaatgatttgtgccagagacgttttgtggtctgggcagaggttgtcacgtgagtgagggaactaggaagagaaagagtgactgagagagggagaagatcggggttgaacaacaccgtttgggtgaagctgacggggggtttcaggattaatggcagcaagagagatcgacgagagagagggacgggggtttcttgaatggggtttcgttcgagggtcgtttcagcgtgaagatgagagaatgagagagggttttggggagtgtgattggttttaatctttcattatctcttttgtctcggttgagaaccgagacttaaagaggttcgataacctctaaagtctcgattttcaaccgaccttgtatagttgttttattattttttttttaaatgcttttaaatctcaatttagactttagtgtcgaattgctaactgacaccataggtttttttacatctctgttataatctgacacctaaaatcaggggtacgtctatagtgttggttttttaaatttaaacgacactcaaattgacactaaaagtatattttgtagtagtgtctgattaataataataataataat

SEQ ID NO: 265993 - DNA, 1665 bp, Cannabis indica
tgcatactccatacatccaacccaagcttactttaaccaatgccctggaaagaacataacacttattcaaggtacaagtaaactacgttgtagattatcatatcagttaaactctatgtactgataaatctaggaatacatttaatcacacaatcttaattactttccactgtgttgacaacacaataaacaagaatatcaatgtgataagggtttggatgaatttattaatcaaataattaaataaatgatcacatgaaccaaataacacattaaacaagtaagtaaattaaatctgattctttattgataattgaatagaaaagattacattgaaatagagttttatttagggcacaaagcccaacacactccaggtccagtcttcaggaatgctagcctcactccgggatggagttcttgttggcttgttgtccctcctagaatggtagttccggatagtcgactctagcaggcgcattcctatccagaagcatcatcactgagtgtccttgattcgtgagtcttgaagctcgtatatgttcctgaaggctctaatacttaagctaacgtggagacttcgctcaaagaggagttggttaagttagtaattcctaactaacttaacaacctcgtttcttccagccaccgactttaagatcttgatcctaagcctataaatgccaccttgacttgttatttcaagagatgagatttagaactcaattcagatgagattgagagtttgagagagaaacgattgagaggttgagagagatagagaggtgcagagaaaagagagagattgggtttggggtttcgtaaaagaatcttttttagatgaacaagattcttgtgtgtaagagtgagagttgaaacacttagtgaagactcaacaaagaatctcatcttgactgtattgtacctattattgtttaatcaataaagaaggatctcagtggtattccagaactggagtagagccataaatcacatcaatctataggacttaaactaggatatatcttggtgttaatttcttggctaattaggatttttaccccctaaactttgacatgtaccaaatcatgctcccgaacttttaaagtcgttaaaaatgccccatgaactattgtgattgtagaatataaaggcttttatctaattttagtaaaaaaaagtctaacatgaaagaaagttcaaggacataatttagtatatgttaaagttcgaggggtatgatttagtaaatatcaaagtctgggaagcatgatttagtacataaagaatcactgaaataataaaattgaatgaaattaaacaaaagtccctaaatctaacaatctcaatagttcacgggaaatttttaacggccacaaaaatttagaaaacatgatttggtacatgttaaagtttaggggataaaaatcctaattaacctaattttttttaatttttgcctttactgttttctagtttccattactttgttcgcccttcttttcatccaattgttatttttgatttgataatcttgtcattgctaatcttttgattgtttaaagtttcgacattcttaattctacactattaattgtaattttcccacataaataaagaaaaatttcaaacatagtatgtactacatgcatcaccagaatgagc

SEQ ID NO: 265994 - DNA, 586 bp, Cannabis indica
attgtaggaaattattttatttattttattattttaatgaatttcttattttacttttttttttttgaagttcttttttaaaaaataaattgtcactacaaaaaaaaaatgttatttttagagataattttttagtcacaataaaaaaaaaattgtgactaaatatgatttttagttacaataaaatattactttcgactaaacatattattagacacaaattgttactaatttaattttagtaacaacaaatattgtgactaaaaacacatttagtcacaataaattgtaatttttgtgactaatacttatagccacgaattttttagtcataacgtaagaatgataatttataattagtcgcaactttttcacttttagtcacaaatttattgtgactaaaagtaaaattcttttagtgtgttagagcagagagaagatgaaaaaaaaagaaaacaattcttaaatgtgtgcttgtacaatttttttctcatattttgcttttaaatttaaacatttaaatctaaaaaaatatgtaattaattttttgaaaataaaaaatagattattttataaacacccaaaa

SEQ ID NO: 265995 - DNA, 1099 bp, Cannabis indica
aatctaggtcctggtaaaataaattccaacattttatggtactaaatcaggtacgcagcagaagagtttcgtattatctgattaacatcataccatatcccaatagatctccagatgtgtgtacattaaatcaaaacaaaaaaaaataataataagtttagagtacacctcttgaagcctattaggtatcctcaaaacttctcgtatgttgtatcccttaatccagttgatgagaaatttacaattggactcacactagtgtcttccaaatcgatccaccacacacaagaaatagtgtggactattaggataaagtgtgtaacctttgttcttgttgagttcttaacacatgagcaagaataactaagagaaaaattctttctttctttttctctccctatttcaaaaatagcaacaaaaaagtgaagttaatttctcaaattagactcctatttatagtagttaaatctttttaattaaattattatttaattatttaaattaataaatatctataattgaattcaattactgatatttatgaaggaatctctcaaccacttgattgaatatttcaacaactttcaaatatataactacttttcaaattagatatttacctaattgaattaataaaataattaattaatctaaaaaggcaaatctcatagggatagggacaagcataggcgcctaccattgtctttagggcatggttggtgtcttttgtcctgacaaatcttgtctcgataaattttgtcttaacaattttttgtcttttccctatcttattaatttgaataaattatttattcattacaaaaataaataattattatttttcaagggcaaatactattttggaccctgtgttttgcaaaagttaccgattggaccctctgttttgttaaatgataaaatggaccttgtatggtaaaataggactccgagtttaatttttgacaacttttttttaatataaccaacttgaagataattcctaacacgaacagatatagaaaagtaaaacagttttgtcataacacttttagatcaaattattattaaattttattttgacaaaaaatcagttcagggt

SEQ ID NO: 265996 - DNA, 764 bp, Cannabis indica
gtagagagggtttgatttattatttttcataattaatttctattaaaggaataaaacatataataccttttatataatgaagggtattttaggtattaaaaagtaaaaaaggacatttgctttattattttaaaaaaaggacattaactatctatcgagttagaaatatgatcatttacttacatttctctatttcttatacagatagtgccaaacttcatttataaaaatgggccagctttagtaaatacagattggatcggtccgcttcgttacttgtacacctttagctacagttatttttctcgtaaccaagttacaattactttttatctatacttttcaaaaattgaattttgcatgtaaaaaattatttttaaaaatgtgattggttgtagcgtgatttaatgtttttgagttttaaaaaaattgaacttgtaattagttgggaatctcaaaataaaaaagtaagagaatatttagagaactttttgattcaattatttgaaaatataaaaaacataaaaaaaaaattgttttcatttttttagcctaaaacttaaagtcattttaagatttaggggttgtttggtttcataacttaaaactgttttcagtttttaaaaacagaaaataacttttaaaaattaatagggtcgcttgaccaaaaaaattgagttttaaaaaattagaaaacagaaaacatcaaaatgtagtttttaattttcaaaaaatattttttttgtctaacatattatatatta

SEQ ID NO: 265997 - DNA, 597 bp, Cannabis indica
aaaaaaattacctgattcagcactaattgaaagttctgtaatactgcttctgcagaatcgattgatatttccatctcaggagccttaaaataaaacaaattattcatcaataaaatttcaccttttaaattaagtgtttcaagtagagcttaataataaacgcaagagaaggcaatttcaacttttgttatattatatagtattaggcagtattaggcattagtaacattgtttgcttaaagttgtatcagttgctaaccttaaatattaatttaaataataataataaaaggtaaatttaatacaattcttatattttgttaaatatataaaatacagttttaaatttatttataaaaaattgtatctaactaattaattttattaaatagtaaattaagtaaataactaaaaaaaatttgatataaagtatgattaattatttgcattaatgtcgaatttaaatttaaattaaaatttatataaaaaaaaataattataaattttgttgatatttttaaataattatctaaattatattttaataaataaattaaatttagtcttaattttttttaaaaaaataattacttaatt

SEQ ID NO: 265998 - DNA, 451 bp, Cannabis indica
taatcaaaatcaaaagtaacatgttagtttctaatctattttttttttgattgatattggaggatgaggattcgaacatggaacattctctttgtatcataaatgtaaactactaagctatgcttatattcacaaaatttttaactacaacaaaatttaatataccaattaatttaatagttactattttttaatgattatttcatatataaaagttactaaattatattctaattttacaaaatacttttcacaagtttttaaaataatttatgagaaaataagatagtacattaaaagtcattgaataataaatttaacatactaaactttacacttaaacaaaatttaatgtaccaactagttttatgggttgctaaaaagtatattattatttactagataatattctacataagtttattttatttttagagcaatttcaataaat

SEQ ID NO: 265999 - DNA, 4316 bp, Cannabis indica
aaaatagcttttagggaatatcattaactaatcgtagaatgctacctatagaaaatattagacaccactggtgcctgttgagaatcatggggttccatctcaaaccaattgacaatgagtggagtagtccatgttctcatatatagctcaatgctttcacatttaatccatgtgggacaatgttctccaatagcccccctcaagatggtggctatgtaataaaaacttaaaaatatgacgcacgaatttgagcctatgtaagaaagcaaattgctctatttaagaaaaaacgagccaactcaaataaagcacgccacaaaattaccggacttgcgggtcatactgagcctaccctatataattgttgcacaacacagaatgacttattttttttatgatctagcacgacatgacctatattttaaaaagcacaaaaaaaaaaataataagtcagcacgacacacacgtatttacagttataatcatcagtatgtatctcaaaaattctcatctgaatggcacaaccaaaattttacgaagagttagtgattaatcaaattgaatgaatttattaattaacaagttaaatatttattaaacagtatgttagtgctacataaattaaattaaatatatgattatgaactaattaaattttcatagatcatctctatctagataattttttataatggctaattattagttaatttagatatcatcactagctaattaggttaattgtcccacagaactgttaattaattattaatttattataatatgtagtccaaatcaaagaaatgcttcattaattttataaattaacatttttgaagatccaaccacttttggctttatgcatttcggaccttatatataataggggtaggctctcttacaaatatatataaatatatattataagttcatttcaatttttttttcaaaccctaattctcttggaataatattaagaaagaatatattttattctttcaaatatcatatctcttacaccaaattaatagaatcgattatgctctctctccaatgcaaataaattacatatgctttgttttgttttttctcttggaattttagtttggtattcttgggtgtttaaactctttttttttctttaatttaaattaaagagagtcatgtgaagctagttctcttattttgtatactacaaagtgtgatttgaaaattatacaaagatgaatatataattcactagttcatttctttggcttttcactagttgttgttttgttgatcatttcttctgatataaatattcctattcattttgacaaaagagtcaacctgcctgataatagtcttgtttgggtattttgattgagaatgcatatgctaaaaggcaccaatagtgtgtaatattatctaagatgtcatattattataaaatatcgttaattatttataatatgcgttatttgtggtagtgttaggcaacattggtgcttaaaagtaatgttcattttgattatgtttttaccaaaattaagtttcagtaattaattaagtactctatattttaaaattgtccacatatttgatattctgatttgttcaatacattttgttagactattaaaataataatcgagaaatagtatagctaattagagctagaagaatcttagctgatgtgtgagactcaggagtaaaaaattcttgtataggattagaaatggcatggctataaggaaactaagtttcatcaaaaattacatctttagagatgtaaagtcttccatttgaatcaagacactaataacccttatgattaaggatgtaacccaagaatgtgcaaggtgaggatctaaactcaaatttatgcttgttatatggcctaatgttggggtaacacattaaggcaactaaaaacccttaggctcatataattaggcttaatgttgaagagaagttcgattggagaaagttgttttaacacgggagtggtaacctgttatggagatagacaacagacctaaaggcttcaccttaaaatttcaaaggcatacatactttagcaactaataaacttagcccatattctacaatttgcatatgttttctctcaattaatctattatgtccatgggttgtacgacaaggatgcctatgaactatcctagcttatttaagaggttcaaaaattgttctatatacacccttaatcagtttgaaacttaattttctttcttaattgaagctaagtttcagctttaaaggtttgaaatgttgtaagggcctcggatttattcttattggtaaattcatgtaaatataatataggcatcaataaagctcatgtaatatttatattcattataagatagaatatgggacgaaccccataaatcagaattaataagatgcaatggcttagtatagacagtagtagaaaaatttaaaaatggcattttatgaatcttaagcaacaggcttgaaaactgtaaaggatctttattacatgaattcaagacaatttgaatcacttttttatatggatggcttagcttattatgccactgctcaaaatcggaaataatagagactattataatgagtacaagaagaggaacttgaacctgaattacttgagttattggtgatagtaaagtttaattccatatctgaggtgttgagtgcttgactgaatgaggacggggaacggtaacaccttgaattgacctagatcaaaagtatacatattgtggtatttcccagtcaggttgatggctttggttgtcttgtccttgacataacaaacatcaacacgaaactcaaaaaatagattgttatcaagagaaaatttagacatacttaataaattcttagtgatttctggcatgaaggagattattaagaagcagctattagaggcaatgagaatctgcccaacatgttggatagacagacctgagccattacccacatagatgcaatcttggccattgtattcaccgctactcatgggatattgtgcagatcatgtaatgatttgtagcaccaaagtcagggtaccagctagattccatcatctccctaagtattttgagcctaattagcatgcattgtaggagaatcagaagctgaaaaaacacatgtgaagcttttatcaagctaagcaagtattttacctcaatgatctacttagaggtagaaacttgaaaatagttgaggatgtaaaccatcaaaaaatttaggacattgaggaggatgaagttgatcaagatgtcgtacatgatacaagctcgttaaattttcggttgactacgtatctaggagagttaattctacaatctccagaagtgacaacaataattgatactacacaaaatttaaatgttaatcaagttggtgaaaattttgtagataacgacttaggcaatgaaatagcttatgaagatccaaattggtagttgatcgatgtaaagacgatattatttttcaaaagaatgagagtgatagtgattattagttccacttatgtttaaatattttgtaataattacataaatggtatatctaatgatgttaattttgattatattatttacatttggactaattataattttgttcatctagcttacattcgtactaattaagtcatgataatttttccttttaagagtaataatgtcagtcaatatagtctcttatcacgacgaagtatcaaatcctactagggtaccctctacttgcgaggcagttgcaccgcctagaagaaaaggtcgtggtcatgctagtaatgtaccactggaaatttgaaggcaggagggaccattgctacttacgcttgatgggaaaagttgttagcttggagcaccattcttttgtttgccaattgggtgtcgaagtgagtatgttactgccagggaactacttaaattttgttgatatacctctatattttaaggagcaagttttacaaaaaataaaggttaacaattaatgtcaaatgatttttatttataatcaatcgaatatccaactaacaattaattattccttaaaatataatattattatgatattgttcatctagaacatgaaaaaatgatgaacatgggcaaaagatattaagaaagaaagaatattaggtatacttacttttaaaaatattacgaaaataactctcataatatggaggtggctatcaatgctaagtctgagaatgcaatgagagtattggaaagaaattattgatatgtttttgaactcaaaatgtatagtgcgttactgcgttccaatcaaaaaaagaaaaatagaaaaaa

SEQ ID NO: 266000 - DNA, 691 bp, Cannabis indica
gaattgaatgaacgaagtacagaaaaataaaatggaagaattcagttaaaaatgacatggttttaatcaagtcagagttgatggtaacatataaaaatgaactggtttttcaatagattttcaattatatgtaaatcaactaagtgtattattaagctcttaaaacacctaaaacaaataaataactctactaaatatacggtctgtattggttagtaataatgaaatgagagcaatgacaatcgggtatatatatatttatttttcttgtgctaggctgttaaatataataaccacaaacaagaagtgtgaaaatgagttccaatacagacccaagaattaacaacacaggtatgggtagttgattagtaaacagcaaatagtataaaactaaacagcaaagagtataaatacatgataaacagtagagagtataaaaacaaaaccaagatagtaattagtaattactaagcaatatatacatttaaaagtagtaactagtaccatatatcttctatttacctgagttggttttaattgctttaccaaatcggtaacttcgttgttcttgacatattcccgttttgcagtagatgaatttggagaatacggatatgtaggtgcttgaatagtaatattatttatgtctgctttgttatttttagcccttgacattgtaatttaaatgtta

SEQ ID NO: 266001 - DNA, 957 bp, Cannabis indica
acaacaggtattcaactatgacttctaacattgctaaatctctaaacgcagcatactgagcagctagagaactaccaatcacaacactaatggagtcattgagagctttgatacaacaatggacatacagaaacaggaaaaaagcacagaaaaccacaacagttttgacacctatagtagagaaaaagctagtcaacaactttgtggactcattgatagaaaatgtataatcacttaaaactaaaagttgcactattgtttccttatagtttcttttcaattttctttacagtttaaaaattgattatcttgacctaatatgcaggtaaagccaataaacgagagcatgtttgaagtggttgaactaacaagatcatgggggatcaatctaaaggagaagacatgcagttgcaacagattccaaattgatgaattaccgtgtgctcatgtgctcgctgctgtgataaaaagagaattattgttcacattattacacgacaagaacatgacttgaaacatacagcgagtcaatatatccgctacacaatcacacaacatgggatgcaccacaaaacttaaaagatatccttcttctgccaccaaactagaaaataagatttggaagaccaagaagatttatagctgattgggatacaaaaaaacagaataggtgcaaaaaatgtggtcaacatggtcacaaccgaaagacatgcaacaatcaagcaattaaacagatataagagaattatttgaattgtttaaatctctatgagaattttgacagcatgatatgttagttttgatagattgctattaattggcaaagttgaaatagtttactagtagtcgcaaaataatttctagacaattatgatacgtattaagaatttattacataaataatttcaaaagaaatagtttttagatagggtgttctaaccaaccaacagctatccc

SEQ ID NO: 266002 - DNA, 628 bp, Cannabis indica
ttagtttaatttattttttttcaattcaattatttaaaatttttttttttcattttaccttaatggatacccgatgagttccccataaccgatgggtattcccctaccccaaatccgttggttattagacgggaatggggatataaataggtagcggggatgggggcggggattgccttccccgtacattaaccgccaaatttccatctctaggtatcatctttgaaaggaaaaaaaaaaaaaaaaaaagaagaaattgatggatgatattataatttggaggtatataatatgaacggatcataaagaatataacctaattaatgggaatatggaaacatgcatgcatgaacaaatcaacaaattaattaaagtgttgtataggcaacaaataataataatgtaccaattattcaaaagtttctacctaataaatctaataaattcttaaaagtcaagatatatagtgggaacggctacttttataattacctttttcaattaatcattgttcattcccaagacccacaacacaattaattcaattatataaatatttatatatataatatatataaatgacctcaaaatatgctaatacttttgtcaacttatgatttttctcatt

SEQ ID NO: 266003 - DNA, 917 bp, Cannabis indica
ggactttttggtaattcaaaatgtggaagcccaaaaatattgccacttttatagaggttatagatatatatttatacataaagtttttatatgtgattatattttttgtaacttctatatatattatgtttgattatttgatatattatttgtcatattttttattatgtttgatttatagcatttatatactttttatttttgtatttattttttatttaggatacattttatattatgctataaatatgtgtaattagtgatacgatataattagtttctttttataaattattctgttattttttttttttgatttttataatgatatatattgatctgattcttaccttttatattatatttttatatgaatctatatgtcaattttattttaattgtcaccgcgtccttaaaattcatataattttatatatgttatttttctattttgatggccaactatatgctcttaatgcctcatgttattttccatgtctgattgtataaatgttttttttatctcattcaaatctctctaattcaattagtttatgcacataattttttttatatagttttggtattgttttaagcactgaatacatatttataattattatatactattgtttgaaacgtaaaataactaaattttgtgtaacaccaatcagatatggctgaataaaatggatgtcattactactgaaagcattaaaggatctctctgaatttcagctgcttcatggactgatgactggccctacagaccgacacgagtgtttccagcatgttttgtcatcactcgcatgcttcctgggaaaacttcctaggaggtcaccaatcataaaattgctccaggtcaagcacacttaactgtggagttctttcatgatgggctaccaaaaaacaagatg

SEQ ID NO: 266004 - DNA, 2643 bp, Cannabis indica
ttcgttatccctgtcctcacacacatcagcagcaaggtcgacctgagagaaagcatcgacatgttatggacatgggactgtctcttttggcacaagaaaacataccattgtcacactggtgggatgcattcaccattgctgcctacataattaatcgactaccaactcctgtgcttcaattcaaaaacccctttgaggtgctctttcaccaaaaacctgactatttctttctccgaacgtttgactgttcatgctaccctatgttaagaccttaccaaccaaataagcttgcctttagaacaactcacagcatatttcttggttatatcccctaccataagggctacaaataccaacacccttcaggccgtatctatatagcaaggacaatatagtttaatgaaactagtttcccttatgatacttattgtctgtctcaatacttccaccaatattgtagtcaggagtcttccctattccaccaccaccaaacacaactacacctcaaaagaccacacacccacctcatttacttgatgagtcatttttcaatacctcagtcacacatacaacaacatcatccaacacatcaacctctccctctctaccccaacctgctccagatcatgaaccagaactagttcttattcaaattgacaatattcaacctgaaccacctacctatcctgttccatcacaacaggttgcaaatcaacactatatgataactagagccaaggctggaattcgcaaaccaaaggctctcactgtgacctctaatataagtcttgagcctaagacacttaaaaaaactcttcaagacctattgtggctgaatgctatgaagattaaaatattggcatcattaaaaacaagacatggactcttgttccataccaatcaggaatgacatttatagacaacaaatgggtgcatcacatcaaatacaatcttaatggtacagtggataaattcaaatcacgactggcgatcaaagggtttctacaaattcctagcttagactattttgaaatgttttgtccagtgattaaaccctataaggtccttgttatgtcctctcttgttgtctctcataattggttaatgcaacaaattgacattaataatacatttttcaatggggaccttaaagaatgtgtatacatggcccaattagctggctttcaaagctccactcatcctcaccacgtatgtaagtagccatctatggtttaaaacaagaaccttgggagtggtttaacaaactcaaacacttattgttgcattgggattttagtaattctaaagcaggcacatccttatttttatcaagaaaaatggcaagctcactttattcctcatctatgttgatgatattttattaactgatgcagattcataatttattcatcacctaatctccaggctacatcaacaattcactctcaaaaacttgggccctattcgatattttttggagtttgaagtcaccaaaaattctaatagactatatctcactcaagctaagtacacatctgactttcttgctcgaacaaacatggcaaaagctacagccacaccaaccccaatgtgtccaaacaccaagctctctactacaatgggtactcctctcaaaaatccaactctctataaaagtgtgattggggcactactctagtacttaaccttaactcacccagacatagcatttgctgtcaacaaactctcccagtttctcaaggctcctacaaatgagcactggtcaacttgcaaacgtattctttgatatcttgttggctcggttgactatggtctccacttcatatcagctactacacttgagcttgttgcctatagttataattatttaattatagttatttaaaatcacctgtacgttttctaaaaatttacaaaacatacacgattatgaaaaaaaattagtcaaaataacttatttagatgtcaaaatagacatggagtctactaggacacccctactttaggggtgcactcagagctgtaaatacgtatgtattgtactagcccgacccatatttttcttactttttttaaaatacaggtcttgttgtgacaggccataaaaaaatatgggtcgttttatgccatacgaaaatatcgatcgtgccatgtcgtgcaacaattttataaggtaggtccgacacggtccgtaagcccagtaattttgtgtcgtgttcagattcgtgttgtgttttattcgtactgactcatttttcttaaatagacctacatgttttcttatacagctcaaattcatgctccatatttttttgtattttaatacaatttatgagctaattactacaatatatgtgtatttataattacaacaatagttacacacaatcatacaaaaaataattataaatataagaatttaaatattaatatcattttaattgataaataaatatttatcattattattatcaaattattgagatttttaatgtattatattttcaaactaatttaatcatatttacatatcatacttttggatttgtcttaccatatcgtgtttaagctggtattttttatgacatgttatgttatttcacaacacaatatcctattatacttaaatttatattttttcgt

SEQ ID NO: 266005 - DNA, 2146 bp, Cannabis indica
tttttcataatttctattaaaagaataaaatatacaatatcttttatctaatgaagggtattttaggtattaaaaaataaaaaaagatatttgctttattattttaaaaaatggacattaactatctataaagttagaaataaggtcatttacttacatttctcataaaattatgtgaaattgtaaaattatctctaattgaaaatagatagttttacaataatgaaattaatttacctgtaactgatcatttgtatcatatttctgacccagatcatttaaaattttctaaagttgttaagatgcttaattttctcttataataattgagtgatatttgtttcaagtgcttaaaaatgaaaacatcatttctataaatattcatatacatacatgataatttgattatatatatgtaacaataaaaagcctaaagtttttgttgttgtttttgtggaaagatagtacaagaagtttgttttcccaaaacatgtataattatataaaagaaaaatctttatgtagaagctaagctaggcaaaaacattgatcagaccaatatcacatgcaatatattaataatgagagtctttatcatgctctaaaaccacacgacacgacaattttatctctttctgttttgattgatcatgatattgatggactatatatatatatatccttctctgttatcatattgatcgatttgagttatactatatgttctagtgttaagaaaaatatgacacattaattgtacatcttaataataatatatataagattttcctttacagtagtacagttgggatgtagttttcagccacaccttctaaaaatataataatgatcaatttcaagttgatgctgttcaaaatagataatttagcctaatattgttggagattttttcagtacaagagaatatagggaggaggattataagcaaatacacaaaatatatgaatgtattacaataagattacaaaatacactttagtgaaactctagaaattcttttaaggatttttcaagccttgtatacttaccgtaaaatctaagaatgaggatatatatcttcacaagattccacaacaagtgaattcaataagtgtatcacaagtgaataaatggtataaaattttcatttccatttttgagcataaatgatcactataaagctcttgactatttttaatcattaatgaggtgtttataaatttaattgggtgatttagaagttttggagctgttagaaacatcccaaaacgacactatatgatgatatgctgataaaatagtaattggttactggttaccaattttttttttgttatttttttttttaaaatgttttaaatcactcttatttgattttgaaccatttattgctacaaaagatcttacttttagtcacaacaaaatttgtgactaattattagtcacaatacttgttgtaactaaaagtaaattagtgacaagttgtgtctaaatactctgtattagtcataagtaattttttattgtgactaaatcatatttattcataaaaaaattattttgtgattaaaaagttgtaactaaaagtaactattttttgtagtgtatatacttaataaataatgaaaacaagtctccaacaattatattttcaatagctatcattcatttacattcaataaatttagtaacattttttactaatttaagagtgaaagaaaatgagagttacaactttttacgatcatcaatatataggattttaaatcattattcacacatttgtaactttatatttgaccaatattatttgttacactaaattatttattacttaaatatataattttaatatctattatataaaataatataataaatatcacactttagaggagtgataattataacgtccaattataatctctaacttctgcatccaaaaacacatgccaaaatacctttttttttaattttttttttcatagtggtgttcattatagttacaacaccacttctgtaaattttgaaaaatactgaatagtttatagtgttgaaaatatatttgaagttttctcaaataaccaaataaaaaaattaaaacttaaaactcaattttgaacaacttaaaaaaaaaccagttatg

SEQ ID NO: 266006 - DNA, 1062 bp, Cannabis indica
aaattatgtgaaccatgcagcataaaataatttttgatcttttattaattagtaaatttgattatattgaaataggttttatttagggcatagaatcccaacaaactcccacttgcactaatataaaactaaaagtgcatttcaattaatctcaacatcttgatgtccaaatcaagtgtagtatgtagtatgatcattgtaataggatctgacaggttgtattcaatataaactttctccaccattacatctccttagtcacaaaatctttgatattgtgaaattcatttctatatgtctactccttttagggtattggattctttattatttggcaactatatatgtattagtttaaaagtgacactagtagttaatccatgactggaataacgccaaaaatcgtatagaactttctacatactgaataattatctagtaggcttctaggccactttaacatctagtctcactagtagatttagggacttcgaattggtttttatacttctacaaaaattactgctctacccctagagtaattaccatttcataagtagactttctagcattaacgcaagtctagaaaacttatttggtgtagtctatgcgtattaaaataccacccttattgaccaacatatagttcctcttttgttcttaagatttatttaattgtcttccaatgttcctttctttgaattaaactgatacttactcataactcccactcaatagcatgtgtctggtctaatgcataccaaagtatacatgagacctctcattgtcgatgcttagggaatttttttatgacttttatcttttctaaaatagttaaaattgttctttagataaataaaatctatgtctaggagtcaaaaaacttcctttagagttagcaattagaaaaatgcttcaacatctcactaaagtaagtaacttaccaagtataccacaagccacatgtttagataatctcaaacctatgatactaagatcgagaagttttgttaagtccattgaataaacttattatcaaaatttctcttcttgtccttgtaa

SEQ ID NO: 266007 - DNA, 624 bp, Cannabis indica
aggttatgattttaaattgtgccatataccctattataagcaacagttttaaaccgtcgggaagtccacattagtgacagttttaaacagtcgcctattctacttattttgcgatgatcgtataggtgacggttataaaaactaacacaaatactttaaacgactgtttaaaaacgttgggaaaaactatttttgtagtagtgttgttgtagagaaatcaggtaagagtgagacttgatttatcatcaagtgtgtgtatatataataattaaagaaataacaaaatcctcctccttgagttatttctaattgactaaagtatatatatatgatgttattatacccaaaattcggctttacttcaaaaaatgataagtgtcttacagtagaatatgaaccacttgatcatttaatacaaagaaaaaagaataactcgttaaataaatgattaatagaaaatattcataactcgttgactatataatcttaagcaagacaaggatagaagactagtaagacccatattgacgagacacataccttcctcaaaatacacaagcccaagaagataattcatttagggaaaattataagaaaatggccccaaaactcataggagtatgt

SEQ ID NO: 266008 - DNA, 734 bp, Cannabis indica
atgatatatttagaagtattatatcaatgatatatttcatatgtatttttaattgttattttattaaatattaaatttaaaatttttaatttttgttattattaatttttaatttgtttcctaataaattataaaaaataaaatgttactatgttagatttatgcagtgtagtgatattttaattttgttcttttaatatgttattaaataatattaactaaaaaattgagaaagaaagatgaaatagatggagttgactaaattgatatataaataataaaaaaaaaaataagagaattaaacaaaaaagagaaacattgatggctttggaacacttataatctaaatttcataaaatttttaggtttttaattttaagtcactttttcttttatctaacaaatagttgtattttaattttttttttaacaatatatttaaaatattgtatcaatgatatatttcatattatttttcattgtaatttcaacaaatattaattttaagattttttaatttttattaatttctctttgaaaatatatatcgatgagttagtttaaataggttttataattaaagattttatatatttagtagaaacttaaatatatacttttttattatacttctgtgataagagactattgtaaatgttaaacttttaagttatatatatttttcatcaaatatgtgagtgagagatattatttatttacacatattcttacat

SEQ ID NO: 266009 - DNA, 520 bp, Cannabis indica
gcttcactagttcttctagcatcgctaggacctctagcatcagtggttcctctagcattactggttttgtttggacgactactactagtaccaggtgtttggcaattttctctacagggcattcttttttgtgtcggttacttaggtggtatttggtacgatagtgaagtcaagttcaaagatatagcaacatagacctctatatcttggtcgtctcttatgtcataatttccctcaacataccgttcaagatctggaccatcaccaaaactatcatgaaagggcatttggactaaactgtcaactgtcggcatcatagtgtttaaataaggtaacacattggctgccaacacttctggattcatttttaaaatgaaactcccaacctcgctacgagtatccttaataatttttggtgtgggactaggatcgatacagacattcttctttaccaaagtcacaaacaagagagtaaattcatctggcttctttgcaaacatagacaaaaataatcttacac

SEQ ID NO: 266010 - DNA, 664 bp, Cannabis indica
tctaaaaggaatttgttgagttttaatgatatatatcttcatgaatatgatactgagtctgcgactgagggtgacatgaaatatatgaacattactaaatgtaatacaggaaaaagatacatactagaaaactactaatgctccccactggactacattatacctatataagtgtaattgagtcacatgcagtagttaaagagaaatgtaaagatctctcgatattaaatacttggcatgatcgccttggtcatcctggttcaataatgatgcgaagaattattgaaagctcacatggtcattcattaaaggatcaaaagatacctcaaacaaataaatttacatgtgaagcatgttcccttggaaaattaatcacaaggccttcgccaagaaaactcacaattgaattaccttcatttcttgaacaaatccaaggggatatgtggaccaattcatccaccatgtgtaccatttagatacttcatggtattaatagacgcatctagcagacggtcgcatgtatatttattgtcaaattgcaatatggcatttgcaagatttttggctcaaataatcaaattacgagcgttaggggtgaaaatcggtcggttatggtcgatttttacaattttataaccgaccggtcagttacagttttatttta

SEQ ID NO: 266011 - DNA, 682 bp, Cannabis indica
aaaatgttataatatatattaatacatagaaatattattgaaatacagaatgcaaatataacaatttctggatatgatcacaaccaatatattggtaatttgggagacttgatggctaatcaatttgaaaatattactgaaacttttactgctcgaccaacttctaagggcttaatattcataaggtataaataatattttctattgtgctatttttatattctcttcttaaattatttagaggtttttacaccacatactaaagtttttaatttttttacttttttattgtgggacagaatttttttcaaaaataatgtataaattttttactgtatactgtgttaagttttcattgttgttcggttattttttagttgttatactgttgttttaattattcagttttgctgttttacgattgtttcataaaaagagaatatttttgtaagaaattctatgtgagagtaaaattataaatttttgtccaaaatcctatatttttgtaaaagtcttattatttatctaattagtaattgcatactagaaaatttaagagcatttatggcataaatatataatattctaggtttatatatatactaattatgtattttttcagccgctaatatacttaatatcaattttttttttctatttttggtattacttattactatac

SEQ ID NO: 266012 - DNA, 1019 bp, Cannabis indica
tttttttttttatatataaagtggtatctaaaagaaaaatcaatgatgcaatgtccatgttaggattacaataacaaatttgaagagccacatatatgtgatgtatatagagagtcctttaaagggtgatagtttaaataaaaagtataatgattcaacaacaaaatcaaatataatatataatttttatgaataatcaaaatcaagtatattatataaatacaatatatgtacttttaacttgcacttatttaaatacattcaaaactatttactatatactctttttttttaaaaaaaaaaaaatctaattctattatttaaattaaaaaactaaaataaatttttattctataaaataagatatatacaatactcaattttaaatattctcaataaattagatattggaaacttttaaatttaattttaactcaacaaatacaataaaattaatcaataattaaaaaaaataaaatatttaaactaccaattataaatatttaaaatcgtcgaaatctatgaaatttcaaaatcttaaaatctatgaaaataaattaaaaaaaaaagacaaatctcataaacacaaactcaaacagtagaatcctaataaaacactaaaactcaaacattgaaaatacatataataaaattcgaacccaaatcttaacacacacatcagaataaaaattaaactgttgaccgaggttttcggcaaccaatataataatgataattaagagagctataaagaattaagagagagagttttacgtggttggggcattaatgagccttagtccacgagtctgtgtatttatgatagtatttattacagagaatgtttttggtggatttttcctcttctaattcttatggaacccagaattctcgacccctgccttaatgagttagggatcgtggggtgatctctagaattgaggtacatgtctgtctgcaattatcaagtaaaggcacacattcccaatgaatatatcataggaaatgcatggtctaat

SEQ ID NO: 266013 - DNA, 991 bp, Cannabis indica
ctaaatatgaggcagagaaggtgcctggaactggttaaggattacaattgtgagatttttatatcacccccgggaaagccaatgttgtggcagatgcactgagtagaagaagtcccaggcagattttcactattgttatgatagctcctcaactggcctcagataaggttaatgtgggaatttaatatgtagttggaaagttgcataacttgacactccaatttgattttttagagagaatcagaaaggcacagttggaagattccgagctagtcaagattcgagatgaggtgatggttggttggcctattgacttttcaatctcgaataatgaaatgttactgtataaagctcgagtttgtgttcctaattgatgaactcaagaaagaaatttttgacgaagcccacactacatcttattcgctgcatctgggaaccaccaagatgtaccatgaccttaaaccctacttttgatggtatgggatgaacagagatgtggtagattacgtttccaagtacttaacctgctagcaaatcaaagctgaacatcaaaggtcggtatagttattgcaacccttaacccttcctgagtggaagtgggaggacgttgcaatggattttgtggttcgtttgcttagaaccataggaatgtatgattcagtatgggtcatagtagtcagattcacagagtcagcttattttctgcttgtgaaaattacctatacaatggatcagtatgctgaactttatgtaaaagagatagttcgtcttcatggtgctcctaaatctgttgtttcaaacaaagatcaaaagtttacatcaaaattttgggtgagtcttcaaagggctatgggtacaaagctaaatccatcctcagactgatgggcaatcagagagaaccactcagatactagaatatttgtggcaagcctgtgtgatggactttgagggtttatggagtaagtacttacctttaattgaattctcctac

SEQ ID NO: 266014 - DNA, 892 bp, Cannabis indica
agttaaaaaaaaattctcacagaccaaaatctcaaattttaattcaaaaattaaaaaataaaaatatattacctaattaaaaaattgaacatacatatattgcacttaacattacttaaacttaataaaaagaaactaattatacgtgtattgcacgaaacatcgatctagttgttatatatgaggatatataaggggtgtgatttaaagtgaataattttaaagtgatttaatttataattataagataaataattgtgtgttaagaatacataaaaattaagaataattaattaaatttcataatcaaataattcaatctcagtaacaatgacaattaaaaagaaacaattttgagaaatcaaaattaaattttaatagtcatgtccatcaagtaaaataagaataatttttagctaaaaaaataaagtcttattaactattttagtaaaaatatactactcactaagtagaattgaattaaaaaataataataatgataaattaaaaaataaattgttcttaataagatttatgggacaatattgtcccacatggatcaaatgtaaaaatattgagctatatataagaacatgagttactccactcatcaccaactggtttgagatggaaccccatgattttcaacatggttttagagtcatatccctaggatttagatagttagcgagccgcaagcgagcaaaatggtactcccagccgcgagcaaatggaactcccaaccgcaaacaaaaattagtgagcaaataacactacttgtgataaggtgattcaaaattggtgagcaaaaatagccaccatctcgagggagaatattggagtctcacatagatcaaatgtaaaaatattatataagaacataaactactcc

SEQ ID NO: 266015 - DNA, 991 bp, Cannabis indica
atcaatatatcatttttaaggggatgcgttgtagaattttctaataatatatattcaacttaatattctaataaataaatttgattaaactgaacaaatggtcgttgaccagttcagtactccttttttttttagccactcttgtaaaatgttaaaaagaaaaacaagagaaataatgttctttgaatgtattattagtcaacattacgttaacacaatttaattagcatattttgtaaaagagcattagaatcataaattacaaaaatatacaaaaatcattacagaatatactttctcataataacatttatacaaagaatcacctgtctctccagttcttttttgctcaaaggttgagactagagtttgaaaacgcttgttacttttgacatgatttctactgaccttcacatttgcaacatgacatgtatgaaagcattatacaataaatatgatctcgcatattagacacttgccaaatctgaaggaatgaggctttaaagataacgaatgagctcaacagcaaactttcccttctttgtagaattgatttctcctatctgaatcaataaaaactagaacattatcacaagttttatggaaattggtgatgatacaaatacgatatagcggttatcaaaaacaaatacgaaagaatgattgcatgtcaccatagagaaattttgatgctacttctacacagactgaagtcattcccaacagaagttttgttgatgttgaaaattacctttagtcttcctttcccgcttactgagacaacgtcaccagtcttaagtgttgttccattttttgtaataggggaccagttgacacgcacatccccgttactacacagatagagaactgtactattatggcataagatgagcaagtattgttctaatttatttgactgtgttaagatggttgtgtataatgagatagaagggaagaaaaagactatcatcacttgttccttgttcatggt

SEQ ID NO: 266016 - DNA, 869 bp, Cannabis indica
ggaatgttcacatttcatgagcagttgtaaatgatcagttcccaatgaaaataactgccaccctatacacttataaatagggacgaaattcaagaaaaaagggacagcaattagagagaaaagctaaattttacatttacttagaaaattgtattgtgtatccaaatcatcatccctaataagaagaattcgtgaaatatgtagattttaactataaaactacgtaaaaatatctagtgttcatttattattattaactttgtagtatatttattacataaaaaattcctatatttagttaacgaaaatttacgttactaataataataataataataataataaaaaaaaaaaaaagtaaactactagaataatggaacttattaataatttttttttaaataaataagaacagaattgaaataataataataataataataataataataataataataataataaaagagcctaccactatgcttaggcgctcaccttgtaataattattataagatggtgtttgtcctcataacatatttgtcttcccattttatttaaataataaatttaaaattaaattattcattacaaaatagataattactattttactaattcaaaatggattttcttaatatcattatcttgtgtcattcatatcattgacagtgttgcaaggtagcgatccgaagaccatagacctacaataccactttttaataaattagattatttattagatttcatcaactaaataatcctatttattaattttatgattactccaatgtaaatatatgttgaccttgcttctagccaacgacagtaagtcaagataaagcgattagataaaaataaataata

SEQ ID NO: 266017 - DNA, 2425 bp, Cannabis indica
tttcacccctcaatatgttttatccttaaaatacttatcttcttataaaggatgttttagtaaactatataatcactgaaataagagctcttctatttatctctattaagccaagctcgaaggaaatcatcatttcacttctatgtccagatagaagctatagattccatatcgatgactagcgctcccactcaattgtactatcatgttcccaagctgtgcgtgtgaccctaaccaaatggtaggctttgactaacaacttaaagaacacaaataacactcttgagatcgaacctaaccatgtcaggaataagatattttgatctaagatcaaccagtgatattgactaaaaaagatacaacggtaagattataatatctttaccaagatcaatatcggtcccagtccaatgtatactctatacatctgatactagcatacgttgccaatgttcttgaaagaacataacacttatcgaaggtgtaagtaagctttatcgctgactatcacatcagtgtaaatccaatacactgataaatcatgggatattaacttttgaagcatataatcacaattaccttccactgtgttgacatcactgtaattgtgaataactatatgttctggacttaacagaaatcgtacacattaaaccataaacatgaatactatatgtaaacataaatggcttctaatcttctattgataacaaatcagattatattgaaatgggttttatttagggcataaaatcccaacagttatagtgtcggttacaccaacagaagcaaattatttttgtcacttaaaactgcagtaaaaagccatttttgtagtattgcctccatcgtctttatttcgttttcttctcttttttatgggcagacttggacattgaagaacttctgtgaaattaaccatctctacaaaatgttgacaaagcaaaattagttagatcaacaatagcattgactatgcacataaatatcaagacaaaaagatcacatctaaactactatctaaaatgttagttgggagagaatcgactcgagtatctatatactccctagataagtgatttcaaaaatgtataaggtattaatgggagatagatcccaaattgattcccaatagtcattcaagctgtattggtctagaataccataatacaagctgttactagtgacttggtcataaaactaggaataccaactatcaaacctatgggaaatgagatctgtataatttcaaatataaaagttatattggctatcacagaatttgaagagacatatgggatcaactctaaggaaaataggcgaccacccataaaaatgttcagttttacctgaagtagccccttcaggagtttgggcagcttcccgagtaacataagcctgaacaaatgcaactcgggtaacacaatcttttccttcttcctttgtcaaaactggcaatgaattccaagttgaatactttaaaaccttcacatccattggagattggtctgagccgagaaggccacagttcctcaaatgtgactcgtaaagaagaaaggcgatcgccctcactccatatggcaagttaacttactattgattgcttcccaccacaacttcagtcaattcaggttttggcataatcactgttcaaaagaaaggataaatccattaatataagagcaagaataatttctcaaaaaagtacaatcgcctagaaatgaagcttactcaataagcataaaggatgactcagttcgctatataattattaaaaagtcctttcaattttaaaaatactttttagggggcaattgttatacccatattttgagtagtaaataatgagtttggatgcatgacacatgtacgacaaaaggaataaattaacttggtgaatttaagagtcaaggtataaatagtctcctcacaatatgaagcttatgcatgttcttcttggagtaaacaaatatttacaacattaaatgcggagacactcaacatattcctaatatataatagaagatgctaagattgttaaggcatttaggaatattctttctgttgacattgtgaacgttgagaggcttaatgtgcttaagcttgctcctattcattacttcagaaaatacaatcagtatgtaatttgaggaacatgtgcccaaggcatgcctcctagggttgacgaatttctcgaggagctcacatcaaacaatcaagtatcttgacaatcgtatgttatagagtacaaagaccaaatcatatagggcagttattttattttgaatgtagttgcatgctatttcttgccaattagataaaaatatatgaagcatggaaaatgtccacctttcataatcgttgtaaattagataaaaaaaaaaacaactcatatcctactcctataaatagcagtgatcacatt

SEQ ID NO: 266018 - DNA, 1194 bp, Cannabis indica
atgtaactcttataaacagagattgatctaattagaaaaatgaaaaccatgctgcaataggacagatgacagcttgtcaaaccaggctctaagagcctgtttgaggccataaatagccttagtaagcttgcaaacatgattgggataattggggtcaatgaaagcaggtggttggtgcatgtatatgtcttcttgaagctcctcattcaagaatgcattgttgacatcaagctgtcgaattggccaattctttgtgacaacaatgggtaagacaactctgattgtgattggtttaacaaaagggctgaaaggttttgaatagtcagagccttcttgttgatgaaaccctttggaacctagcctagctttgtagcatttgtggctgccatctgcattaaacttttccctgaacaccgtttgcatcctatagatgttctaccttgaggaggcttaaccaagatccaagtgttctttctgttgagagctgtaacctctgtatccatagtagtaaaccaatgtggctcttgaagagcagttttgactgaccttggtgcacaagcagcaagcaatatttttggttttctgatgccgttcttcaatcttgttatcataggatgactggatgtgggtggtgttgtgttaacagctgtatctgcaaaagaattgttagtagcaactggtgtttgaacaaggagagcatcagtgataggttgtgtagtagttggtggatttccatattgaatgggtacttttgtaagcgtgtatgagggagattaggagagttggcttcagaagcaacattgggaattggtaatggtgaattaggtggagatggagttgtatttggagagacaggagggtcatttggtggaaattaactactggggaaggaaacagggttgaaagggtgggaatttgggaaggagatgacatggtggagtgaatgctgggagattgctgcatagcagagacaacataggggaaattcagttcatcaaacacaacatctcgagagatgtacaacattttttctttggaaagacattagaaccctttgtgtgacatgttgtaactaaaaaacacacatggagttgacttgtattgtaatcatctcagctggtgttataccaaatttggctaccatttcaatagaagacacgtgtcaaagtaagaagaatatggatcaatgcgtgt

SEQ ID NO: 266019 - DNA, 693 bp, Cannabis indica
ggtaaaacaagttctaacaactagtatcagagctatgataatgattaatttcataaaatatggatttaaaacaatatttaattaatttggatgtgttcatgttagtttatgtgatatttgatgattgattatgatattatgaaatattttatgaaaaataatttgatttttgatctagaattattttatttgaaaaattggtgaaaaagtaagaaattatccttttacagaacttaatttgaattaaaattgaaaaagatatgattttttgaagttttgaaaaaatcaaattagaatttccccgaatgtgcgcccaattttcctatttttcattatttttaagttttaaaaattatttttaatgaaataaaactcaaattttggtagatttttatgtagaatcttattttttaaatataaatttaattatctagattaaaattaattttcattaattttattattaattaaaattaattttagatattagtaggcttttaaatttaaaaaattaatttttctacaaatttgctattatgggttttttaaaacttgattatttatattagtttactgaaatatcatttacaagtagctaagtattttaaggataaaatacattgaagggtagaacggtgaatttgtccctactcgatataaatcatctatagatgatctgttgggttttgtgcc

SEQ ID NO: 266020 - DNA, 615 bp, Cannabis indica
caggatatgaggttccctcccagaaaaacaacatagccacccgttgatcttcgatcatcaacgcagctggcccattcagcatcggaataggcatacagatccattgatgcagctggtttaaggaatagaccatagtagagtgtaccctttagatatttgagaagtttcttgcaagcttccaaatgagtaactgtgggcgcatgtaagaattgactgagtttgttgataataaatgcaatgtcgggccgtgtaagagagagttactgaagagcaccaagggtactccgttatagagtaatgtcagcaaagggttcaccatcctttaaggataatttctggttcgcagtagtgggatttggacaactctttgctccatcaagctgaacttcaacaagaagatcagctatatatttactctgtgataagtacattccctcagaatttctatgtacttctatcccaagaaagtagtgaagaggtcctaagtcctttaaggcaaaggatttatttagatctgctataagtttggagattgagtggagttgggaccagttactagatgtcatccacatatatcaataatatgatgaaggtagtggcagatccaaaggtaaa

SEQ ID NO: 266021 - DNA, 948 bp, Cannabis indica
catgtaatttttttgttccactatttctaatatttttcacaaaatcgctatctttctctatattttaaaaataacaaattatgtttctaatttcaaaatattttattttagattatatcatttaataagtacaatatatatatgtatgaaaagattataaaatttgggcaacaccgagctttgcgcggcttagttccctagttaaatatatatttgttgtaatatttggtgttgaatgtttgaagttgtcacagtaatagattctaaatcaaattggttaaaatggtacaacaaaatagtgcttgtaaatagtgtaacaaatatcatcgccaatgctttttatcaataaagctccagaaatgaaatcagtgcaattatttttagccttgtaagaattcattgataacaaccttcagaaaggtaactcgagcctcacccatttaattagatattttcacgtcacttgtaaattaaaaaattctgaaccaaaatataatcaacaagagcgtgggagtgagaaataagttccatgtaaatgaaattctaaaccaaagccatgagaatttgatgtatttgatttgtgattcaacacagtaagatcctaatttcagtcacccaagtaggaatcagaacaaaatatttagtaaagccactaaaaaaggaaaaagaaaatataaatgtaaaaaatgagagggagagagagagggatgagaatgtgtagtaattggtgtctaaaatcatcaactgaaataaagtctcattatgatctaagaagccatctagttatcaatttgtaaaagaaaaaattacagcacagcaagcaaaacttcctatgatcataacatgttctacgatagagtcgacataacccacaaaatttaacagagaacgataatcttggacaaaaaagactcacttagtacacctatgatcttcactcttcgtctt

SEQ ID NO: 266022 - DNA, 837 bp, Cannabis indica
aagcaactttaccctgcacctcacacaaaacacacaaatcagtttcaataatcattaaaccatatatattaattttatattattacttcatgacatgacaccatacaatattcaaaaagtccttcaaaaattcagaactcattaaaagcaaaagtactactactaccacacacttttagtatacgtcctatatcattaagacataattacattaattaattgttttcttacattttctgaacaataatcaattgtttttgattttggtttatctgattccttagcctttttctcttcatcattttggtatgggcaaggatgccaagtgtttgctgcactttttggaatacatatgtcagcaatgtaatcttggaatattgttaagagcagcgaaatgaatcccacagaaagaagctctgcaacaacaaaaaaaaaaaaaaaacaaaagaaaaaatgaaaacaaacccaattaaaatgacaacaaaaaaaaaaaaatccctcttgtactaattaataaagtagatgtatgtacctaatttaatcttctcaagcgcttcctgaagggcttttttgtgtttggattctaaccactaaaaaaagataaaaaaacgataaataaccataataactgatagtgagaactttaaatatatatacataattgtaatgaaacttacttttcctatgagatgaataacatgttcaatgattatagatatgataatcaacacaaaaacaactacagcaacagcccaggttggagtttcctccaaactacgctcttcttgcagatcagccattataataaagagtttatcactgtatatatatatatat

SEQ ID NO: 266023 - DNA, 670 bp, Cannabis indica
attatacttaattactacatcatcaaattccattataggtattcatgctttcatatctaacttcttagtagtgggtaagaagggtctcccaaataaaattgatgtaggattgggatcactctcatcttccatctcaattatgtagaaatcacctagcatgacaagtctataagcctgcacaaaaacatcttcaactatccatgatggataaagattagtctgattagtcaattgaattaaaacatgagtttctcctaatggaccaagatttaaagaagaaaaattagaataagacataatattaataattgctcctaaatctatcatgcaatgatcaaacctggttttactaattgtgcattaaattgtacttgtcttaggcaacacctttctttggagaacaacaataaccttctcccccacacttattttctcaccaccattcaactttttctcatttggacacaactctttaagaatgttagcacgatgtggttcttctttgattacttaaagacatgagatttttacctcaacttttaaaagagttttagaaatctctttgatgggctcctctttcctagattttttcaatctacctggaaaaggtggaagaatggcataagttggtataattggtttgtatgtttttcagtgatggtggatcaac

SEQ ID NO: 266024 - DNA, 3202 bp, Cannabis indica
tacattagtgactctttttcctaacttttgttttttgtgttaatctgttgatgatttgtaattgattgatctagatttgtaacttgaatattaaaacagaaagtaaatcaagaacaccagatttacaagtttcatctgaccctagaaacacattctaggcgactgtggcttggatttttcaccatgaaatcaatcaatatacaatatccagttctggttacaaagagaaatgaattcatataaaagttacccaaacacttgatttcaaatcaagtttacggatctaagtccctttagatttctgaagtcaagatccccttgcttcttatcagctgaaatcctttcagcagtttcatctaaactccctttagattatgcagtttcattctaggtgacaaaataccaaattcaatgtgcaagttggagcaactgaggcatctatattttatcactgcaattggtatcagatgcttactcactctacttggtaggggcatgaaatttggtaatttcttgaggtcaactaagtctagaagtttacagacattggtaggtattagtaccaaggatcttctattgagtgatcttctacatttggagagtctcaagaaattagaaatttgtgtggatggaaattatgagacattcttacacaatccccaaactctcacattcacttgtctattttcgttacaagtgacaaattttaatcctagcaacaagatagatattgttcctttgatattaagatgtcctcaaatttataagcttagaatagacttgtctatagtaagattaccacaagtcaaccaattctccccaaatctcatcaagttaacattgactaagctcaaacttaaggatgatccaatgccaacattagaaaagctaccaaaattaagagtccttagaattgactcttaatagttttttaggaaaagagatggtgtgctcaagaggaggtttccctcaacttgaatctcttcagcttgagtttctatttgagttgaaagagtggaaagtggaggagagtgcattgcctacacttgcctatttgcatattcaaggatgcaggggattgagaagagttccagatggactaagaaatattgttacactcaaagagatggtcataacttatatgcctaagaaatttaaagaaaggatggaggaaggaggagacgatttccacaaagtcaaccacgtgccatcacatgtctttatcaaatgtgatgaaggtacatatctatcttttgttgttaattcctttctgtttcttttctatcattatttttatctatattacacattatttgcttatgcattttctgtattggcattactatgaatgcagattggccgaatgactacaaatgaatttaagtgggacaataatatgatatcaagatttgggggatgtggtgtttgccactgccaatcaccaatgtctgtttatttaataactaatatttggaatataatgtgtaatattccaattgtattgtgttgtgtgtgttttaattaaattagtgagtgttttaaattttaatgtttcatatgttattatgtaatatatatacttaaattgttgtcacataaaatttgatttgacaagtcttttgtttttgtgttcttctgttgatgttttgtaattgtcttctccttcttcttcttcttcttattgtttttttttttgttttttctacggagaattaatgttgagtataaataatgctacaaggattaaagagttctaggtgtgtaggtaccaactgagttctaggtgttggaaacattaaggagtttgagacggtgatcaaactttgttgttggctgcattctcctctttttgataagttgtagtctaccattggacagaacatcttgatgaaatgtagccttacatcgatgtgcttcatgaaagactgtgttcttactgaggtgcatagcactttcacatagcctgattgagactttctagtgtctagatcccctgcatagtcaaaatcaacaaatcctactacattggttgcagaaggacttagtacattgtatcttcatcaaattagaatgtaccaaattgcatatgattaatgagtctacacttgatgattaactttttctttttctttttcattctaacctttcttttaatttattttaaaaatatattattcaatttgttaacacataattatataataaattaattttttatgagatttttgtttactaggaaatacaggtgtaccattgcacaagtcatatatgagtttttgttttttcttttctttttttgtcttggaaagactttggggtcaaggtcaactgagtttgtctatgtttgtcttactcatattttattgataggaaaaagtgggtgattgaaagaaggtcagagtcaaattgaatattcaacttaacttctcacactgtagattttgtgactggactcaattgtggtggttccatttttcttggtactgttagtaatatttattaatatatagaaaaagtgttacctgtatggaaaaagatgtgagaaagaaagaattcccttcattaattacaattaataaaacaaaactatacttttcaaaaagaaaaggaaaattgaggcaaaaacagcagccattattgaataacaacaccacttgggatagaatgcttaaatgaatgatctgttttgctgttagatcataccatacaattttactcagttcaattcatttagcgaacaagatcatcaaatggcagatgctgttgtttcgtttgtgattgaaaggcttggagacttgctaattgatgaggctcaattcttgcatggaatcaaaggccaagtggggaatgcacaaatcaagcttcaatgtatgagtgctttcttaaaagatgcagatgcttgggttagaaatggtgatgagagagttcgccttttggttgtccaagtcagagaaaatgcttatgccttggaggatgttattgagacttatgtcttcaaagtggcttctaatgagagtgcactgaaatggtgtgttggcattattgatgtgtataaagttgatcaaagataaagaagatctcatccaatattgatacttggacttcacaattagaagcatttggagtacagagatcaatacacaaagcagatgaagcttcttcaagcagctatgtccaacagcaaagacagttgaggcaagct

SEQ ID NO: 266025 - DNA, 1800 bp, Cannabis indica
cttatgtaataataattaattaattcattttctattcataattaatgtagtcatttcatattagtacattgttaattacgtctccttttgtttataagaaagtcaaatatagtataattagtcaaacttattccctttacatatatacctaatatatatataattaagatccattattgtatgtgattaatatgtacttttgaattatatataattgtatatatattctccttataggtactatatatgatacattaatgggggacattgtgcactattaattatctttttaatttcctctcattagtagtactacaatattgatctttgtgagtccgtttaaaatgctgtattaggttgtattatattgtattgtattatattaaattgtattttatgcaatatttttatataaaactatatgtggtattaacttttatggacacttaaatatataatattttagtataaattaaagtttaacatataaaattattttaaaaatataatatataatctaatataaacccagtatgttttaattttatttattgcaattgtaataagtttttttatttttttttgtaatgggtaattataataagttaagttaatatatttttatattagtggaatggtcttttatttctctttctagtactttttaaaaaaaaaataaaaaataagatcaattaattaatgctcattaattaattaaagagaataataattgaaaattatttaaccaagtaatttttattttattattttttatgtgtagtaatgaaaaaaaaaacaagaaatatgcttgacagataataataaggatctaattaaagtttttaaaattataatttatgaaagagaaaagaattaattaagttttaaaaaatcaaacattaaatgtaattagtaacataaatatttaaatttaatttttgattgtagataaatatttaagttttatttttgacagtaataatacttaaattatatttttaaaatttctgtaagtacctgaccattaagtgtcaagtcaatagctaagtagcagtccagtccctgattggttcgggttatttaatttttatttttcatttaaaaattaatttaaatatatcaataagaaaataacacgcgaataataactttacacttaatgactagatacctacagaaattctagaaatataagttaggtattgttatcgtaaaaaattaaactatatttagggctagtgatttgtgatacgactcgaaaatgatacaaaatataagggtttgggtgacacatttaatttcgtgtcaaaattgggattgtgtcatttttcgggtcaacatgcttaacttgaaagtattatttttgggtttgtgtcatgaaacgtttattgaacgtgttatcgtgtgacttaagaaattgtctcgtgttcgtgtttgaggtcttgacacgaataataatcgtgtcatgttcgtattcactataaacatgtcgtgtcataaatgtgtcgacacaaacataacacgataatactaatggtcaaccttagtattaatttgcaactgatctaaacgtgtatttacaccgtaaattatttattctataaaactcaaaaacctttataaaaggtaaaaaaaaatgacatcatttataaaagtaaagtaattaattgaaagtagaattgatcacacatgctattatatatttatttcactacaaataaaaaaaaatgtatgtgtattatatgtgttagagattttattataatgaaagaaaatcaagatattacaactctattgtaa

SEQ ID NO: 266026 - DNA, 525 bp, Cannabis indica
ttgaatccaattttaacttaaaagagaaaagtaatccctaaattgagaaaccgagtagcactatatactattacaggaaaaaaagatcaaaattttcgagactattcaaagtaaggtatcataaataaataaactaaatttattgaagattcatcatgagaccaaatttaatacgaaattaactagagattgctcaaagaaaattatataattcataaatagacctaaccaaatctggtcatttcttgtatcaaattttattgaagcacttattgaatatttcatgtagtttccgaaagatacttgtattttttaaaaagggttctttttcttttttttttgaaaatttggtttttttgaaaatttggttgtgagatatcttaatgtgagagactcacaacaaatgcaagtgatgtcaatgtgagagaactctaataatttgtttattcatgtcatcagaactaatgccttcataaatggctctcaccatttttgggagtagtatttgaagtgatgacagattgg

SEQ ID NO: 266027 - DNA, 746 bp, Cannabis indica
agaagagaaaagttaccccgatatttggtggctcggggtagaacaagtgattccgtgggaaccaaggcagaggtggacgccagggttactcttaccctgagtgcccacattgtaagaaacatcatcccggagaatgcaaccggaagacatgcttttagtgcggcatggtggggctttttgagaaagattgctcttaggcaaagaaagaagaacagaagccagaggcaaaacccgtaccttcttgggtgtttgccatcactcaagctaatgctgcagccattccttctgtggttacaggtcagcttcctatcaacaactacttttatattgtgttatttgattcgagagctacacactcatatgtggctacacggataatcgatctcttaggtaggccatgtaattttattgaaagggtttggaaccctattacctagcagggagttggttatctccaatagacgtattaggtccacgctagttacgatcgaagatagagagttgagtgctaaccttatcgagttggaattaacaaagtttgacattatacttgggatggattctctgtcaaagtatttattgggttttgtgccctaaataaaaccttttacaatctggttagttagcaatataacaaatttgaagtgatttatgtttgcatgaattttacatgcttatggtttaatatgtttattgtgttaatacacaaaatctgttaagtccagatcatatgtttattcacaatt

SEQ ID NO: 266028 - DNA, 851 bp, Cannabis indica
tgatgcattatcttaagctgaaaacagaggccgagatggttacatggctcttaaactcgatatgagtaaagcctatgataggcttcaatgggggttatattcgtgctattcttactaagatgggtttttgaggatcgttggattgacttggttatgaaatgtgttacatcggtctgctacacactagttcatgagggcaagattatggggccgataacaccactccgtggtattagacagggagatcagttgtctccatacttatttatcatctgtgctgaaggcttttcaagcctcattcatgcttatgagacgcgtggtctgattagggggtgtagagttgctcgtggatccccttttgtttctcacatgttgtttgcgagtgacagttatatttattgtagggcctccgaggaagaggcaagtatgattatggagatgctacgggtttttgagttagcctctggttaacgaataaatttctctaagtcctctattttttatattactaatactaatgtggctatgagggattctatttgtgatttgttgggcatttttgaggcggatgagaatggtacctatcttggtttgcctagtaccatggttaaaagcaaaacagttatcttgggttttcttaaggacaagtttcgtaaaagaattcaaaggtgggaaggtcgcttgttgtctagagttggtaaggaggttcttttgaagactgttgctcaagcacttcctaattatgctatgagcgtgttcctacttcctgtggatacttgtaaagaaatggaaagacttatgtctaaattttagttggcaaacgggttcagcacaaaaaagaaatattagtt

SEQ ID NO: 266029 - DNA, 7815 bp, Cannabis indica
tgtgactaattattaattatcattctaatgttatgactaataagtccgtgactaaatgttgttttagtcataatacttgttgtgactaaaagtaaattagtaacaatttgtgtctaaatactatattttaatcacaagtagttttttattgtgactaaaaattatatttagtgacaaaaaaaatttatattgtgacaaaaaattatcactaaaatagttgttttttttagtgattctacatatattttcaaaacaagtgtattattttggcctttttgttttcttggaccgcaaaacaggccttgtataattgggctaattctctggtccaatagcaaaataaagtgatacacaacacttaccccttataactcaataatacttcactttaaaatatttgtgtggttatagtttctatttcttaattgctttttgatattagttcaaaaataaataatatattcaatcataattaatatatgtgtaaaatgcaattttgttataagtgttttgttattatagctatgacacactcatctccaaagcaatagcttaaaaaatttgctaactctattttaacattatatatattattcattgattatctatttaataattatattttttgaggacaaaatataccgaaagaaaattatttgaggtttgcatgtgtgtttccaatgacatattaaaagtgaggtcaacatttaagtactttcattaagagcaaagaatacaaatctttgttttaattttttttaagacacataatggttgtataaacacggaggagaaattagactgatacaatcgatctaatagttgttgatctgaatgtgcagacgcttgctaacccaagagattcagctaggacggaccccactctgattaatcctcaaccaccaacaggcccacaaactgtaggtgaaagagtgacaacccctctagcggggttcaccctaagtgtgtaagaaattggaactaccagtactgcaattgagcaaaccccccccggtattgagatcccatccgctaccaatactcaaaggtcaatcgatgataatactgagctacagaataagcgagttgcactagggcatatacaaggccacaataacattcttcatcttgattagtaaatttagggctacttgacctgctctttgtaggatttcgaagggaccaataaatttagggcttagcttcaatttcttttcgaatcaccgaactcccttcaaaggtgaaactcagagaaatacaaaaatcccaacttggaattcaatatctacgcttcggatctgcgtaacttttctatctactttgtgagacgaacatgcgagctcgattcttttcaatagcctcattagttctttggactacctcgagtctaagatatctccactcaccagcttcatcccagtgaataggtgatcgatattttctcccatacaacatctcatatggtgtcatagtaatggtactctggtaagtgttgttgtatgaaaacttaattagaggattgtacttattctaggaaccttcaaaatccaacacacatgtccatagcatatcttccaatatttgaatagtcctcttggactagacatcagtctgaggatgaaaagtcatactaaactataataccttaacctgttgataggttaaacatttcgatacatactcaactatattacttttcaagcctgatcatctgtatagtgtttttacatctcgatacatctttgttgtcctcggcatccgctatgacatttgctttttcagaatgttagaggatctcacaatcataattcttaaccagttatagctatcgtcactgcctcatattcaaatcttttaaagtaaaaaaatacttaagactgttgccgccgctatttctaaaagttatagaataatctttatcaaagaaaactctttacaacttcaaccgtaaaattttctaataattaaatagacaagagttctaattaagacttatgaaccataatctaaattacaatttacaaaaagaattaaaataattaaaactaaaacccataaattaattagttgattactaattattattattattattattattattattattattatttaaatgaaaagtatttggttattgcttcgtttatttactttggagtttggtctgttagaaaagacagatctctctctctcttcacaattcgaagcttgagctctccaacaatgtccgacgaccaccacgatgaaccaccggttcagcagaacggaggcctggaatctgagccactgccaattcaagaacctgaaactgtaccatcaccggagccacaatctgaatcaaattcggagtcgcaacaagaaacggaagctgattcagatccgaaattgaacgcatccaccggagaaacctcgatccgatccaatgatgactccgccacacaagagactgtttatcctgagctgcgtaaggaccaagggaatcgaacattcaccatgagagagttgcttaatggtctcaaaactgatcaggggaacgattctactgctaatgatacatcatctctttacaggtttttctttcttactgtaattctcaatttgagtttaaattttgtttattttagaattgattcttagggtatgtgtgtggtgtatctatcaatgtagataaatttagtgagattgtttaagttttgaagagattgtgattttggagaaaatggtttaattggaatatttaatgcttttaacagtacactctcatttggtgaagattgtttttctgggtcactttatttgagttattaagggtccatttggtccatagtatgatattgaatctttttatatgtcataattttatgtagtactatgttgaatttgcatacattattttgatataaatcaaatattgtacaataatatgacatacaacacaacttagtataatactccaatacaatacgatctaatatggcggaccaaactaaccattaggtaggagttcaatgcacttgtgtgatttagaaagtactgtatagctctttgtgaactttttatttttggaaggatgaaagttttcaagttttattcaattttgtcataacaaaggtttttagtttatataaaataactgtggaaacatatatcttttctggagataagtttgtctacttactcctatgaattgaacagtcaagaaactcctcatcaagaaggcactgatcagaacaatgctgcaatggacttgattaatagcgtcacgggtgttgatgaagaaggtcgttcacgccaaagagttcttacatttgctgccaagaggtactatcatcatcttcttcttcttctggttgttttctcactgtgtctttataactttactaagctgcaatttaatacttgtttgaaattcagatggtataacagattttcttaggacattaagaccctatgttcgataaaataggcttactctggattttttatattaattactagtgcatgtactcattagaaaagagatgctatctataaaccatttagtcgtctccttctccctgacaacttttttttttcttttatttccaatcttttgaattgtaatctttacactatttgtaggtatgcaagtgcaatagagagagatccagaagattacgatgcactgtacaattgggcattggttcttcaggtttgactactttctttgttttctctgaaatacaaagaagaaatatgttaaaatttagtttttgatacattctgcttgattaaatgagatactttagatgaggacttttgtttgcatcttcttgttgagattcgggcatggtctagttttactctttaagtggaacattcatcagtaatggaacaatgttaaggttaaaataggtgaaataaaatataatgtgtttatatcaaatcagatatgttaacaatctcaaataatatgtgatgatttaaatgtctcggggaagaaatttaagattcagaaaatcgttggtgtaattgtaaatttagaatttctctgtttacagaatggtaaattgttatgcaggaaagtgctgataatgttagtccagatgctacctcaccttctaaagatgctttacttgaggaagcttgtagaaaatatgatgaagctactcgcctttgcccaacacttcatgatgtaagttcacttgtccttatttgctataataattgtatatggcacttgtccttcttcgctatttatgatttagataattacaaatttgattcaatgattgtatatgataagcgtaaattacaaagttggcatcttagaaggaatgatatactgatgtatttacgtgtgcaagtcagattttttttttattgcctgtgtagttatccaactaagttagaattttatttgttggatttctgggcaggccttttataattgggccatagcaatatctgatagagcaaaaatgcgtggccgtacaaaggaagctgaagagttatggaaacaggtttgagtataacttagtactgttgtcatttcaaccttcccatatctgttttctcaaatctttaagaagttgttttgcgaattctttttcaaataatgacatttctttttgcaggctacaaaaaactatgaaaaggctgtccagcttaattggaacagcccacaggtatgaacaatttatttttcatgtctatgcattaactattttgaactatgaaatattttattgatactctatcattgactgtacttgatattcaacattgactgtacttgatattcaatgcaggcacttaataactggggacttgctctgcaggtatgtttggttatatatgcatgccttcaaatcatacttttttatttcctcactgaaatccccccaaccgcttcccactttgtatttccattattttgagttgtatttgtagagtttttactttgttgcttctgctgtgctcattgataggaaatattctttttgatttaaggattatttgacatatttttattgaatttaaaaaaaaaatcaggaactgagtgcaatcgtgcctgcaagagaaaagcaaacgattgtaagaactgccattagtaaggtacaacactttttaatgcaccagtatgattggatgaatccattggtgataggacagtaaacactttcctatcatcttatatctatgacactggacacacgattaaatatcaccatctcattgagatctatgatacatttaagttatcctttattgcagttccgtgcagctattcaattgcaatttgatttccaccgagcaatttacaaccttggaactgttctggttagtttttacttgcacattttgtataacataaacattatttgcccagtacatttacagtaaacatcagaagcctaaattgtctctcttattagtaacatttctaacttatgtagctctacttttcagtacggattagcagaggacactctaagaaccgggggatctggcaatcccaaagatgtttctccaaatgagttgtacagccaatctgctatatacattgcagctgctcatgcattgaaaccaaattacggtgtatgtaccacatgatttctttttcttttaacgtccgtccttaatttaccaccagttttgcattaaaagaaacaattatcatcttttttcctttgataatgaatggatttgtgtaatcaattttaagtacatttattgctattctcttatttcacttttttgctaagtatttgtttcttctggtttttgtgtacaggtttatagtagtgccttacggcttgtgcgctccatggtaattacttgactagaaaatcttttctagagtctcatcactatggcatatttttgtctatattattattattttttttttttccttttttcggtaactaaattgttttacagcttcctttaccctatcttaaagttgggtatctaactgcaccacccgcgggaaatcccattgcacctcataatgagtggaaacgctcacaatttgttttgaatcacgaaggccttcaacaggtaaaaaatacagtaggattccatagtgttgtatcttatgctaaaattataaaatactaaaattatccaacagtatacactcacaaattcaattttccttttatctttcttcttctttcttagtttttttaataatttttttgatttatttttctatgtttccatattattagattagcgtaggtgatcaaagacaaggatcaggcttgtctggtatgtcaggcgatgcggccaagatggacaaaaaagctatcagagttgatgttccagatattgtttctgtatcagcttgtgctgatctgactttaccacccggtgcaggcctctgcatcgatacagttcagggaactgtctttttggtaagaattagtttctatatcaaagttcgaacttgttctgatgatacagaagccttttctagcttgccatgttataattaattttatacgtaaatattgcattatgagtatcacgaaaaaagttactcttaaaagaatccgagtcatgaagacaatagaacattgcagacttccaaatcttttctcatttgatcaagtgtaagctttagtgagacacctaatttatggttttggtttgccttttttgtctctaaagtttttctatcttaattatgagtaatactgtccttgaattttctctactaaacagaaacgcttgtttccatgctctaatgtgtagtcctttttggtaattactcattgattcttcaggttgctgactcttgggaatccctcgacgggtggctcgacgggatccgcctagtttacacaatctacgcacggaataagagtgatgtactagcaggtattatagcataactttgttgagtcgatgtacaataatatatgaactaagattactttctcttagagttatttgtatattgcaaattttttgagatggcatgtctattttacttgttatttcttcaattaattcagatggtttctgttacatttatgtagttttgtttatttagactttgaatcttcaatctgtataccttaagcattttcctttctaaatagaccaaactcaaactcattccattatggactcattcaattggtaatggactgtttagttggaaacaattagagagataatgttactattttgattcttattaccttaatctttcaaaattaatgatatgtgcactcaaaatatgtacaaaacattacattacacataatgacgctacaattttttcaattgaagcggtttcacgtgtttgatgttttggatgcattcttttatgaatattttcacattttcttaaatagaaaatttgtttggttgcatcttattatcagttaaatagtgggatgagttatggagaagaagcaatgtgagaaataagaatgagttgcactcttcattttcatgtcaaatttgaattggcatgtgtaatactctagtctctactaatatacatgcattaatttgaaaatgttagaataaataggtggtgttgtttgataggacacatatgatatcattattaatatttggtgttttaatgtaatttttattagtttcatttcatcatattaacatgtatttttttcatgtttaaaaatataatttaatcacaatttgaatttgtgtatatatatttatatagaagagatttgttcattttaggcataacaaaattaagagccacttaaacattgtgaacgaattagcaataaaactttagaaagcaccaactgtttttgaaaaaatattcgtttttttttt

SEQ ID NO: 266030 - DNA, 520 bp, Cannabis indica
ctgcatccttatccaagttaaggttcggattcaggtcctggtcatggtcatagttcgggtcccgagtcacgggtctggatcttgggttctggtaagggttcgggtttgggtcctgatctggctctaggtcccaatccggattcaagtcccagtctgggttcgggtcccaagtcttaggtcctgatccaagttctggtctgggtttgtgttcaagtttgggtccaatttcggtccaaagtctaggcccttgtcccggtccctgttcgggtatggggctgggtctaggtttggttccagtgcttggtttggctccgtgtttgggtttgggtttagggtttagggtttaggtttagggttattgtttgggggtttaggatttagggtttagtgcttagggtttagggtttagggtttagcgtttttggtttgggatttagggtttagggtttagcgtttagcatttagggtttagggatgaggatttagagtttagggtttagtgtttagcatttagcattta

SEQ ID NO: 266031 - DNA, 933 bp, Cannabis indica
gtgttgatcttttaacatataatgtagtttaaatttaacacatactaaaaataacaaaaattacgtcaacttttacaccacaatatatatcatttttttattctcttttatcattcattaatataattaataactttttatatttttatttatatatttaatataatttttatatacattcaataaaaatttattatttttatttattatttttattgatttttttacacattttattaaaataaatttaatttaatattgaagtacaattataaaattgtcatgacttattttttgacccaaatttagtacaaaatttacactatctattaaaaatggtcttatgggagaggaattttacaaccatgatgcataaaatcattttcctatgctgttagacacaaaacaaaagattctcttttcagttcttcacatcagttttggagaagaataacttgtgacataccaactgttacatctcatctagatggagaggaagaagtcaccgcggcttcccttccctagagctaaatttcatgtacagaccctgcaatacaaacaatgttttggttagttagatttagtccattgacacttctgtggtagggtgggtggggttgagatttctaaatccagactcaagcaaagatttcgacaaatgctcatgatacgttcagaaggcgttacattggttgtgtgtattgtagctccagtagtcatgccaataatctgatccggaactaactcaaagttgaagttttgcagaaagattgctagagaaacaatggactccaacatggcaaactgatcgccaacacatttgcgaggtcctccgctgaatggaatgaacctacaccaaattattatagcgaattagagtctaagccaaaagagtttttaagcaatgaatgaatgcaatttgggtgatcaact

SEQ ID NO: 266032 - DNA, 966 bp, Cannabis indica
aatatcgataatactatttaagggttttgtgtctgctaaggttgtttaggttagaagtgggcgttacaccatgttactttatataaaatagtgatccagcctcttgggtctcctggtctgcagtgacatttcttcatattacttaagttctaatgctactgttttatcatatctggatattttcctatcttaacaagatttggtagatttgaaaattacatgtttttcagttcattattcttttggtttatatttttttatcataactattgtgaaataagaagccctccttttttttagtgcgtatttggaaaatgtttggactaactttgttgcccttcttcaatttgaatacatatcttaattatttgacattttggtggtaggccgagttccaattcgtctgtatgtttggagtgttagtgaagatgttaatgatttagaagacgcaccgcctattgatacttgggacaaaatcgcttatataaatcaacctgtcaactgtcaagagggtaagaaaatacctatgttcatggaaatgcttatgtgaattttgtattcttcttacctgtttactttcaatgcattaattgtagcagtgagagtgtctttcattttcgagggactaatttatggcaagtgtaaagggaaagacaccttttcaccttgtcgttttctgatgcatttggatgaatttgagtattaattcaattgtcttgtttaaaatgttgagtcattaaaaaaaaaagattcacactcacccacccccaattatggagaagttataagaattttgttagtgtggtttattatgggaaattccagcttttacatgcaatatgattcatcttggtctattttaatttgcgactaggaatgaatggcttgacattttttttgcaatagcttagtgaatttaagatttcattgaattggaagggagtgatcacagaaacaaaatcttaa

SEQ ID NO: 266033 - DNA, 878 bp, Cannabis indica
aaaattcttcactcatattagtttgtgaactttattttatacatctctcttttaaaaattaaaatttcatacccacaaacttgcgtggcaagatgtgatttaaatgatatagtcttgatatataccacatttgttcatgttgatcacttgttgagccactacatccggaaccacatggtgtgggcgtagaaatgaaattgattcaacggttaccaattcatgattatgagtagcaaaaaatgcattgtacctccacatgcttgtatgccaagttcaaaaagtgtgatttttggctatcacatgtgtcttttcttggacaaattatcagtaaggatgggataaggtggatccagggaagattgaatccgtcaggaattgcctgagaccaaagacagttacagaattcagaattttttgagtttggctggttattaccatcaatttgtcgagggaatttctaagatctcaatacccttaactgaacttattaaaaagaatcagcagttcctgtggacagataagtgtgaagcaagctttcaggagttgaaacagagattaattacaactctggtgttagccctaccatctgataaagagaagtttgtggtttactgtgatgcatccagacatggtctgggatgtgttttgatgcatgttgatcgggtcatcgcttatgcctcccaatagtgaaaggaatatgaacaacgatacccaactcacgatttataacttgccacaatagttttgctttgaagattttgcgacattatctctacggagaaaaatgtgagatttttaccaatcacaaaagcctcaaatatttctttatccaaaaagatttgaatatgaggtagagacattagttggagttggttaag

SEQ ID NO: 266034 - DNA, 530 bp, Cannabis indica
aatttcaaatttattaattatttaatttatcttataagatacgtttaatataatctttcaaattaaaaggataaagctatcttgtaatttaaaatatgtctaatattaaaatatctgatcttataattaaataatatataaatcttaaagaaattaacaaattttaagatcaaacaataattttaaaaaaataaaataatcaattttaaaatttaaacctcaaaatatcaaaattaataataatctattaaaaataaatattattaatttgcaaaattgatatttaagtttaaatatattaaaataatattttatttttaaatctttggtttgaaattggaaaaatccgaaattgggtgaaaatccccaaaaaattggattttgggttgaagatacaccaactgcgcacgaggaggctccatgcagcctcctacgcgcgcgaaataggtgtcatgcagccttcccagctgagaaaactcagcatttgcatgatgcgtgtgttgggttttgtgccctaaataaaacccttt

SEQ ID NO: 266035 - DNA, 889 bp, Cannabis indica
aacaaaataaattacaacagggttacacaagggaagacaatatccaaaccacttttacttacactagttctcttgtgggttgagatgtcaagcctgaaacgcgatactttctacgaatatttgctctgtgtgtgacttcaaccttcactcctctaagagcctttttaatctagtaaacccaaatcaagagacattaacgttataattagccaaaaaagattggtaatttaatctttaaatacaagcattatatataagaacataaatagtacctttatacgatctgcatcagacaagggcctagatagcacatcttttccaagaagttgaccaacaaactcaattaccggcaaaggttcaatgaatgcagctgaagccatgtctataaaattggatatttaacacatatataagagaacatttcaaatactaaaattttaagtagaaaattcaactaactaaaactaatttaccaatattcagagataggcccatctgtgttggccttatgctctggtaaaatccacaccaagactccaagccctcaccaagccgttgtggaactctgatatcgggtgagaagaaggatctcccaacagggcagtacctaaatcaaatcaagtgttggttaagacaaagaaaatctaaattagcagctaccaacaaaagctgtgaaaaattatacctcttgtttgagagctctcttaatacaatgtcaagtatttgcagggcttcctggggtgcatcagcacgctttccagctaaaaactggcccaaatgatgcaaatttgcctttgctacaaacttaagcactactttgtaatgtctctcccttctgcaatttcaagtacacataacttagaatataatcccaaccctatcatatatt

SEQ ID NO: 266036 - DNA, 578 bp, Cannabis indica
agattagtggggatcaccatgacttgaacaagctatcacacctttgttgttcaaaagcttattttcctctacctctaaatactaagggaattctcatagaaatagctttggaaattatcaaactttaggattttctagcaatgtgcttttttttataaaaaacttggttcatcccaaatgagcaccaaagacctctttttatagtgtttaggtgatcgcacttataattcgaacacaccacacttcatttctctcacataaatgagtattaatctattttgtaacaactatatcatcatagttttgcatttcttaaatcaaattgtgtaacaattcttttattacactaattatgtgtgatcaacaaaagagttataagtgacaacaaattgtaagttaaaactataagttacacatttattcaccatacacttaatatatattattcacacaataatatatttatcacatttttaacttatacttattatattatcaaataaataacaatcccactagataaaatatgttatacacttgtaacatccttgtaatatttatttaatcaaacaaatatt

SEQ ID NO: 266037 - DNA, 2741 bp, Cannabis indica
cccacaatagcattatcatggataagccgccccttaacaaacgcgctctgagaatcagagactacatgaccaagagtggaacgcatcctattaaccaagcattttgaaacaatcttatagattacattgcataaactaataggcctaaattcctcaatcctttgcggcttatcaacttccgggatcaatgctactaccgtatcattaagacatttcaaatcagccccctgattcagcacattcaaacatgtagcaataacatcttccttcagtttagaccaaaatttctgataaaaaagtgcgggaggtccatccacacccggtgccttagtaggattcatttccttcactgctttcaccacttcttcccctgtaaattcgaccactaaatcctcattcatagccgaagtcacttttggctgaatcacccccagaacctcctgaaatacatcttcattaatctcggaactagtaaataaccttgtataataatcctccacaatcttacacaccacctccttatcatcttgccaaatgcccatggaatcttgcaatcctttaatttcattctttttccggcgagaggatgctttgtgatgaaagtactttgtgtttctgtccccccattgcaaccataaagctcgactccgctgtctccaatattgctcatccttctccatcaacccatttagtttatcctccatttgttgaatcaactcccacacatccggctgttgttgcattgttagttcatgaagcactttcttagttttctcaatctcagtatttaatccccgcttctttttcttgttccaaccatgaaatgccttaccacatttattaattttgcacctaagagaggcaggccgccccctaccagtaccgtcttcccacacacgatccacgatctcagcacactcttcttcttgacaccatgcttcctcaaagtgaaatcgagttttacgtttggatttaccacacttagctccatccaccctcaccggcatatcaactactaacgcacgatgatccgactcccaccaatcaagaagtgaaatgtccgccccttcaaattgactcaaccactcctccgtacataaccctctattcaacctctccatgatcctagaattattatgttcattacaccaagtcagctcatgtttaaatgaactgaaatcaatgaatcggcaatcgtctatgacttctttaaagccatccattgcccctggtaacctatcacgaccaccaactttttcagagagactcacaattttgttgaaatcaccaatacacaaccacgacccccatacttcctttcttaaatcacgtagaagttgccacgagaacctcctttggctagcatcaggattaccgtataacccagtaaaataccacggagagaaaccaactccagccacagttgcaagaatatgcccaggcgaactagataaaacttgcaatgtgatagcagatttccacatcaataacaaacctccactcattcccactctatcaaccgtccacaaattttcataattcagaacactacaaacacgctcagcttgatcccgagataatttactctcagctaagaaaataatatcaggaccaatatcacgcacatgggattgtaaggcacgtaatgtccaaggattcccaatcccttgaacattccagcttaagagtttcattgtgatcggcggccttgatcatcaaggctcgccgcttcagattcaacacaagaagcaggtaaatccatagaactagaaacacctaccccataaacattagcaaaaactctatcaccctccattgactcagcactacccatgttgaacacttccttaccatctgcttgagccgcctgcatcccagaggtttgaatagccgaacgaagtcctcccatcttattcttacctcgagctttatgtttaatggacacccttttccttcgcccattactctgttgaccctcaccactaatctccacaccactccccggcataaaacttcccgtctccgctcttaatcaacgttaatcaggcagcctgagagagaagcctcgctctccaaccctcaaagtgggagctaattttttcgatgataaaatcaaagtcattacttctactacctttgaagatcaatgggttccccagaaattcccgccccccccccatccatttcttcaaaacctaactggtttctaattgactcacaacagaaatgcgagcaatttttggagaagaaaatcttggatttcctctcattaatctgctgacctgaccagtagcaatattgatccagagcatccatcaccgcagccacattgccactctcggccttagcaaagaccaaaagatcatccgcatacatcaaatgtgtaatcgggaaacgtccctaccgaccgaataaccacttaaaagtccttcttcttcttttaatagaaagagtttagaaagaacctccgcacaaagaatgaacaataaaggcgattaatacaccaatacaaagaacaaaatccaagatagataatcaagacaatgagaatcaaacatacaaagaaactgaaaacagaattaagagaagaagtgagttagaaacaaaaataagcaatacaaccttcaaaaatgattgctttctttattaatcaccaatgtattttacaatccaagataagagcttagttttacacacttacaattcagctcacatgagaggcattgatcaaaaacacaatg

SEQ ID NO: 266038 - DNA, 505 bp, Cannabis indica
taagaagtgctctaattgaatatttattagcaacaaatacttaacttgttaataagttaagtcagtagatttgtttaggaggtcccataagatatattgtgatatcttatgagttcaaccgagtagtaacggttgggcatactgagttaatatgttgtctatcagcgcagacaatctatacaataaatgaggatatagaattcatacgaaggaatagtccaatcttgtgaaattccaaagttgctatcattagctatgatgtgagaattaatgaaggttatcgagaactatgaggattaaagtaaaaatagaataatgttttattcttgaaatgtagctaatctgggagaatcaatggaatattagaaacatgctgtgagcatatttgataaagattagattatcttagaataatttcttccattgacgaagtgtttgtttaaaactgatgattaaatgtaccattcgttaggtactttaataagtgtggtatgaaaaagatgtt

SEQ ID NO: 266039 - DNA, 440 bp, Cannabis indica
aagatttttctcgaaaaacgtgtcaaattaaaacttgtataataaatattaaactttataatttacatagtaatttacaaacaccggtatcccgattctaaactttcatacaaaatacgtcaaaatataataaccaggtcgcaaaacgactacaaaataaaatcccgagatgtcccgagaccgaacactccaggtcgcgcagctttgacatgtacaacttcatctcagctcaggctcactcttgttcagctttagcctttcctttacctacaccaagaagcagatgtgagtcgacaatctcagtaagaaaagcatatagaatatcatataataccgacttgtatctaggcgcccatacacctatttacaaggcttaacagatgagtaagaatgttccatactagggtacaaccactatacaacatacactacgtacctca

SEQ ID NO: 266040 - DNA, 788 bp, Cannabis indica
taatatgtaagacaataaaaaaaattaatttaaatgtttcataatttagtgtgatagttaaatatactaataaaataatagaaatgatataaatgtaaatgaaaaagtagtgcatttattgtggtgtaaattttacatcatagcaaatgttgtgccaaatttggcacaaaatttgctatgtgccaaatttacatcactttttggcacactattggagcacactttttcttaaatgagctatattttaatttttcaccacttatttacacttctattggagatgctctaagattaaaaaaacaaaaacaacttagagctggttctataggatatataatagttgtaatatattaaataataaataatattatattttgataatataatgtattatattaattattattaatttactataaaatttttaatacagtgtaagttgtattatttaatacataaaaaatagttcgtgttagcttgtattataatagtcataaaggatctggaatcaatccaatctccgacccgaattcggcaacctggaccaaacctgacccaagacccagacttggacccaagaccgaactcagtcccggacccaaccctaagactcgagatccaaacccagatccgagactcagatcaggaccaggatccggacccagacccagccctcgagacccgagacccaaacccattaccgagacacagattgggatctggatccggacccaagactagatctggatctggatctggaccccgattgtaacgccttactagattag

SEQ ID NO: 266041 - DNA, 1534 bp, Cannabis indica
aggtgtggggctataggccacgtgtaagtgacaacatataagtgccaataaattttattttaatatttttattaataaaataaagaatattatataagatatttaattattttaagtaaatattattttttttaattattttaattaaatattttattatataagatatttaaaattaataataatataaaacaataaaaaattaactgaatttagttattcaattactaatattatatttgaatttaaattttaaattaaatatattatatttttatttttaaaaattaaatatcaaattaaaaattaatatacatattatacaaaatatagcatttgtggagtacttttcactttctctcgagtacttttccctttctgtaactacttttactttatgctatctttccacttatgaactatactacatataaaagaagggtctaaagtcaagcctttttgtatcacgcaatcaatatatatatttatatatttgttcttttctcaatttaatttctctacgtactttaaaacaacaaattaattaattaaccgagaagagattaataatcaaatattgtttgatttttcttcaataattaattgattgataatttggtttggtttggttttggtttgatgactacaactacttgggaaggggtttcccttcaataaatgatgtaaatagctgaagagctgctcttggcttgaaaagtgggacttcatggccagctcctctcactgttgcaaatgtcaacccttcatatacttctgtccaccctcccacctttaaatttattaaaccaaatattaattaataatgtatacaaatatacaacattaatctctcatgctcatggataactataaattaagctagctttgatctattaagattttgagttttggtttcattgggacttacacgtggaggagtgggcttgcattgcctattcataatgaccactatataggttaacatatataaatatataattatatataacaccctaaaattgatttggtattacctatatatatagctacgtagcgccgtatatatataaattaataataagcaaataaagacaaacaagcgaacgtggaattaagttatagttgtttatattatacaaataaaaaaggaagaagaagattttataatgttttatatataatatgggcaaagctgagtagggtataggttggcgtttggccattaatgttgactgaaactaccccattttgatatgatattgatcaattattaattatattgattaatcacacgtctaaagctagcttattattatgcttattcattcaagaacatgcaagcaagcactaactgatgatcattttctttcatcatgttctgattatatagtagttaaataatgccaaagaatcaataatcgaatagataattaaattactttatatatcatatatatatgtactgacctgcttcttgacataccaagggtaccatggaattttggtagataatttgagtcgtgctagggagaat

SEQ ID NO: 266042 - DNA, 1494 bp, Cannabis indica
aaagtgatataatgaaattacttttttagaaaaaataatttagaaagtattttttttttttaaaaaaaaaaggggaaatcaccttatatactatttttttaatttaattttttttttttgtaattttagatttgggttgctccagtgatttctatgtagattttagttgcgatttaaattgctctgttgattgttatgtagattgctatatgaatttctataaaaataaagaaaaaaaactatttgatgtgtataaataaaaattcacaaagaaaaattattaagatttatattcttaatttttaaattaaaaaatgaaaagagaacatatttttataaaatatttatactttttgaattaaaaaataaaaattaattgaaaaagtgttagaacacctttatacgttaatttttttttagaatagacttggcacgaaaatgaaaggaagcatcacaaaaaggagaacttattaacctgatcctttcataatatcaaaatatcatcaaaatattgactgcagactatactcggaaatcgtcaagaatattccccatttttaataaaaggtgccaattaatatgagaatttctaaaagataatattaatgtctaggacattttttagtgttatattgttattaatatatttaatagcagatctaatataacttaagaaaataaattttaaaaaatatcgctagcaataataatgctcaattaataagtcgtatggtacacggggctgatatttcataaacatttttaatcatgggtcaaatcatcctgtgacacatctcttaataatattttgaaagtgatctcctaaattcataatcaaattcttcctcattatcctttgcagctggataagttttaagttacatctttcaaataatacctctaatcgttataggtaactacaacacactttctaaatgggtgcattcatatagtctatttatttttataattatatatcttgtttcttttaagttgtttagggtcattagtaaagtttatttaaaaacttaaattaataatttttagtgtttataaaatttaaataattatattgtgtataattaaaaaaaaaaaccattttaacactattgttaatattataaatgatctagaatttttttaagatacagaaagggtgtcaaaacaactcttgagagtgtattggagatttttgtctctttctttttcttttttctttgtatggactatggagaaaagaaacacttcattaatcaaccaccaaaaagaaaacaaagctgctacaccagccaacaataccaaattacgtacaatctgaatcattcttttaatctctgtctatctttacaattataaaagaaaagttattatatgtacaattatttctattcctcatgaaataaaggggccaagcaactaaccccggcccagccaagaaaacaccctgtatttataatgagaaatttacaaaatactggaatttgggttaacttt

SEQ ID NO: 266043 - DNA, 2321 bp, Cannabis indica
attttcattgttttagaattcatattaagttgttaatcaacataccttctatctggacatagaagcgaaatgatggtttccttcgagcttggcttaacaaagatatatggttgagtactcatttcattgattattttagtttagtgaaatatcatttttaggtggctaagtgttttaaagataaaatacattgaagggtgtaacggtaaattaatccctatgcaattgaaatcatctatagaggatcattgattattgggattataacatggatattatagtctatctatatcgtggaacatatagagcgttctatataacagagagtgcaattccaagttctaaggtggatgcaacgaggaattaataagttagtggatttacttggtaaattctagttctatatagcgcttcctaaatggaagtgagaggatattaaaatggacctcgtggttggtttgtccagaaccacgagaatgtactatttagtgtgggtcatagtgaaccgattcacaaagtcaggacacttttttcctggtgaagacaacttataccatggatcagtatgcggaattctatcaaaaagagatagtgcatcttcatgggactttgaaatccatcatttgaaacataaattcaaaatttagatcaaagttatgggtaagtcttgagaaagctatgtgtacaaagttgaagtttagaactactttccacccaaagagcggtggacagtgtgaaaggacaataaaaatattagaagatttacaacgagcctgtgttatggactttgacggttcatggagcaaatacttgcctttgatagagttttcgtaccaaaatagctatcaaagtacaatagggattcttccctatgaaatgttgtacgataggaaatgtcattccctaattaactgggatgagattggggaaaacaagtatttgcgtcctgagttagtttagcggaccaatgaagcaataagtaatattaaggctcggatcttgtgtaacaccataactaattaggcatgttaatgtgattttaaacttactatactgctcgttgctaagcaacgagattaataaaaaacgttattaattaaagctttcttatttaattaataaacttaaagtaatacatatataaaattttgcgatcccgatacaaaatacatttataaaagtttgctagtttaatacaaaagttctgtcacctagcgactgtcagcaaaagccttgatgtcccctaagatcgtacgctccaggcctaacttccccgacatgtacaatcttcacctgctcgttctcacgactcctcagctttagccttgctcttccttacacatgaaaatagtcctgtgattcgaaagactaagtaataaaagcataacataaaacatgctaatatctcgggttataaactagcgcccatacacccaatcataaccctaatccctgtgtcccacacggtactgagtctagaacgttcatacaacaatactatcgaccataatgtcaacctatactcaatatgctagtaatactatagccatattgatgtgacaacatcaatcagtattttagccaacatacacttatcagtaatctataaaactctaaagtatactattactgctatcaatataatctaagaggcataaacaacaggtatgttaaacatgtaataacatatgcatgacattatacttatcttacctcaattctgaatccaggtctgccagcaaacctgaggggaacaactgctcggcaaattataggctcctcaatcacatcggattcaaaacatataagtgatccactaaatcacaaccgggacaaaggtttaaaaccaaaacttaacctactttaacttaatacaacaataacacaaataagtgactcgctaaatcacaactgggacttaggcttaaaccaaaaacctagctactgcaacttaatatggcaataccctaaactagtagggaattaaccaactagaaacctgaaactaacacgaatcaacaagctgaatttttcgagattcccagctgcaaaaatcggttaacaagttttataggcacctgtaaaaccggttacccagttttcccaagaaaacaaacaaaaatttgaagcttcaccaaaacgattccaaactcaaccaaactttccagaccaacatattataccccaataaaccatttccaaacaataaaacaactacccaagcttagaattgaaaaacacaattaaagcttcaagttttagttctaaaactcaaaacttgataaacctactaacaaccataaaatcatgctcaaaacaac

SEQ ID NO: 266044 - DNA, 943 bp, Cannabis indica
ttttcaaaatgtataaatttttaaaataatttttttttgcacattttttgtaattattttgtttttgttgtacatttatgaaaaaagcccataaatgtattgttaatgttttctcatgagcttaagcaaaatgtgtccacttaaagaaagaaaaaaaaatagtgatgatgtatgcaatagtgttattaattagttttaaactttattaatttaacattaatgttattaatgttaaataaatgttgacattaatataatcaagtgtagataaaggtagtagcaaaattaggtaccatctattatattttgtcactctagaaaggaaaattattctcaatctcatctctaaaaaattcaatgagtatgtacactcttcataaataatacaaggaaataatatgcatgtcacttgagattcctcatgacgtaaataataaactattgaatttgtatatatcatgatttttttgaaatataatgcctattattgactttataaacatcaataatatccattaaatttaagttattagttctatgtctatccatcttaattatacgtcaagtgattatcttaaaaaacacttaaaatttcaattgacacaaaaattaataaataaaaacaaacaaaaaccaacttaattaaattgattattattggaagaaaaaaataaattgtaaaaattaatacaaattgtgatggacctatattcttaaaaataaaaattcatatgaaatttatttgctactattatacaagattggctagagggtggggcggtcgggcctaagccacccagccccataatttcaaaagctttaaaaaattaaaattaatatatacacatataaaagtttgtataatatattaatatttgattcagttcatttaacaatgaacttacataacaagtggtaagtataagcttattatcatgaggta

SEQ ID NO: 266045 - DNA, 984 bp, Cannabis indica
aaaaatgtaaaaaataccgcctgacagtatttttagtaaaaaaatagcaaaagttagtataacatgtaaatttcccaatatgtaaccatcatgcaggcccggccctgggcataggcgggctaggcctgtgcctagggcccacccagcccaggggcccaaaaatttgtttttcctcttttaaaattatatattttttaccgattttgaaaaataccacattttttctaacataagggcacaaaaaaaaaaatttccctatggcccactttgtttcagggccggccctatcatggttacaatttttttagcattagattatcattgaatggttgtgattaatttggaaattaaataaaaataaataataattaacttataacctaatagtcacctaataatctatttccttataaaattttaatgatgattaattatattttaaaattaaattaattttttcgtaatttattattaaataaggatcttttagcaattttttaagcaaaattctttataatttaaaattatacatatataatttcataattaaaattttattatacttataactttaatttaaaagtattacacttaattatttagtttttttaattcaaacatttaaaaagtaaaaagtgaaataggttgaatgtattttccaaaaaaaaggctaaactcttctatctttttttataaggagtcatttactcaaaaaaccaaacgagagtcaaaaaatgaagtcaagctcctccagaaaatgaagcaacctcaaactcgaatagaaaaactcatacttagtttttctagttataaaaaaataattcaatatcatttaaaaataattaattatttaaaaatttattatacaataagagaattataatttgtctaaagagaaatctaatttttgtaaaaaaaaaaaaaaattaaagcttcattgtaaatattaattaaatgactcaactgttaaaataattatagtat

SEQ ID NO: 266046 - DNA, 708 bp, Cannabis indica
catcttctccaaccgttctccttgtcttttccttttgaaggcatttttcttaggtctgagaaccaaaaactaatcagttaatgaggattgaatgctaataatataaatatgtcttatacatataaatacaaagatacgtattactattattatttaaaataaatctaaactatttggtggcacactccgaggtaatctgataccatttttctgtcacgactcgagccctatgccgtggtagatttgtaatatccataacttgggtggtcaaaggtcatattctgacccttgtaggaagataaagcttataaatgatcctttaatttatatcacaaaatactaatttaaaagtaatggattaactcctatattaataagaaaatattagtaccaaaatcaggacagctcatcaatataaaagaacaataatgtcctcacagttatgaagtcaccgaatagatagatttaataagttaataaaacacagaaataatatttagcattcatcattcctcatttctaactaacacttagctaatataagtcatcctgaccttccatttcagcttaaatacaaaatcagtttcattggaagattaaatagtagaataagactaaactaataacgactttcttcctcaacggtaccatcctcatccactagcatcaaattgagttcctagaatgggagaaaatagggggtgagct

SEQ ID NO: 266047 - DNA, 500 bp, Cannabis indica
atatttttgtaaatagcccaattgtaaaagccccgtttcggacaagtgaagacaagagttggttaatggacttgggcttattaattatctcaattgtctggggctaaataaaatagtagaaattatggttttcttgaaactttgtttgaaaaatgggtagtttaagatttgtccatattttatggtatattttatttttatttttgtttttgttgtttttttttttctttttatggtttaggatatcctatatttctgtaaacattatttataaagagaaatttgacttcttatgcatttattaggtgtaaactaatacgttaaacttaagtggatcaaaattggtaggatagctaacttttattgatacccaaaaatacccttttcattttgaattctctctctctctctaaacttaagtggatcaaaattggtaggataacaaacttttattgatacccaaaaatacccttttcattttgaattctctctctctctct

SEQ ID NO: 266048 - DNA, 568 bp, Cannabis indica
gacgaggctgttagtcagctactattttgaagttgcagaaccaaaatagtaatctttattatttacaaggctcaaaccaacatacaagtctgttgcatttagaaggcgctgaccaagtaaataatcatatgtatttagaaggtacagacccaatgaataatctgctgcatcaagatattgcaaaccagatgaaccatcagtatcagttcctgccagataatcaagagagaagtgcctttacttctgcagagtttgatgctggctcttaccctaattcgtcttcaggtataatgtttgcagatattttctttgcacagcttaaaataacttaacacgttaactgagctgtgtattcggttgttgaacaccggtggcacaaaatctatgtggaaatgggatttcgggccagctttaaaaaagccctcttctaaaacaacttcccttctctcacgtatcattggtatcaataattggaatcttttaagaaaaaaaacaatggtatccaggaaaatttttgtttagctacatgatatttgcattgtttaattttgtttaatttttggtttta

SEQ ID NO: 266049 - DNA, 1105 bp, Cannabis indica
tttattgtagaactagttttgtttttaatttatgtttcagtgttttaggaactgatttcccctttattttttaattgtaattgatttgaattattgtgtgttacttgtttgtattcattatattatacatctggttctattttcgttataaccggttataatttaattataattagtttgaattattttattttatttgtttttattccttgtattacagaaccggttatatttcaattataaccggttctatttttgtttatatttgagacatctacttctagtaacttttttcagcgacggtgacttttctggcgccgatagtttttccggcaacttctccgccgccagtgacttttccggcgacttctccggcaccagtgacttttccggcaaaaacttattattgtttacaaatatgggatttccatcttttttacaaaaatatggcataaaaaaacccatataaatgtaaaaaaaaacaaaaaaacacataaccacttagctttatttatttatgcataaaaaagtaaactcttaaaattttctcatattttgagtaatttttacttatcttatattatttttttggaaacatagaaaatttggaaactaaggagaacatagttatttattttctgttttctaatctgtttttttaaaaaaaggagaacataaaatattttttttgtagtttccaaaatacaaaacgtgtttgagtaatattttctaaaaatagtttttagattgaaaaacaaatttcaaaattacacacctcgacacgaacccaaccccaccctaaccccaaacctagccccgaccctaaccccaaacctagccccgacccaaacctcgaacctggccccgaccatagaccttagaccgcagcaccaaaccccagacctttgaccttaaacccaaccctagctctaacctcagacctcaaacccagtgtcaaatccatgaccccatacccaaaacctcggtccctaccctgaacctcgaccacgaccttgaccttaaacctaggcccaaccccggtcatgaccacagttacggccccaaactcgacccagaccccggacccgagtatgtgagagaaaat

SEQ ID NO: 266050 - DNA, 773 bp, Cannabis indica
cttgaggaaaaagttggagccacctttcagtcaccagagcacgatctaaacgaacctctatccagttatccgtcccacgactcttctcccaagtaaactgatgccccaaaatgtctaagtcaatcaacccacactcctgaatagtatcccgaaaaccatcaattaaccagttaggataagggtgtccccctcttttgtcgtcctgagagagaacattattcatatcaccaatcacacaccaaggaagagtgttcccatgagccaaagtccgaagttgctccaaggaagacccacgcagacttcttttcgactccccataaattcccgtaagacgccactccccaatattactagaccgaacctccacatcaacaaagtttgttgcgaaattcaaaactttgacatcatccttattcctccataataaagctacccccccacttctaccacatgcatcaaccgcaaacactccttcaaatttcaacttcactcgaactcgctccaacacatctttacgacacaaagtttcacacaaaaagataaaatcaggtttcttatgggccacagtatcaaaaaggaattgtatcgcccgtgggttgcccatcccacgacaattccaacttaacgtactcataatgcccggtgggtctggaaaccagagcccacctcgaacccgttttttgagggtccatcaacaaccaattcaacattatcctccgcatccatatcaacatattcaggcccacctatcccttcatgttgacgtcttttct

SEQ ID NO: 266051 - DNA, 775 bp, Cannabis indica
acatttttttcctggtcacatgaggatatggtcggaattgatccttctgtaatttcacatgtcctaaatattgatccaaatttctggccagttcaacaaaagcgaagattgttggacaaggagtgagccctggctctgaaagaagaagtagagaagctacgcaacaataatttcataattgaagctttctacccggcttgggttgctaatctggtactggtacccaagccgaacaagaaatggcgagtttgtattgatttcaccgacctcaccaaggcacgccccaaagactgttttccacttccaagaatcgatcagcttgtgggcgcaatagcagggcacgaaatattaagcttcatggacgcctattcggggtacaatcaaattaaaatgcatccacaagaccaagaacatacaagtttctgaacagatgtgggtctgtattgctataaggtcatgttgtttggtctcaaaaaatgctggagctacataccaaagattggtaaataagatgtttaaagaccagattggacggaacatggaagtgtacgtggatgacatgctcgtaaaatctaggaaggctggggggcatataggtgacctgaatgaatgcttcaaagtcctcaagaagtacagcatgaaactcaatcccttatagtgctcctttggagtcagctcgggtaagtttttaggctttatcatcaacgcccgaggaattgaagccaatctagagaagattcaagccctagaaattattacataaacactagaaatt

SEQ ID NO: 266052 - DNA, 1003 bp, Cannabis indica
aaaaaaaataaaataaaaatgtagagtagaaataaataaaataattataataataaataatataaaagtatatacattaataatttactctaaaaatattacgaatctctaaacataagttaataaaataaagatatggctttatttaataaaaactcataaatataaaaaatattttcccacaaaattaacttaaattaaaaaaaatcataagttaagtaaatttataatttttccatattgatgaaacttaaggaaaaaattctatattctacgtcattttctctttacaataatcaataaagaaaattatcaatccctcaaactcaaaacgacatctttatgcccaaacgacacgtcgtattgttatggcaagttcttgtgtaggaacctaacaaactatggtaagacgatatttttattaataattcaatgcccattggagataattcccttggcttgaaatttctatctatccaacccaacatcatgattctcgttgttagcattcgaggatgtacaagagcatatagaaagaaaaacaaaattgtatcaaaaatatttgttaaacaaagaccgacctttactggtgttaataacatggagaattgctcatatatatagagagagattgatttattcaagaaaaacttatttgattatttaaagttataattcataggaagggtcccaaaatcaataaaagaacattaaaatttaggaactgtattgcataataaacagtaaataataccccaatttactgctaaagatagtgttttttttttggataggcagcaaaatagttaaacaatagaagaaatacagcaagtctcgttaccaatctaacaagtatcttctgtatattatttataataatataatatatagattaaatatatgtaataaattaataaaatagtaacatatgacaatgtatattagttgttcatctttttgttaatatttggggtaggttacttgttactatgagtaacctcca

SEQ ID NO: 266053 - DNA, 620 bp, Cannabis indica
atatcaaataaagataagtaataataggcaatttaatataaagattatataagtatcccagaaatcctttgttaaagatttcaagttgatctggttgagttcttgaatttcttgtttgtgtttcttgatttcttgcttgagttttcttccttcttgattagtttgaatgttgatccttttccagctttaaccaagctctgataccattgtaggaaatttaagatagtcttttactatcctgcccctacaccaacaaatcaaacgaatcaattatttaaggtcaatttcgacctttccctgttcatttgacttttcaaagtcagaacatcaaaacgacttcgttttgtgtttgaacaaaaaccccaaggctcgagaaccttctcagtcacttcctctcttccttaggtttcttcctcgaaaccctagcagagagtttctcaggagtttctctctgagaaactcgaagccaaacccaaagcaaacccagaaatcaaagcccaaacacaacacacagatcagatctacaatgatctgatctatacacaaccacacacacaaacagaaatagattagggttagaaaacaccaggatttttgccgaagttcaccaataaattggc

SEQ ID NO: 266054 - DNA, 592 bp, Cannabis indica
taattagtaaatctgattatttgaaataggttttatttagagcagccaacccaacaaactcccacttgcactaatataaaacaaaaagtacatttcaaataatctcaacaccttgatatccagatcaagtgtattatatagtattctctttgtaatagaatctgacaagttgtaatcaatacatcctttttctaccattacatattcttaatcacaaaattcttgatattgtaaaattcatctctatatgtctactccttaatattattggtacaacactaaaaactgtatagaactttccatagactgaataattatctttcctgcaactttaacattcagtctcactggtagagttagggactttagatcagtttttacacttcttcaaaatcactgctccatcaccagagtaatcaccatctcatcagtagactttctagtattaatgcaagtctagaaacctgatttagtgtagtctaagagtataaaatactgctcttatcgactaacatatagttcctcttcttgatcttaagatttacttgattgtgtttcaatgttggattaatcggatacctactcattactc

SEQ ID NO: 266055 - DNA, 906 bp, Cannabis indica
attatatcatatatagtatatataataatatacataaaattataacatatgaggagttacaaatctgaaagtaaattgtaacttaaggatcacaattgataaatatgtaattatgtgagttgttacatatgggagttatggaattaatgggataagtttctagttgttagaaattgttacagtactctcaattatatcatttaaatggtgttgggacgttgggaaaagatttaactcggagaggagttacattttgagttctccggaaacagttgtttaataattatttttatgctgttttatggttgttttgtcgaacatttgaaacatacgtgacttgacacgtaacatctatctagtatatatatatattgatgattcatacaatgaacatagaatcagacttttatttatatatttgtcgaagttttttttttatatatttatgaatttttatatttttacatgtctttcagtagttttttttttttcatgttgttttcccatatataatagcaacttaaaaatattgaaaagacaatatactttgtaaaaaaaaaatggatatccctaaaattataaactttttatttgagtatttatggaataattttttttaatcagatagtaatatgagaacttataaaatgaaaatgttaacgtacaatgtatgttatgtggaaagtcaatcttaataaataatcatgcattaatgacaataatagtagtaaaggaaaacaaagcatttaaaatgaaagaaaatgaagggaaaaaaaaaaagactgggttacaataaactcttacgcggcttctctgctttcttctcccactttttctgcactatttactctcctccattccctttcacaaaaaataaattgagaaaaaacagaaaaaaaaaaacaa

SEQ ID NO: 266056 - DNA, 3988 bp, Cannabis indica
aagggtaacttcacctgtcaaaagttacagacaagcatccgtaagcattgaaacactagctatatgggtctgaagcatacaaagattcttgacatgctcaccaaatcatcatggcaatactttaacagggccaaaccaactttaaacacaatcttaacaccctgtcaaaaatgtttcaaaaggcataggcataatgagtttataaccgaaagtagtagttcaaagaaactagatacagcgatatagtaaaccaacctcagagagaaatacatcccaaattcgtagagctaagtggaacgggaatgaataagagaaaacagttatgaaccattgactggcatacatactaggattgatcatttcttgagtaaaatgctccccaagctttggcagaaactccctcaccaactgttcaaactgaaaaaggtattgctgtaccagaggtaaccctacctactcagcaagaacaaacttaacagcctcaggatactaaaaatactgttctttgtccacaaaaatgtgaatataaaaaaaggtttcatatatatttaaatggctacatgcatgcacatacacatacacacaaagaaaccctctaattaagcaaggaatgcaaagacaacaaatagaattgtcagatcataagagatatctaggaaaagcttaaaatgtctacataattcaaataggaacttctactaattagggagccttaagcacattatattagtattgcaagccaaggtccaagatgtgtggaagcacaaacactaggataatgtgacaaaaataagattgaagtaccagatacaatccttccattggagcatgcacagctcctttaagtagtgcaaccaacaaccaaaatgcatcttcttcactcatataaagaagcaacagcccagccaggaaacccattccctgcattttttttttaaacaaaatgactttattcagcattccacttgaaaaaaggtaaataagagagaaggctgaaaataacaaacctgaacatatccaacatctctgtcatagacagagtacgccttcagaacattatagagggacctttgaccagggccatgtctttgctggaagaaaacatgcgaagggaaagtacgagaaatatctcgaattatatccagttctgaagctgaagtctcgtatatcactaattgctgcataaaaaattaagcttcttcagcactactgtatgaatacgaggaagcaaaagaactgatagtatttgaagagaatcaccgtgaatcaagaaaagcattatgggaacatactttggcagtaaccttaatcacaatcgaaagtaatactgatgctactaaactatagaagatgtacaaatttggcaccaattatcaatcatacagagcaaaaatgaaagtacccagaagtacgatatgataaacttcactccacaaaagattctatttttagaaaaatgaatcaatgcagattcaataaaacaaccaggattttcaaaaaagtgatcagctataagtatttactcaattgatctatctgctacaagaaattgataaagttttaaactacctaagaaaacctctgccaataacaaaagcaagtctgggtactttaattttagatgactcagaaatgcatcatgagcagagtaggtaaagcttctgtgccatcaagtagaggtatgtagattcagaaatttaaagaaataaaaatttaaagcttctgcaaaagtatacacattccaaacataccatctgtcaacacaccactttaaaagactacaatccaggatccacattaggatcaaaattcatcaaaagtaagataatttaaatatctattcagacaagctaagaatataaatattacctcatatactcctggattcatcagcaaaaggtcacgacttcctgagatcaactgccaaacaagaccccttaaacaatcaggaatccctttcctaatacgccttttaacaacatgaggttttcttctgacataatgcttccaatcactgcctcctaccccaatcatctttctccattttctaaccctcctttcatctctaagaaacatcaaaagtaatcacgagttgatacatcttattgtgaaatctctcttcactagaacatctaataatcatttaaactaaatcacttataaatgattcaagtaaaaaaaaattaaaaaaacacacctttcgtgttcactggctgatctactcttagtaaaagcatcagatgagttattgtgttcctgtttcacaaacccaaatctgtccaatgcccttggagatggaactggaccgggttcataatcatctattcgtttcttctccattgtactatatctaacaaattaatttaaagccataaccttgccagacaagacccacatataaagcaatctgcaataaattaggaaaaaaataattaatacagcttgcagtaaactgtgatcaaaatccaaactgagaagaataaaagaatatatatgttcctactgtttcccaatgacccagatttcaagcactctacataagacttttcaataatgaaatctaagcaagaggattttattataaagatacctaaagaatatgctgaagcaaaatgttactaccagacaaaaccaaggacataaaacccatcttacaatgattcaagcctatataattcaaaatgtaagacaaaaagctaaccatacccaataatgaaacacaccataaattgataatggaagcattataacggatggggggttcgacccattaccataaattatcccctaattgagataaaagtgtaagacccgtgaagaaaaataggatgagagaacgaaactaggtctagaaatctgagtcggggagtgatgggttttcttctgcggacaattttatgtaatatttttgctaataaatagtgttaatatttgcggtttcttcttaccaatgaaatcgacagaaaaggaaagctcagatatggtgaagcttgtccttccaatcacatggatcataattcataactacgcgtgtataaacaaacgacaaatctcattggtgtttctgtgattttaaagtgatcagaagaatataggtgttctgcagtgggtttcattcgacaacaacaataaaacgacattaaatagatcgacgacattaatatcagacaacgacagcttttggagaatgaagtggttttgaattaaagactttttttttattattagtttttttttttttttagaagtaatggaaaatatatttatgattagtagctcaattgaacaaagttcattataagtgtaaaatctttattgaaaatttacaaaattattttagtattgttgctcttaatttcgcccaaaatacgtgaatcaatatgatatagataaatcgactaagcttttttgcatcaggagtgtcaatgagaatatgcctcccggaggagaggtgaaggctccacgtactctcggaaaccaagggaacgctaaggtatctccgggaggtactggaccttatttgaacagtcacctctcatttaatgccgcatgggagaaaacgtattggaactgccataagcaatatgtctgacggcgtaacccctcttttgcagctattacgctatgattaataaggctagtgacgactactttatgagggatcacatcaatcaagaagggataaaggattatatccgcctaacccctaagatacctacagtataggtcatgtatttcctattttgcatcgactaggaatatgtgcccctatcaaacctgcacagaatgacaagtgattcaattctaggaatcaccccagaaaaacactataaataccccccagatgcactgagatgggggtcgagaattctgggttcataagaattaaatagagcaactaagggaatatataccaagaacattctctgtaataaatactctcataaataaaaaacacttgtggactaaggctcattaatgtcccaac

SEQ ID NO: 266057 - DNA, 454 bp, Cannabis indica
atatatatattaaactttgcattcctattggtaaaaatgatgcaaataagcataagttaaatataaattttaaaatataatttacataggtagtttaaaataaaaaagaaaaaaactcttatttatatgtatttttgcaaaattatgtttttattcaacttttctcaggtatattttaaaaaatacttataaataaatatattattaatatttagtaatatatatttataaaaaatatataaataaaagttaaaaacactagtattatttataagtagagatttaatgttcccaataaagtaaaaatttgagagctaatatgctaaaaattaattttcaggaactagtttgtcaaaaattatatatttaggtatcaatttatcaaaaataatttaacaactaatttgctaaaactattagtacatataaacaataatatgtgtacacataaatt

SEQ ID NO: 266058 - DNA, 434 bp, Cannabis indica
ctactactgctattactagtgtcaaataacattggacttgataaattttggagtcccttgatagcctaggatataaaaatgatatttttctagttcaacattattagactagaaagtctaacaattaatgtttgactagaaaaatatttctagtccaatattattgaactggaaaatcatatttagtctaacattattggacttaaaaagcggtcccacaacatgaaatttaattgttggattagaaaaatatttctagtctaacaatgctggacttgaaaagcgatcccacactaggaacacttttctagtctagctgttagaaatataaaagagagttagttataactgttattagttatctgtttcaggcttagtcagttagttagaattgaagtttatctgtatctttctgttatacctgttgtaactaa

SEQ ID NO: 266059 - DNA, 789 bp, Cannabis indica
cccctgaactaggtgggccctaagcacaggcctagcccgcttatgcccagggccggccctgatcgacattccagcttagtttttaaaattctaaataataatataatactaaaagaagaaaaattataaaaaaaaaaaaaaagaaaacataaatgttagtctacatgtttagtagcatacgtgcatgtataataataaatttatttatatatatatatatatttatttttggtgatgaggtgcatgtaagaaaaattataaacatatatacatgattttcttattctaattaatcggaccaacttctcaggaagataaatgcttctagaatttttgaaaaatcaatactttcaaagcttcactcatttgtcaaaggtgtgtttgatagatgcaaaattatttgataattaaactatataatatttggtatgagagttattaggattaagataacgttttccatgaatagctgcacaatcaatttttttctttatgagaaatgttaattaagatatattaagttatatacttttggaaatttatgtagttttaatggttgttctagtaaatttttttatctctttcagtattgttaatcttgtttttaactaacgatgctgagtcaattaaaactattagaatgaagaacaataattgaaaaaaattaagtataaaaacacatagatttataaaggttcagtcctgtgataatggtataataacctaattcttttctacttgtattatttgtgagaaaaaaaaaaataagaagttcttgatctctctcga

SEQ ID NO: 266060 - DNA, 2249 bp, Cannabis indica
caataatgggatattttcattaaaaactatggaataaaaaatatcttaaagttttgaactttgagtttgtattaatatatgcagggaaaactatgattgtgaagttgtttgcttcactgctgatgttggtcaagtatgtgtttcaaatttgaatattttttttttttgggggtggaatgttgtttagattggtattaattaacaattgatggaatttttatagggtataaaggaattggaagggttggaagagaaggccaaggctagtggggcttgtcaattggtagtgaaagatttacaagaggaatttgtaagtgattacatattcccttgtttaagagctggtgctatttatgagagaaaatacttattgggtacttcaatggccagacctgttattgccaaggtgagttcttcttctcacaatagagtaactgaacagaaatatacaatgttatgttgttgattgattcatgtcatgatgtatttatgtaacatattgttgaaattaaataggccatggttgatgttgctaaacaagttggagctgatgctgttgctcatggatgcacaggaaaaggaaatgatcaggcatgtttaacaattttaagcatttgaaaacatgaatgaaacattcactgtgcttattttttttactcagttctgtttttgtttcaatttattcacttcaggttcggtttgagttgactttctttgctctagatcccaaactacatgttgtggttccttggagggagtgggatattactggtagagaggatgctattgaatatgccaagaaacacaatgtgcctgtaccagtgactaagaaatccatttatagcagagatggtaacttgtggcaccttagtcatgaggtaatattagttactcgcattgataataaatctgttcatggtctagctaagcatgcccttaattaattcttttttggtagggtgacatcctagaagaccctgcaaaggagcccaagaaggatatgtacatgttaacagttgatccagaagatgcaccaaatgaacctgagtaactttcttcctgagcaccttcacattgattttgagttaattattgtcatggttttaccactaacatagatattgttttttcctttgaaggtatttggagattgggatagtctcagggttgcctgtttcagtcaatggaaaggagctttcccctgcatcactactcaaagagctcaaccaaatcggtggaaagcatggcataggccgagttgacatggttgaaaatcgccttgttggcatgaagagccgtggtgtgtatgaaactcctggtggcaccatcctctatgctgctgccctcgagcttgaatcgttgacactagatcgagaaacaatccaagttaaggactctctagcactcaagtatgcagagttggtgtatgcaggaaggtggtttgatccacttagagaatctttagatgctttcatgaagaacataacaaagactacaacaggttcagtgactctaaaactgtacaaaggctctgtgactgtaacaagtagaagtagtccctttagtctttacagacaagacatttcatcttttgagagtggagacatatatgatcaagctgatgctgctggcttcattcggctctatgggcttccaatgagagttagagcaatgcttgagaagggtatgtgatgtgatataatataatagtctttcctttcaataacagtgctgtttgcactgagtcggggcatttgaggttgtgttcatgcgattctcatatgatgctttagctttctttctttttacttctgagctttgattactaatgttgtaatgaaggccaggtgtaactctcctttgtttgagaaataaatgcaattagtcttaaaaattgtctaaattaaaatgcattacatgtttttaaatctcttaattcagattataaaagttagaactgtaaattttattgtattttcttttaataatgaacatatcattgtacaaataaatttatctaaacaagtttctaatccaccttgaacaccaaatggtgaacaagctgtaagagcatctctaaatggggcaataccatagctttcaaaataggcacattatcttaaattttatttttcttttttatctacataaaatttgacacattttcctataaaaattactctaatagtgggcaaacttcaaaaattgttcaccatagtctcacataccactttttaattttttttttt

SEQ ID NO: 266061 - DNA, 595 bp, Cannabis indica
ttaagtctagcacataatttacactaacttaaaaagaataataagaatatcattaataagagtagagtatatattttaaaaaaatataaaaaataaaaataaataaaataaaatgaatatacaataatatatataatttcttcaattttacatgaggattggtataactttctctttcatcttcttccttttgttatgatcgaaaccaaatatatccatttagaaaaggaaaaaaagaataatatatatacatagtttattatctagtgaactttattaattaaaaagaataattaatttgtttcttactctctttctaatatataaggcaagataataagtgtcattttctcttctttaataaagagaataaatccacgtagatatattttttttttatttgcaaaacacaaaaactagggtaatttgcgatagaatcaatattgtattttaattttatatacttaacttgaaacaaatatataaggactcgtttggaacaccatattaagtcgtattgtattgtattgtattgtattatattgaattggattatatatcatatttttatataatactatgttaaactttaatt

SEQ ID NO: 266062 - DNA, 585 bp, Cannabis indica
attgaaaatctcataaagcaaaaaaatcactaacatagcccacatctcaatgatttttttcttcttgttgtggatctgaaaagtggaccagaagagggggaaaaaaatccttagacaatgagaattacctgactcactcactcagtaagtaaaccaattttcaaattaaaccataaatagtctgtatggatctaattaagaaagaacgaaaagaaaacctctttctcaatgagcttggagaagaagcgctcagcctaaacggttgtaacatcgcctcaccaccgtttgtccccaccattgaacctactcgttattcagagatcacccagaaatatcccacaaaaaagctcaggcatttggctatgattgtttgttcagaacgaaaaacaaaaaatctataaaagagacaatattaatacctgataaatcttgctgccatggttggttgagttgagaagctccttagtagaaaccaaagcgattctcagagtctcaagtgatttcaattcttcttcggccaaggctttatcgttgtccctcaattcctcaaatagaggactcggaagcttcactctccgtatcaaa

SEQ ID NO: 266063 - DNA, 770 bp, Cannabis indica
gagcgcgtgagggtgtatttaatgatggcatttaatgcagcgattcactttttgcagaggtcgattcgtttcacgcccattgattgatacggcgcattaatggtgtcagacggatactcaagcgtttccaccgcctttattgtaaatcaatctggtccgttgatctttgggcatttgaatcgtgcgcttccctcaccgttcgattggtaggtgatgacgcctgttcctcatgcatttttgcctataaaagccaccatcttttcttcatttcggttacttcccatttcttgccaactttgctcgaatttcctagagagaaaattctcagacctagaacgaagccttcaaacactttgcgattttcccagttcttctttgctcgttgctaccagtccttctcgtcttcactcgacttgcatcaggacccccagttcaacacttcatcgtaagttttttgcatcctttgctttattacttattctgtttgtttttttctgggtttgcattcgagatttctgggcatgcaagtgtttaggttcctcatgcagtctgtttgaatttactgctctagtggtaggatcgccattgtcatgcctctgttgttattgtgtattttctttgtagaagaccatacgttcttcgtataatggttgcttagggcatagaacagaatcttttctttctgttttctttatcgtgtaaagccatcttctgcgaatttactgcacccgacacttgtccagggaatccttctagggtttcctgcgtga

SEQ ID NO: 266064 - DNA, 422 bp, Cannabis indica
aatgattttattatatatttgattacatatgatattttattttattgtttttataattttattattttgaccctattattttttttatttttttagaattatttatttaatattataaatttttattttaatttaagttttttttaaaaaataaataaataaaatagtccaatttattttcaaaccaaatacaaaagtactttgagtataattcaatcttatttagtctattctaattttgatttccaaacaagtcctaaaagaaatagtttggaaaaaatttcacgagcacaaaaaagttttaaggggaaaaattaaaatatggtaataattgatggaaaaaatactatttattttttggaataattagcttttttagtccctgtacttatgacactatactattatgctccttaatctat

SEQ ID NO: 266065 - DNA, 619 bp, Cannabis indica
cttgctgatagaccctccctaatctatgaactagtctttctgaaagtggatctttgatgaggtcctagcgtcttccattggttctttggttgaacaaccttatcaggttgttggcttttttcttgtggtgatcttgctttacctagtgagattgaaggatgtacccttagtcattcatccatctcaagatttgcatctctactgagtgaatacatcacaattagcagtgtgtggttctttagttaggtcagcttggtagatagcctctcaaagtctaggtaactcaagatcttcttccacgtcaacatagggctcaccagtagcagtctcaccaattccttgtctagtctctcctacatagtaccggggacgaggtctagttgttattcttaggggttgttcccaaagggtccttgtgggaggtgcctatggagtgtccaacattgaggcagtggctgactgttaagttctaaaaggatgtttgtgccatcttagccagctgtagtggccagatttgtggtgcctgctgagatggcaagattgaccacatctaaagtgttcatgggaattccaattgaggctagaacatggaaataaagatctacagtctttgggtcat

SEQ ID NO: 266066 - DNA, 601 bp, Cannabis indica
taatttgtggtgttacatccagtagctgttaaattttaatcttatgatagaattttataattaaaaaaataatattaagtgtgattttatcaaaaaaaaaaattataaaaaaaagtgaggaccagtcgcatgtggatcaatctattggacctagctcacactctagctcgaacctagtgttggacctcgggcatcaacacgaatcaggtgctccaaaccctagctcagacctattatagacccgaggcatcaacccagaactagaccccacagggccggctcaagggtggggcattaggggcccacactcaaggccccccacccaagcctaaaaaatcctttaacagaaatgtcccaaatttatattttaaaaataccatattttgtattttaactattatttatttaagggtaaatagcgcataagtacctaaagttttgagtttgtgagcgacataaatccaatgatttttttttagtggcataagtatccaatgtttgtaaaactgtaatttttctctattttcgtcaatacaggctccgttttgaatttattaaaaaaaaaaattgtaagtaattgatattacatattttttgtcca

SEQ ID NO: 266067 - DNA, 3561 bp, Cannabis indica
caatgtttattttaagtgtaaaatttcaataagaataactcttaaaccaagcatttttattagatagcacataaatatatgtatataatatattgtcatatcagtaaatattattctattctgattaaatgttgggttagattcggtgattattaattgaggacgtgttaaaacactaaaaaaaatgaaaataaagaaaaaaaaaaatgtaaaaagcagagaggagaggtgaggtgatgtaagaaaaattcccacaaaaattcacatgcacacacgcagatggacacgtggcgagaaatgggtcgtcggtatcttaagctcccaaaagacaaactgtctgagatgagattgtatggctttggtatcctaatcccttctccactatcccataccaatggataccacccttctcctcaccttgtcttccatggctaagcgaccttgtccttctcaaaaccctacaatccaaaaccctaacctcgatttcgatatggatgaccatatagaccacctccttgagacaatccttcttcgacagtattcccctcccaccaccgattcatccctagccccatcctcttcttcttattcttcttccatcgatctctcctttgagaggctcctcgactccaggacctccgattcggatcaaactcagctcatcgatcgcgccatgggtttgggaactctactccttgaggctggtaagcgctctgccagaaaacgcgcctcaaagcacaattctcttgcctgggctctccctcctgacctcaccatcaaggtacgttttggatttaaattcttttgattgtttaattcgttatttaattggaacactatcatttgctcgatttgttaattttttatgttatgttgttgtaattgggaactgattatttgtatgcgaatctgatgactttagaatatcgttttgattgctatctttgaggtttttatggctccttgactgtttttcagtatctcttatcctgctatttgctatcttttaggtgataatcagtcaaagtgaacttcttaaatagtattgtaattacaaacctagcaataataccaaagcaatgtaatgtggcttgtgagtcttcatgaaagaaaggatgctgattgatttattttttttggtgggttaaccagccatttcatatagaaatatcgatgactggttttagaatcatccgtacattaatatacgagtagtttaaacatttgactgggcaaaggttgaataatagctaggatttctttttgtatttcatgatatatggatcattgcaaagttagcatattttatttggacgattataatactttagacattaggaggtcgagtcttcagtgctattattttaatatctactactatgactggtagcactctggaaggaaagaaagcatcttcacacttgatgttttgtgatggatgtgcaggtcttttccatgcttgatacacaaagcctttgttatgcagcggctacttgttctatgtttaacaaatgtgctatagatccctcttgctatgccaaccttgatctgacaactgatgtccccaaagttaacaatgcagtagtatccacaatgatccaccgagcagggaaatcccttaagtaagaattcctcactcagaaaccttagatctttccagagaattttgttacaatttttatagtagtgggaatgatttgtgagcaactggatatctaattttcagtagatgtaattatgcattgagattggatggcatcttattatacgtgtttcattttctactgtatttattaaatggttatgcaggtctttaaagcttggtgtagttcaaggcccaaatgtattggctggatcctgtcagccattagtttatacaattagaaattctgtagaagtatctaacttttcatggaacgacaaacgatctagacaagggaaagagtcgtctattcttacccgatcttgtttaagccctttagttggtgacaatggtgctccagggtattactaaatttatgaaatttatcaattacatgtatacaaaaattaccttttcctgtttatttttatacttttctttgacttgttcttacaggacccttttgagaaggttgcacctttacaatattgaaagaatggataacacatcactttgtggggcattgacagcctgcccctctctccttgatttggaaatcgttggcctgtaagttactttgaaatgaatttcttttgtgcatcatttttttttcagacacttaaaaaagtaattattttattatctaatatatgatgcaatattgttggcagcaatttgcatatatagttatatggcttctgcagatagattttatctacatggttgttgtataaaaacatattgattttcttaacattttttgtttttgttttactatttagtcatgttgaattgaggcaaacattgatgtcagttagtgcaaactgtcatctgattgagcgtttgttctttgaatcttcaaaaacaggtataaaatccctctcattaggttcttaaattttatcccaaaatttttcttaaccaaactgtgtcttgaatgacaggtagagatgacagtttgaagtcgccaacctgcgttgaattcgtgaataattgccctaatctgaattcattggcccttaggggatttaagctgcatgattataaagttcgcatacttgttaaggtacaaccaagcatctcaagatttaatacacccaagattcatatatagatatgtatgttttggttgtttaacctttctttctctgtacttagatggatttattgtatggctctaaaatggctaaaattatgtaaacaatcagttgctcttacaaatgctaagacattttatattttgttctttgtagtattttcttctaatcccttaaatagtctttgtttgaaatttcagcatgagatatgagtattatttggctaaaataaattgttttatggtaaaatgtaataatctaatattttatgggtgctcgtgcagggatttagaaaattaaaatatgttgacttttcaacttcctattctatcactggaacttttctgaggtcagttatcatattcataagtggatgaagtctcatagaaatctattcaacaattcccatattagacatgttccattgtttagtacatctgatacaatgaaaaatatttgtctttcaggaacctgggaagcagcattgggggaaatttactagaattcttgattttacgggactgcatgcatctcaaagaggtgagaactattaatagccctacccatttgtccccattccaaattttctctttgttaatgatctaaattttcttttgcaggttgaagttgctcgacttttgactactattatcacaggggatttcaagtacctcagaactcttgtaggttttgcgagttatttacttcttgttacaaagaccttcatataaagcttccacttagtgttacccttgcattattgatcttctgatacttgtagtgcagtttcatgtttgagttcaattcttattttttttttat

SEQ ID NO: 266068 - DNA, 2944 bp, Cannabis indica
gatccagcatatgtcccatatgatgtaaatggacagtacggtcaactttttgacataattgaacagaggtatgtcattgtaagaattggctggaatctgtcagaataattaactccgtagttttcattttattatgattcggtttctaaattgttttaggtgattcctacaacatagggtatgtttaggatggtatccttctctaatgtatataaatttatgatgtatctattattgcccatcttgaattatctttgtttttcctagtgtggttttgatttttcaaagaacccaagaagagtgatttaattcatctattatttatatctcatgaatgcagtggaaaatcgatcctataactaaccacacaaagatgcaaaaaaaaaaaaagagagagagagagattatacatattctgtaacatgtgagatttttttaactgaacaaactcactcctaaactgcaattaccatcaaccgtgtatcttagtgttttcatttcctttcaagcatgaaaatgttctagaactacttgataacaaacaaattgtagctgcaatattctgtttgtcttcactttcttcaataaacaatttcagtttctttgctgcaatagccaatagtttcttttatttgtttagttactactcacaaaaattttgtgtttattaggatattgatctacatctatatccacttttatgtttttagtaaaaatcccacctcgtagtattaggtcaaggttactggttacaggagaggttttggaccaaaaatatttagtcttgccacggggttgtatagtggaaaaaaaaatcccaataaaatcttctcattcatctgctttgctcatgtatgtggaacttctcactattgtttcaagtcaaatataaaatctcatctcatttaagtatgaccaattatgtattagtaaatatttttggtacagggatgtccctgtaatattgacatttattaggagatgccactatactactattccttttgatgttgtacaagagctatatgaacttgttgaaaaagcaaaggcaaagaaaagaatgggttgtatagtatttatacattctactcatgttaatgttcttataaatttgttaaaggtacaaagagaacaatgtagcacgctctttaacactacaaaagcaactacgtcgatatgctcctgtttcccttgatccagaggttattttctttttggtgctgtacatctattacggtgttctattttttaatatccaattcctttagtgctttctatattttattttctgtctacaactataaaaaatacatagtgcaaacatattttatagaagaaagaggaatctaattaggtcgctttggagtttggatcattgctgttttggctgttggttggatgagttattatggtagagcctcaaacaaggctcttgaattctttgggatttataattaacttttcaatctcataaaattccatcagtttgtttttgaattcctactctgttattataacagtttcttcaagttaccccccttttaactttatcctttctcaccacaaagccctacattgaatggtagggtacataaggtatgggtaattatgtagtgaaaaacaatatttcgtcccatacaattgaatacaattccttaaaatgttcaaaaccctgggtgttaataaactgaaattaacttttcttttaaatctaggtgtttgcattgttattacctcaacatttgttatagtgcagttcttcaattaaaaaaacgatggattgttataatttcttttggcctattttccatttcattgttttaattcttattgcagtcaactgagaattagagatgattttctttgttcacttgatgcagttgacagggtttacagatgctgataaggaagctctaaatctgcttgttcaggctgcaacgatcatggatgaaatattttgcttgcaggttatttaacatacaaacatattgaaatataaatagttatacacacattacaatatcttctgcatatagtagaatagctgtaagatgtattctcttttatgacatgtctatgccataaagatatgtaagtgttgtggtgatgtttatactgcctttttggccaatggttgtggtttttccttttggaatgaattcctaatgatgtacatttattgaatgcaaatatcttatgtcttagcaaaatggttatcattttttatttcatgttgaagaaaatttggaattttcattgtttatgctctgacatatattatttccacaaatagtgtgaatctgatttgatttgttttgttttgagcttgcataatttttcatttctgcatttcatttgattgtaaatggtttcctctatctaatatgctctatatttaataatcaggtttggtacagtaatcctgatttaagagattggttgaagaagcatgcagatgcatcccatatagacaagttaaaatgggcgtattatttaattaacaagagcccatggtaaatatttctcgacttactatgcttccaatacgtgttgtttatcccaaatccacatgcgtgcatgtatgtatgtgtgtctatgtgctttgtatcattcttcaatgcatgttgatggattcatagctctacatgtttgacatgagagatacaagaaactacttaacaatttttcaagttctgtcaggttcttctctccagagattttctaattttaattatctttttctaaaagataataatttacttattaagaaaatgaaatcgtcgtactagtagaagagaataacattctcaatgcagtttcctctattatgcaaccgaaggtttgctttttaaatacccgtaatgtcagtattttttttgtttttagatatccaatacttttttgttgttgaacatatattcatatatttatattattatttttt

SEQ ID NO: 266069 - DNA, 723 bp, Cannabis indica
gatcctagagccatgaaatgtgtgttcataggctatccggagttaaaggatacaaactttggagccttgaataagggaaccaaaacaaatttgtcatcaatagagatatgatctttgaggaggacaaagtatacaaagacaggctcaaagatcaacacaacaatgcttctacaataagagatgagtagtatgcaatttgaggtggaactgtcaggcaattcacaattggaacaaccattacatgcacaaagagatgatgagccaaatcttacagatatgatggacaagcgtcacaagaactagaagattaagttgatcaaggagctactctccatgactaccagctaacaagagacagagacaaaaggcctcacaaagcccctcataggtttggttttgcatacattattcactatgcactaaacatagaacaatttgaacatgaacctagaagttgtgctgaggccatgagattagttgataagaagagatgcggaaaacaatggatgaggagatagaatccttgaacaaaaataagacctgggatctggttttaaaacctacaggaaaaagggtggttggctgcaagtgggttctcaggatcaaagatggaattcatggtttagaggagatgagatacaaagcaagattactggcaaaaggatttacacagagagaaggtcactctatgtcctgaaatagtcacctaggcaatggtacaaa

SEQ ID NO: 266070 - DNA, 501 bp, Cannabis indica
tgtgatcaatgaagcatatgaagagttcataaagatgccaaaaagaaaaactgtttcatggacaacaatcatcaatggttttgcaaaactgggccgtggggaagaagctctccatgtcttgtggacaatgttaagctcgagaatgagtgaagaaagtcctgatgagattaatttcattggtgcgctttgtgcttgcagccatggtggactagtccaagatggtcgccatattttcaaattcatgactcaaactttgggaatcaagccaagtattgagcattatgggtgcatggttgatctccttagtcgtgttggcttcctcgatgaagcagtgaggcttattgagactataccaatgaagctaaatgatgttattgttggaattattttaccaggatttagatttactaccatgtatattaatttttatataaagtttaagaaaccttacagtgggtgcagcgaaattaaatgactcattccacttagatctctaaccct

SEQ ID NO: 266071 - DNA, 1228 bp, Cannabis indica
tttttatgaattttaaattcatatttttttaatgttaaaaaaactatatttttagtttgattgattagataatgtcatatttaataacatttatttttataccgtatttatcataaccttaataatttttcccatatttttgaaaataagtaaaaaaaaaaaaaaaaaataaaggacagagggaatcctttccatctcaaaatagtaaacacagaaaaaacagccacgttgcccaattggggttcgcatattccaatttcaatattgatactgtgtgctatttcgtatattccaaaacccaaaactttcaaatcttgtgcctataaactattgacgctagtagtaattctcatatacattccatcccacttgcgttcattgttttattttttccctatataagactccacttctcctccttattatatcgtcaaagaaaaaaggtttcaaaattatataaaagaaaaatgtcagccgtggtggagatgtgtatgaatgagctgggaaagctcggccagaaggtcggagcagccggaaaacgccgcctggttttgttgtcgtcgaagcccaaacaagatgaaaaccaacatgaatctcaaaacgaggagaacattaaggctgctgcttcttcttcttcttttagttctagtactctctctgaagatactgtttttttgctcatggaccgttttgcccctgtgtgataatatcatcttcttctcttctttaattatgtatcagtatgttctgttgtagcagcttcttgactttgttgtatggtggtttttaattggtataaatatctgttggaactttgtatgaaatatgtaaaaatagaaaagtgaagtgtgtgagtaggagtcccacatgggatagaaacactacattttaagtgtatatttagtgcaagtttgagatatgggtttgggccccaaggggtacccagttttgcgtgcatggtgaggactcacacactggaccaccacacgcgcgcaccgccgccgtccgaccgatccgggttggcgggtgaggtgtcactttatttttcgaagaaaaaaattatttaattaaataaagatttatttttatttatttatttattaattaattttaacacgtgatcagaagaggtaaaacgcgatcagtcaatgatccgccttttcctcccacgatccaactcctcccacgaacgataatattaccgttttcttaccgttttttcttggat

SEQ ID NO: 266072 - DNA, 766 bp, Cannabis indica
ccaactccgagcctggtaagctcacaattaaccctattagatcgcctcgggtacatattctagtacactcgcgaccatgtctttctatcaattaaattttcaaatcataattaatgctaataagcattaccgcacatgcatatacatatttatcaatctttatcaaaactaatcatgctcctctaacagcttacatatctcaaataagcaggaaattcaaacaattaacaaatagtctattaaataactaacaattgacacttactaaaccatgagtcgaacgagtattcacagtcaatgtacatatcgaactagtcttcaggatctttaaaccttggtcgttctgacaccatgatgtaacgccctgtcccacagggacgccacgtgtgtgtgcttttacaaatttatttttagtctattctattagtttgagaaaagtgcgatttaattaaaacttttagttaaaataaaaacataacttttataaaaggaaaaccactgttaagttcaaggatcccatgtataaaacatttacattctattccaaaattagtattacaacataagattatattttcaaaatacaatcaaaagggttgatcatgtccactagaagctgaggcataacagttgatatgtacattgctggaagacctctaactcatggctgaaccacaatttctttcccccttacctggaccacgaagcacccatgagttacaaagactcaacaagaaaagtaagtagatacaaacacatacattat

SEQ ID NO: 266073 - DNA, 565 bp, Cannabis indica
  modified_base (26)..(26): a, c, t, g, unknown or other
cagccaggtgatctcacaagtggcancgagccatacgcccggtatcagcttcagcggaagacgagaaacggtggactgcttttttgatttccaagagataagagatctaccaagaaagacgcagtaaccagaattagaccttctaatgtcacagcaagaggccaatcagcatctgaaaataatttaagatgaaagtctttgtttgacatatcagtttcagcatgatcagataggttagtagaagatgctgagtaaaagaatagtccttgtccagaggtacccttgagatattgtaatattctgtgagcagcggtgaggtgggaacctttggattggataaaaattgacttagtttattgacgacaaaagagatatcaggctgtgtaatagttaagtaaagaagtttaccaatgaggctgcggtaggttttgggattgtcaagtggttttccaacatcggacgagagccgaatgttggattccattggtgcgggagcagaagatgctcctaaaaaacctgtgtcagttaagagttgaagggtaaaaggtcgttgggagacagatat

SEQ ID NO: 266074 - DNA, 1379 bp, Cannabis indica
ttcaaatcttgttacactctcagcatgatagacaaaagcaaacactctacataatccatctaccaatgcaatcaataacatatcaaccttggaatttcttttcatgggttcaaaaaggatcatctcatcaaaagcaacactcggcatgattgatgggtatggataatttcatgaaaggaaggaacacagagaaaagggaaacatggaacatattcacatatatccttactaagaaattaagtctaccattccaaacatatgtgagtgcttgatgaaacaatgatgactgtgtcatttaccatgtccttgattggacatgctggtgtagtaagctctaaccgaaatgaaacctgagaccccaaaaagaattatcagtactttaacaaaggacaatatatgacatgtatctcatagaaaaatttcaaggttctagatgacctctcccaaagcctcattgatgtctagatcttttacaaaaccgcatgagacaatatccgttccaaaatctgggtcaatgatttgagacaatgctgtcaaaacatcactttcagcttttccatttgatacagcagaagctccagctacaagcaaataatcgtaataacaattaataaaatttagcaaacattacataagttggtcaattttcccatatcaggaaatacaaattgactccatcggtccaatattattcacagggtcctagtgaagacaaaagagagtaaattgctccaaacgtttaaattggccatttaatcccttggaacattgtacatgaataataaataactttaattgatgaaggctatgctcctaattttccaccgttaccatttaaagtccaagcttaaaaacttattataaacataaaaattcactgacttcaactttatctacataaacaattgtccaaaactaattttaaaacttcagcaggagtaaaaagaaagaagaatgtaacggacaaatatttctcatgtcatatatatgagtcatatcacaacagaacagagtacagagcatatgaagctactggcttggggaaaagagaagcttaccttcaacagatgctgctttagccgtgaaagtgttcagaatggagctagtacgtgaagcacatattgtattttcaagtcgttttggctgaaaagagcaacttatgatagctgatggtaaaaggggtctctcatgtgaaagtagtcctacaaaaacgaacaaacccacaaagcattttcaatgtaacaaatttcaaaaactagtatattaaacttccaaaatcaataatatcacatataaatagagaattcacctaagcttgaatgtgttctcgagctatgaagcgagatatacagtgacgacgaagcatgaagaagcatttt

SEQ ID NO: 266075 - DNA, 1439 bp, Cannabis indica
aggagcacccctaatcatttttttgagcaggagcatgagaaattttttcatgggcaacaacctttgatttctttttaggaggagctcgctcacgtttcgacaattgaggagcaaaattagagtcatcgtcttgaacaacaggacgttttcccttattcctattagctacagatttcaaccccattttagaacttttctttggcacaggggaaggagtggatgaagaacgagtaatagccatatttataaatggattaagagcaaaagaaagagagggaaaacagttatgtaaatcggttaacgtgagttgaaaaaaaatggaagaacagaaagaagaaggaaaacgggttgtgatcgtgaaaggagaagagttcagctatggaggttttatttttttttaaaaaaaactgaaaagaaattgaataaaaaaaaaagaagagaaaatgagagggaaatgatgtaaggtatgattgatataagtcatcaatcaatgacgtgtactgctgcatggagtgtgtatgcaagtggtaaaagtgtaataaaataaagatgtgaatataaatgttggtttaaccatgtgaagataaagtgtgtattttgtattttggtgtaaaagtttttaattaatattaaatagatataattaaagatatttttattttaattttaaaataatatataagatttttgtactcaaccaaacagtgtaattatcctacacagccaaacactagtttacacatttccctacaatcatattctcctttataaaattccctataatcaaattatgttgaacatctcgtaccaaacgcgtccctaagaaacaaatatatttaaatatataagattttcttaaggtgggaaatttttaaaatgccccatttgtgaggatttattataaaataggtctcattatgtagatataaaattaataaatttttttttatagagatatagtttataataaataaaataataattgttgtttttatataatatacgattttgtaaagttttattgaaaattttttctaaattaattaataattaacatttattaattgaataaaaaattaagaaaaaaaagagaattaaggagagaagagatagtgagattaaaagtgattttagaatgccacatcatcgcttcatacttctcctttatttatatagatagataggtcccattatacttttgtagatataaatgtgaatacatggccactacaatgtggtgtattgtaggagattggtatcaatttataccgtgagttccacttatttattgttttattttttttaatatgaaaagcccattttttgagcgagcattgaatgcttgctgatattgacggcttgtgaggattaaatttgctctgtgttttagggttttggtggaggtttttgaagagtatttggagagaagaaatgcagag

SEQ ID NO: 266076 - DNA, 530 bp, Cannabis indica
aggctgttcagactagatggacgccaggcggaataccaggagccagggaaactcagtagggtcaaatcagggtcagggagcccagtttcctccgcacgctaggggccgtggtagaggtcccaagggcagggcccgtggtcggggtgacgataacccgccacaggctgcccaggctgcccaagccgagcaagaagcccaaaattgggagactaggtttgctaaaatgcaagccaggatagaggagcaaggtcaagagattcacagattgaggcagcaaggggctcctgcagtgcctgtgccagaagttcctgtggcacccgcccctgctgctcatgccgaaatagtagtagcgacaaatagaatggaacccctgtatgaaaggttccggaagcaagcacctccgattattctggaaggtccggatgtcatgaaagccgagcagtggctaacggtgataactaagataccgaactttatgggtgtcaccggaaatgacagggtggtgtgtgccaccttccagttccaagaag

SEQ ID NO: 266077 - DNA, 723 bp, Cannabis indica
ataatcgtatacgttgtagttatttatgacatttcacatgtaagagactgtttacaccctatttcttacgttgttatatttttctaaaaatctctaaaattttacaaaatatcttaaatcactacaacatagacgattataaaaaaaataaactaaaaaattctttcagataccaaaacaaatagaagttcatcgataaatttattgtaagaaaatattatagaagtattctatatcatataaatataaatatgtagaagtagaactagaagaagatgatgttgtgcaacgttgtgtgtctctatcaaaaactcattactagtggtggtcactattccaccacaagggaaaccatttccaaattttgaacttattacttttgtcccaaccaacccacatgactcactcactactctactagctaattctaaattatttgtatatagtgtttgggtatgggtttaatttgaaaggtggtacttacatatagattaaaaccaaaccactgtttggttggttcggacagaaaagattctatagagtaaaagtggggcggttgtttgtttgtttggtgatgatgatgataacttttaactttgaactatatacataggaataataagaagcttcaagttgaatcacccacttgtctctttcttaagtgccatatatatataaatatttaaaaagtagtgtctcttactgtgttaaattactcaaaat

SEQ ID NO: 266078 - DNA, 528 bp, Cannabis indica
actatgaccagacccagacgaagaacaaaacccgaacccagacctagaccttgcacccaaaattagaatctgaacaagaatcgtcgaaccaggaccctaaaataagactaggatcgtgaccaggacctgaaccaagacctagaaccgaacaaagacctagcctcagacccaaactgagaaaggaactcgtgcctagacatggtcgtgtacctagacctaaatctgggaaccgatcccaaacacagacttggacctagatagggatccggatacaaacatggactcggaccaagatccagactgggatggaaatgttggaccaagatctagactcagatcctgacccacacccaaggtccagatctagactgggatggacaaggtccagatctaggtcaagcatttcgatcccagtctttgtgtttgtcagagtctaggttcgtatccggatccttatcttaagtctgtgtttgggatcgggtcgcagatttaggtccaggtccgcgtctcgagttccggtctgggtac

SEQ ID NO: 266079 - DNA, 3366 bp, Cannabis indica
gatgaaataaacaatgtcgtcaatcctgactttgaggattgggaacagcaagataatctactagtttcttagctcttatcttcgatgtttgagaaaataacaaatcgcatgattggatgcgagaccacaactcagatatagaaagccttgaatgaatactatattgctctcaattctgccaacataggcctgtacaagactcaactcaagaacatcaagatgacaaattccttgaacgactatctggtgaaaatcaaggggatcatcgatcttcttgcaactattggtcacaaacaatctccccaagatcatattgaagccatctttaatggcttaccaccagaataagatgtctttgtcacatttgtcaccacaaggaaggatgcatactcgtttactgagatggaagccttacttatggcacaattggttcgaattgaaaagaatgccaaagccttggatatcatcaagactgaggccaaacttgttcatacaaggccatcctttgggaatacacaaggcaaatcttactttccacagtctcagatgcctgctgggtataatcgcggtgccctatttcgatccactgagtctcaatcccaaatgcaaaatgtagctcgaggtgccttcaacactagtcgtggtcaacattctcacaatgatggtaatggacatccaccactggtcgaggagaatctcaatcttggactcaaaaccccagtgccaactatgtcacaagcttggacatactgtcaagcaatgcttctacatgtttgataaatctttcactggacctgaatgcttcaatcaatttactgcctctaccaacattgcataaatccaagcttctcttgccacaccagaaactattcaagatgatagttggtaaccagattctcaggcaactcatcatctcacatcattgcctcctacagtaactactcaggtcaggtacaggtctatgtgggaaatggcactggtcttgccattgaaaacattggtaactcttcctttctctcaccttttacatctaaaaattggcattaaccaatcttcttcatgtgccatccattacaaaaaatctccttagtgtctccaaatttgctaatgacaattttgtgttctttgaatttcatcccactgtttgttatgtcaaagaacaagacaccaagaagacattattgattaggaagcttgagaatgatctctacaagttttcttcagctcaactctctcatattccacacactttcattcccaaacaacaatgcactccacactattttacaaatcaagtatttgtccctgattctaatttttttttgtggcacagtaggtttggccaccctattgctcgaattgaaaaacaggccctaaagtcatgtaatataccaattaacaataaaaaaatacactgatttttgctctgcatgttgtcttggtaaacatcacaaaataccttttccattttccaccactgtctatcatgctcctctacaataattacacttagacttatggagtcctgcccctgtcaattcatttaatggctataagtattatatcagttttgtggatccatactctaggtatacatggatttacatgttaagaacaagggatgaagccttacctacatttaccaagttcaaaacacaaatagaacttcaacttggtcacaaaattaaaaccttacagtcagattggggaggagaattcagggctctcactaatctacttgaacaatgtggtataattcataggttagcttgctcccacactcataaatggtgcagtaaagagaaaatacagacatgtggtagaaacaggattaacttttttagccaaagcatctttttgggatgaagcttttaggacaaccatatttcttatcaatagaatgcctattgctatcatacaaaacatctctcccttggaaaaaaatctttacatctccacctaattacaccatgctaaaaatctttggatgcctatgctaccctaaccttagatcatacaacaaaagtaaaatgaactataggtctacaccttgtgtctttcttgggtatagcatgtcccacaaaggttttaaatgtatgcctaaggataaaagagtttacatatccagggatgtcatctttaatgaatacaatttcccttatgttgaatctcaaaaacaatctgtctccaacaacttctttgtgtctacctctagtctcccacctctttcttccacgctgcacatcaacactccaccacctgaacctccactctcctgcatcatctaccacttcacccattcaatcatctgcaactacactagtgcacaaccaaactccatctactatcagcaacaccatagctcctgtccacgtcactgaaccagggcatagttagttagttgacattcaaattcaatctacatccaatctaccccctcttaacattgttactaatatgccttgtaatacatgttaccactaatgttattgctgcagataacacacacaataggggatccactacagttgtctcaactcaccccatgacaactaagctgaaagctgaggttcgaaaaccaaaggccttccttgcctcttgttaaccaataattgtcaaggcagctcttcaaatgccttaatggaattgaataacgacacaagaatttaaggtattaatcagaaacaatacgtgggtgctagtatagataccacctcatagaaaaccaattggctgcaaatggattctcagaataaaacacaatgttgatggcaccgttgacatgtttaaagctcgattagtggcaaaaggctttcatcatcaaactggctttgactttaaggaaacatttagtcctgttgtaaagcctattaccatcagaattgtcctcactattcctgtcacaaagggttggtctattaggcaactagatgtcaataatacattcttgaatggagacctacaagaatagatatacatgcaacaatcccctagctttgtcaacattgaacatccaaactatgtttgtaaactcagcaaggctttatatggcctcaaacaagttctaagagcttggtttgagaaactatccactgctattgtaaacatgggatttcactcatccgaagctgacaattcctagttattcaggttacagtcagtcattgcatctacattttggtctatgtggatgatattctcattatgaggagcaatgaaactgcagtcaaccatgtcatcactggtttgagcaatacttttgctcttaaggatctaggattggtggactatttcctaggtattcaggtcacaaaaacagagcaaggattactcctcacacaaacaagtatctacaggacatgcttt

SEQ ID NO: 266080 - DNA, 841 bp, Cannabis indica
aacattaaaaccaaaaactgaaaaaaaaaacataaatacaaaaacagatttaataaaaacagtcacctaggatgtttaagcaatccttcaccaatccaagcgtcaaattttgcctcaatctcggtagatacgggatcagcaaaagcatcattaagagcataaaggcccttcacataagtcaccattttgaaatccctatcatccccagctgattgagaacctgaggacataagctccattggagtgctcccgacatcagcagacccgaaatcaacaaatggagatttcaaggccggagcacgcttcctcttatccaacagaggtgtatcagagacagtatcctcagtttcttcatcagtatgaagggcatctgacttttcaccaacaacatctggattgggtgcggggacctaaaaaagaaagaatgcattaaaacagttgcaaaacatactagaaactattgagcaaccaaaaagaaacctaattttcttgaaaacaattaaaaataaacttacatggattttaccaacagcctccaagccagccaacacaacttgatcatcatctatttcaagctggcttaacccatcaaagaaatcgtcccccttcaatcgagactcatcgccctttggcttctcaacatccttagcattctcatcactgcctccaacagcctcagatggattcacatcagcaggaggaacatcagtaacaaccttatcagcatcatcagcatcaccaccaactttaaccaactcaccaccatcgtcggagtcggaatcaatattttctggatcaggcagttccttctcatcatcctcagcatcatcatcatcatcat

SEQ ID NO: 266081 - DNA, 1344 bp, Cannabis indica
atccctacaatcatgggatcatactagaaagatacgcaagctgtctcaatcccccattttatgtattctaaatatgtaatgtatgttcttaccaattatagatattgtaagaaaaagggaaacctttcctcatgcatttagccctataaatagtgatttattctcattgtaaaaggggtcgaaataattgctttagagagagatcaaagagagaatacttagagatttcattgtgagagctttgagaaaggaaacactgtgttttttgttctcaagtcaatacaatctaaggggagtatgctattaccaaactaaagagaccgaacctctttaaaaaatcccgtgttctttattgtttactgatttttgctatgtcttaattacattcgtaatcgcttattaattgactcactgtcgttggctaaaagcgaggtcaagattagacaactctcttctcttttcttcgtaactttgaaattcactatctaattcactctcacaatattgtttaaaggtaatttgagtatcatcccacactattcaagttgatactcagacctttgtggaagaatttgatgaacacaatcaaaggaggatgagattcaagttcagatcttgagtatactctgctacagacaggagtcaagagttagagatctgaacagaatgagtcataatgttacgctacaaccaatgcaaagttttttataactcttatgtgcttaattcattgttttagtaattttcatataaggatgttagattagttataatacaacacacataaatagtaaattaagatcttggtgaaaatttttccaacagtatcatattttcgacaaaagttccttttaatctttaactgatcaaactcattaattattaatgtatatttatatttgtgtcaacattttaattagcaaatatacatctatataatacaatcaaaacttccttcttttttgtctagtattttccaatagttacatacttaatttaagaagtactagatgaagaaaataaattagtagttaagaatatctctatctatagttgtgattggagattgatctggtccatctatggatggttttataacagtaataaagaagatattatataaaatggtgagaagaatgagaagaccggctgtatatgcaagaaatgagcttgaaaactcactcactacttctacttcactatcttgatcatattcttctcttgttgtaagcttcacatcagaggctgcaaagcattatagtttataattattcaactaactatatcatgtatacaaaaaacatatatattcttggaattttttttttattttccctataaaat

SEQ ID NO: 266082 - DNA, 697 bp, Cannabis indica
agtttaagcatgattttgagatgagtgtgcaatctgaatttttagggtaaagtgtgagttttaatgcatgttgtatgtattttaatgtcctatatttgagcttgatgaattgtgatcatgttttgagagtttggatggatttggtggtgatttggttgagcttagttgctgaaattttgagttgggcttgctgatttctgggttttcaacccaggtgccgcggcatgggttgagcatgccgcggcccgcctccttttggggaacctaggattttgtcccaggtggcgcggcatggcttgggcatgtcgcggcccaccctcgattttcagggcagtttgagtgcaaactttgtaattccataacttttgaattttaaatgccatgattaaattttatgagtatggaatcaggggttgatcatatttgtgaaatctcggattgtgtgacgaggattagcggcacctgatcaggagcacccagggattcggaatctctgctattgcgggacaacaggtaagacagtggctagcacgtagagtatgcactgtggcacttatattgaatgtgatatgtatgattgtttagtaaccaggattagggttattactctaataggaacggtttaatagcctagggttattaccctaattatatatgtgtgtaaaatgccatgccatgttaaaatgtaaatgagatt

SEQ ID NO: 266083 - DNA, 1070 bp, Cannabis indica
gaaggtttgaaacaatttggggttgatttgagttatttatggtgatttggggggttcctgcactaaactggttaatcggttcagttttgcattgtagaactagttaaccacgttccccccagatagaacctttagaattggctttttagttgggattcagtttaccggttgtggcagttttaggtaccctaaatttttatatttttgcaatatttagggtattgtcatgtttctatcgacagggaaacttttagtttttattttaagtccctgaaaagtgatttagtgtatcactcatcagttttgcgtatgttgtgagttaggggcttataaatgtcgtgcaacaatttcagttaggttgaccagcacacctgattttagaatcgaggtaagattagtataatgatatgcatatgtgataaaatatttagtatacatgtttatgattgcctgttagattacattgaaatagcggtatcattatacatagaattatattggataccgatgagtgtatgtttggctctatcacatcggtacgactagagtaccgagtatatgctaatattatggtcaatagtactatcatacgaacgttctaggctcagtacgcgtgggattatatttgggtgtataggcgcctaattgtaacccggtttatgtttatgatatgattatgcattttttactgagtttgtcgactcataattactgtttacatgtgtaggtaaaaggaaagctaaggatgaacaacaatgagtgcgagcatatgaaaattgtacatgtcagggcagttagacctgaaacatacgatctttgggacagcaggctgtattttgaatagtcgctaggcgataatttttttgagttctttttataagaataaatgacatttttaaaaatcatctaaaaaatgtgtatatttattgaaaaatttctgttaatttgggccccatgattgggtccgtcttggtattatattattatgggtacaattaactatcagatcccatataatttaatttagagataattacataaaataccattttttgtaaattttttttaca

SEQ ID NO: 266084 - DNA, 522 bp, Cannabis indica
tatctgataatctttgagttcttaagactaactttgacttttaacaatgagaattttattctattcaaaaaaaaaatatatataaacatgttacttgacataaatatttcattttattatcaaaaatatttttattttattatttctctttttttacaattttcattttattatcatatatatatataaatgatacattaatattttttacaaaacttatcattttattatatggttcaaatttataatttaaatttaacttttttcttattattataaattattaaaatatattttaaattttattggtctttatttatctttttttagtttcttttttttttaaaaaaaaaaaattaaagttactaccttattctaaaatcaaacacagtattacattcagcataattcaatccagtttaatccaattaaattcttctcaatccaatctatttttcttttttttttgtaaaggctcaatccaatgtatttcaattgtgtgtcaaaggggccctaagacta

SEQ ID NO: 266085 - DNA, 1013 bp, Cannabis indica
tcaccaaatagatagatttaataagtcaaatcaataaaatatcaaaataatacctagcatccatcattcctcatttctaactagtacatagctaatttaagtcatccagaccatccattccaacttaaatacaaaatcagtctcattagaagatttaagagtaaaataagactaaactaataacgacattcctttcccaacggtaccatcctcatccactagcatcaaactgagttcctggaatgggagaaaatagggggtgagcttataaagcccagtaggaaaacaactaatatcaaaggacccttggtttaataaaattcctgcatggttagctttgtaaaaataaaatatctcatcaacagtatcaatatgtacaaataaagtatagagagaccacaaataatcacaaatcaaacgtcaaatgcatatcacaccgtccactagacccctagctctcaataccaatcatagaaaacgacatccaaaaccgggtagtcgcatctgatatccaccataataccggggctcagatttaattcactccctgtacagattctaggtctttcacctacaggtgagtgcacacctgatctacctatgatgacacagagactaggtcgtgaaacaacaatatgcaccgaacatgatcaacatggctctcatcagtataaccaaagcaggcaaataataagcataacaaaagaacatattcctttttattttctagaaaattcggcagcataacagctgtattttgaataaacccaaaaatcataacctgcataaatatttgcacacaaaaatatatttggcactcagtgccccagaacagtccagaaaaatatgcagattaagttttcaatttttcaaacaattttgtaaatcataaaaattggaatatgtctaatgttatacaacacatataaaaatcaagtccaataatcaagttgagtccctacctctcccgagtcgttaaactttttccaaaagacgatcttaagctcttaagt

SEQ ID NO: 266086 - DNA, 982 bp, Cannabis indica
atgtggctcagacccatcttagattattattctccgctaggcacaataaatttgtactactaagacatgaatatgtagttatgttacgcattaaatttgtttaaagtgtcccctaatttaaaattttaaaatgttcttcttttcaaggtaaattttaacaagtttttttcttactcttgcactcgttagtattttcttaaaatctcaccatacacatctcgaaaaatcgttaaatttcacagggaggaagctaagaccattgtctataactttcctattggactcgtggagagaaaatgtagtttttgagcactaaaaatctcactgttctaatagtggtacctttttatgaaatgtggctcggacccatatcaaaatatttttctatgtcaggcacaatgaatttgcgctactaagaattgaatatgtagataggtttcacgtaaaattttttaaaatggctccctaatttaaaaatttaaaatgttcttcttttcaggataaattttaataagttttttccttaccctgacactagttagtgttcttttaaaatctcaccctacacatcttaaaaaattatgaaatttgatagagaggaagccaagatcgttgtccatcacttttctattcaacacgtggagagaaaatatatgaacactaataatcatttttatgtaaatagtgaaaatctcatttctctgatagtggtaccgctttgtgaaatgtggcccggacccatcttgaaatattttttcccgtaaagaacaatgaatttgtattactaagacatgaatatgtagatatgttatgagttaaatttgtttgaaatggcccctaattcaaaatttaaaatgttcttattttcagggtaaattttaataatttttttttactcctacactctttagtattctgttaaatatcaccctacacatcttgaaaaatcgtcaaatttcatagagaggaagccaagatcgtt

SEQ ID NO: 266087 - DNA, 1022 bp, Cannabis indica
tctttatttaatatattgtccttgtaatattttgtttagagttgtaattgtcttagtcttttattcatcttatttattcttccattctaatctctctattatttctaacagatactataactataagaaataccgctatgaaaaaatttgaaaaaaatatttcgacttgtgatttcagatataaaagttgattaagaaattataatagaaagttgtaatcaacatttctcaaatttttaacattgttaaaagatgccatcattagaaatgatacaaaaaatatatatatgtacgtacacaagtagtacatccattaatccaattaattattattacaattatgttggctaattgtacatttatatagtatacaaattggaatattataatggaaagaaacagcacaagtagagagcagagaggaaaagggttagaataatttgattgaggggtaaagccaatagaaaggagagagcgcaatagaaggacatccgtacagagaaggatgcacaaggaaattcaaattgcattaaaatacattattgtgcggtagaagttagtgccacttaattattatatattaatcaataaataattaatggtggtgaaagaaagagcagagaacatcttttgatcgaacccaagagattccaagacaaatgtcgcccttttgccaatttcaaaggctgtatccacccatgcatgtccttttttggatatgctcttatatataaatagtgcatgcggaacatgatacaaggtcaactttctcccaaattcatgataagtattattaattaattgtagaagataggtcagccagcataagccaaactcaccacctaaaataagaaactttaattaatattatatccaataatcaatatatcaatatatcttgctattataaaaagtggcttatttgtgtgatatttataaactattttacctttataagtttaattttattacaattgtattttccttttgtctttaactttataattacaagtcaaacttct

SEQ ID NO: 266088 - DNA, 2184 bp, Cannabis indica
gggcataaaacccaacaggcaccactatcagcaaaccacacatcattatccaccacttcaggcgtggctatgaaggcatttgggggttgtttcaactggttttgtccctgttcttgtcctgtgaagctttcatcataccgactgtaacatatggctgcagagtggccatatttaccacaaatctggcaactcggtttggttccattgttgttatatcttcctcttcctctagatctccctccattgtttcctctgccaccagtgaagcgaccaccactgttttgattcgaatatgatccacggcctctgctgtaagactgcggtttggtggccatgttagcttgcggattcgacacagatccaaggatcttactgttattggtgagagtttgaagcctctcaatcttgctatcaaagctgaggagagtgtcttggagttcttgccatgttgttttgacccttgcttcgatttgaacaacaatggatatgtattcagcatcaagaccagacagcacgtttgcaacaagatgtgcttctggatacgggtctcctgcgagagccagaatatcagaccaatttttcttttgtctgagatattcagccattgttgtcgagcccttcctggttgtttgtatgagggttctgatttcatccatcctagctcttgaataagctccatagagactttccaaggcttgccaaagacctgctgctgtagttgctcccataacttcagtagctattgattcggtcatagaactgtataaccaacccattagcagttggtcattgatgatccactgctcaaactcaggattaacctgaattcctgtttctggtcccgtttctccgtctgcaggacctgctgtgatgaactcatttgggcataatcgagttccatttaagaagccttcaagtctgtgacctctaacaatggttgaaaccattgttttccaaagtgtgtaggagaagggtgtgttcagtgtgctaaaatgttgagggtaagtgtttgaataagggagattttcagatctgttggctgcagtacccatgagagcagagctattagcagagcttgctgttggatgtgcagcaggggtttgatctccattgtttgaagctggagtagccatgggcgtaggcctaaaaaagctctgataccaagttaaaaacaagcaaatacagaggatttgtaaaatgttatttctcagctcaataaaacagagctgctatgctttgtatttatacacagaatattacacatgagggaaaatatggtcgttagcctttgtacaactgtcagcattttacaaaaaggtacaaggaatattctaacaataaaggacaccaatgattgataaaatcttcatagggattgctgcaataaccaaaaattgttatgctgatattgaatagtcctgtgacacctggtgcccaatttctatttctcaacattatatcttgtcaaatacaatatacatataaatatatatatatctcttttgggtcaactataatgaatatttgtgtaacttacatgatgttcttctgataaaagcaacacttccatatccgagtaagtggcaagtttcatggacagaaactatacgtacatacatacacaaaacaatatataattacataaaattatttaaaagtattaatatactacaaagatatatatatatatacatatgtatatttctaaaaattattaataattaatagaaatggctaactagctagctagcttcacttgatatacctctacttgtcgttgtaatgactggacatagttgataatctcatcaagcattaatgccttgccagtgatctacaaaaagaactcagacaattattaattcattatatatatacataaataattaatccaatttcatatgaccttattaccttattgcatcctggaacaagatcttgcagaaacttcatcctttcatttatcttttgtcttctcaacaaattataacaatgaataatagaagttcaaaacctgggttatatatatatgtacgaatctatatgtataaagcacatataaaaaccgtacgtaactctttcagaaaggctgtgactactgatcatagtgagctctcttcccttttaagtttccctacttgtgtttttcattgactagtgtaagttgcaaatgtagccttactt

SEQ ID NO: 266089 - DNA, 651 bp, Cannabis indica
aatcacaagtaattttttgactttgactctaattttttttatctgcttttggatttggcttttttttttatctgtttttttttttggctggataatcgctagagttttttttatttatttttgctctgataccatgttagaatatgataagataactaagattctatcctaaaattaattggtaatgggagaagtagccgatagaccttatttataataaaatcttccactgaagttaagatgtagaactctttgactgtatgcatttcatatactgaattgagtagtgcatctctttgctcttctccatttcaatttaattcttcattttcatgtgtttgaatttgtttattgatcaacagaagaatggccaggaaaagaaatcaaatatatggttctaccataaacgacattccaagtgaaattgttgctatgtttttccatagcctccccaccaaaagcattcttttctgcaaatgcgtctgcaagaaatggcgcaatctgatattcgaatctgactttgctaagttaaactttgctcaagcaaagcctaaaatttttgtccggactctggattcagttcgagtttcaagaattctgtacttggttgagcctgaaattcaagatgaccctggttttgatcttaatctc

SEQ ID NO: 266090 - DNA, 3527 bp, Cannabis indica
gataccctaactaacacagatcgagaacttgaaccatggacctaaacttagacccaaacctcgaattcaaactcagacctcaaacccaaacccagagtttgatatcaaggtggaatggtttcatgtcatgatgtagaattaaaaaaagtaaaaaaaaaccaaaaattagttttaagatatgagttgacaccattaaatcacatccaaacagccccatggtgtatattgtttttcatttcttggtacattctcattcaaacgaaagtaaaagccatagtgaccattaatctcttcacaaacaaattaataaaggaaaaatatcacaactatcacagctgtatatgttaagccgattgtttcatcaaattctacaaaataataatttgtactgcctctcttccccagcaaaattggaatgtgatgcttaagtactgctaaaagtttttggcgagcttaatgagcagtctcaaaattttcctaagccgctgtaactgccaaagaatggtaaacaatttgttaaactctaagcaaagcaatcaagaatccattaaattaaccgtttaagactattgaaggtcaaaaaaccgaagggagaaaaagtagaggacctttgattggagcttcgtcttgtggtttcatggcagggaaaagtagaacttcctggcacccagcaaaattatagtgaacgtgagcaactctttaaacgaggggtgagaactgaacaggcgtgtgagcagcacactaacatgtagggcaaccaaaaaagagagatttgcataccttgatattctgggaatcagtaaataacatagagagccggtcaatacccaatccccagccaccagttggaggtaacccgtactcaagagcagtacaaaatgtctcatcaaaggccatagcttcatcatcacctgatgcccggtcctggtaatgaaccacacaactatttgaggaaaaaaacttgctaaacaagaaacaagtacacaactgaagaagaatataataccttcagttgctcagcaaaccgctgtcgttgtacaactggatcatttaactcagtgtacgcattgcaaagctggataataaagattgaccagaacatggttaaagatcaaaaacagataactatgttaacacaaggggaattgcaaactctaaaagttgacagggcatacttcatgcttattgatgaataactcaaaacgttcagtcaagcctggttttgatctatgccactttgccagaggactcattatctctggatggttaataatgaaagttgggtttacacaagtctcttccaaaaagtgacccacaagctgcatgcagaaaaggtagactcgatgttatatatactaaaaataaaatggaagttgactgaagtcctgtaaaagagctataaaattttccaaatcacaaactcgaggaattttcaacaatgaataacatgttacagcaattgtatgaattaaataccatactctcttacgctaatagttaagatagtattagtagaattacaaggaaccaacttagataatgcagacacactttatcccaatcacctttgtgagaactgaggcttacacattaacaattctagtggaaaaaaaaaacaatctcttagccagcatattgtaagttgtaaccaacaaggaaggtggtaaagccagcgggcagtcttatgtgctgcttctgatgaagagagcatttatcacacatcaattaagcttttcaatgacttagatttacataactaaataggaaagaaattattgaaacaaaataaaattcaaaatctcctacacatcatccaagtaaaccaaacagtgcctaggcatgttaatagaaactcagcatccaagctcatgacgctacaacataagaaaaaaaacaatattcttttatgttccctattaaacatgattatgctaaagtttgaacacataaaagagaaaaaaatgaagtctaaccttgtccaataaacgggttgttgtctcaggaggtgcacatttgatttcatatcttacgcaagcatccttcaaatatttgtttgcttcatcactggcaaggtcctttggtatattaagattggccatcctctctaattccccgatcatatcaatccttctgcaataggtcaaaccaataaaaatgttatccagatgttaaaagcacttgagtccattacaagtaaatatattctatcaaataaaaaaaaaagtagatatattccatacctgaaaggtggggtaaagtcaatctcaattggttctgcatcaagtccatttgcatgatacctaattttatatccgcccgtaagttccttgaccattcctaattcagatgaacaatgtttagccaaaaaaacacacctaggtacttgaggaaatgaaatttgaaaaggcaagcacatgaagaataataaaagtgtactaacaaatatccaacccttaccactcaacattttctcagttagttccatcagatcattatagtctgcaaatgccatataaaattcgcaggtagtgaattcaggattatgtgttaaatctataccctcgttcctaaactgttttcctatctcatatacacgatcaagtccaccaacaaccagctccttaagataaagttcaggagcaattctcatgaaaagcttcatattaagatcattgtgatgagtcacgaaaggacgggcagctgctccaccagcaatcatgttcatcattggagtttcaacctgaatggaacaaaaattaagagaaaaaagagtgagcaaatattaaaaaccgtgtgcaaaaaaaaaacaaactatagaatatatacactaggcaataaaatataagctgaacaaactcataacgtaacacagactaacctccaagaaatcaagattgtcaagaaactttctaatatatgaaatgatcttagaccgggtcttaaaaatttgtcggacctccgaattcagcatcaaatccagataacgttggcgatatcgagtttcctaccatatatcaaaacaaaaaaatcacatttataactgaatcataaaataaatgggtaaacacttaaaatgctaacaaaattaataaaatgaaagaaatattaaaacagaaatagactatatcattgagtatacatacaaaggagagaattaaaataaagaaataaataccacaaaactagaaaaagctgttagcaaggatacccagttcgaaaaaccaaggtaggttactgaacaattgatacaggatcacaagagtatataatataaactgcttattttttatattgtagaaacatctaggcatatattattattatttttttttttatgcttgaggcaactcgtgtgcataatatatcaaatgtgctcaataaagaaatacacatcaaggattgtgattctaaagctagacaacattggtatgcatagaccaagataagcacaatatgttcttagagcatattcagtggagtgataaagaagtgatgcattgctatatttgagcaattttaaaaaaaaa

SEQ ID NO: 266091 - DNA, 1178 bp, Cannabis indica
gtcatttgaccatatttgatgtattcaacaaaatggaattttgttaattaagaaaaacctattttttctggttctacagcccctagtcgaaccccccctctttatctctatcatatacttttaaaaaataattaaagtaaaattaaagcttggaaatggagtgatttttgggtgaatattgtgcttgaggcttgtgaaacttgtggtaagctcttattcctcttttacttgagtttgatttctgagtttaaaggctaagtattgtaagatgttaatggtatttgatgttcaagtgagattttaatgcatgttggtggaattagtgtggatttgatgattcttttggttgtttaagctcatagggttatggaatagcttctattgtactttgtgtgattattttttagagttgagatgtgtgtttgaagattgagttaactctgaatgtttttgggagcttaatttttttttaagcttgtgaagtggaaggatgatattgattttagttcaaatttttgctggttttgatgcttaaagagcttgaattaaattatatatattgatgctattagagattgttttgatgtcttatgctctctgtttggggctgctgtgggtggctgttcttcgtgttcagcaaggtgtgaaatgaggaagtgaggaagacgaagcacaaagggtttgatatataacccaatgtcgtcagttattgggtattaaccgacgccataggtgccacgtgttgaataaaggtggcccctatggcgtcggttaatacccaataaccgatgccatagggttattaacaaaatcctgagtttccccaatccccaaccgacgtcatagatatatatacattctatacctacggtttttaccaaaaaaccgcctctaaatgtcaatgcagatattttcacaccctttagcttccctttttataaattgggttgaaaaaagggaagctaaaggcttacattgtagtagtgtattttgtaagtcaaatacagtcgccaccattagggtgatcaataccatataaaacacttacaaatatacttatctttcgagattaaacggtgctaacttactaatgaacgttcctccattagggaggattactcactaaataaaagctatgtaaaaccaacaatggagatcgaatgtcctaataataaagc

SEQ ID NO: 266092 - DNA, 1132 bp, Cannabis indica
aaataatttccaacaattatttgagacgtggtattgaaattattcagatgagcgactggatctgtagtcccatcatactgcaagacgtgagggtttttgaatccctgagggaatttagagttcataatatcaggatggaaaggcttgggctcctcatccaggtcataaccaggtaacttcccatattccccatcttggtatctcttgaacttatcctccaactcaatgattctcaattggatgggatcctcttgctattggttagcattaagctgttggcgtaaagtcaggtgcattctgatttagtcgctcgcatagatcggcttgccttcgattcaaatgctcacaaagatatagttttcttcgttcataattgctcacggacctcgtatctgagtaactctcagattgatacctcctcgtattgctcgtattctcttgatcagcataatgccgaggtctacttccctctcgtgtttgccttcctaatcgactttacccttgggaccttgaatgtcccgagctagaacttgccttgtcttgtattgctttctccttctgaaaaggttggatacacgcccttcatttaggtatgtgtatgcctcctccctctcagattgagaaggacgctgaggttgtcttggtggtaacccacttattctaggttgagtcccagaatttctctcgttattatgagggatttcctggaccctagtccggggttgccttatattctcatttttgcgagaagcgtctgacacatcattatgttcatccctttgattcgtaaatccttggggtctttgaggtactcctcgatgattttcttggttataatgttgttcatctactggaacatccctagttctcagaagttgctcctcctgggtgttttgggtatttcctttatttgcttcctgcctcctggttcttgaaccctgatgttaagaccgcttagtttaattcggaaattagcagttaatcttgtttaattatgaaattatttatagctattaaaataattatttatactgttattattgaattctgagatgcattttatgtcatttagtagttttcataattttgtatttccggtgcccggtaacatagaactcggtgtttggctcag

SEQ ID NO: 266093 - DNA, 565 bp, Cannabis indica
ctacttatcattcatcactgtgactctgatggataccaatatgtacttttacaactcagaaaaattcacttgtattcaagaggcaacatcaactccaactgccacatgactcattccaccaacaacacttttcatactcctcttcgctctctcattgccatttcttttggcctcagtttttgactttctgtccagcactctctggccttttgacaccttagtagcagtctcggttacgaggcgatcaacttttatggtatctttctcagtcgcattcttcttcttgacaacattgctttttcttgtagattctcctgaagtcgttgtgttggttggagttacaaatttccgtaaggaatcactaggcgtacaagcttggtcattttcacctttcaactttgattccagctctgaagcagctccacttcttgaacttgttgacttcttgggtcttattttggtcttagtagattcaaacttaatgaaaagaaatataaaaagcaaatgaaattagtaacgttttctatactaaattcaaaacagatcaaagttcatattcttctac

SEQ ID NO: 266094 - DNA, 1101 bp, Cannabis indica
tattttttggaaaaccgtaaaaatgtataaaatattctttgaacgtaaaaatgtaaatattttacaaaaaattgtgtcttatgtaattatcagtgactgattataaattatcattcttatattgtaattaaaatgtctgtagctaaagatattataagtcacaaaaattataatttgttgtgactaaatgtgtttttagtcacaatatttgttgtgactaaaactaaattagtgacaacttgtatataaatactatgttttagtcacaagtaatattttgttgtggctaaaagtcatattcattcataaaaaaattatgttgtgactaaaaagttatcactaaatataacaattttttgtagtaagtaatttggtttttcttttagttttgtttttttttttcataaaacctttttggaaaaaaaaaaaaaactaaaggtcatgaacattacatatggaaagagaaggctttttcaatccaaaaaagttatatgtttagccaatccaaaaacaacaacattaaaattatgactaacatgagagagatgccccaaaaaattaagcaataaatgtttttcaagaacaaaaacatatatttcattgtgatacacaaaattattaattagagctaagaccgaagacaaaaaatcaaaggaaaaaaccttgacttaaagtccaacaattctaattgatcttaatcctattgcacaatttaacgagactaatataatatttacataaacttgatgataaaatataattaatatacatttttttaatatgtttaaatattctacacatttgaataactaatatagatataaaaaaattaaaatgcaatttttaaaaaatatctgagtgtagcaagaatataatagagtaaagtaacaaggtgcaccaccttttacttttttgcaaactaaatatgtccgaactttatcacactgtgatagaaaaacactaacaaatcttcaaaggaagaattaattatttatgttataaacttattcaaaagcaaaattttttgtgaaataaaaaacaaaggcttaaggctatattatatagcctttgaattttaacatatttactacaaaataaatg

SEQ ID NO: 266095 - DNA, 864 bp, Cannabis indica
aggggatatgtgttgtagaatctttcctgctaccctgtcagaagccgcccagtaatggtatttcaagttggcccctggaaagttcagttcattgaaagccttatcttcagaattccatgcacagttctcctcctctcgcaaacttccgttgcatctgggagacctcgtttaagtcaagcaaagaccaggcggacctctctgagcatacatcagcataatcatgacggaggcgaccaaagtttcacgggtaactgaagatggaaagttatctgctatactggggggcattgaagtctttggtgaactttggaaggatataaggaagaacaggccggtagactcaatgagtgattttcttgaccgtgtcgaaggcttcatcaagctcgaacaagccattcaacgagtgaatggtgagcaaaagcctagcaagtcgaaagctccttctactggaacatccgcccaactcccccatgacccaaataattcaaactcaagtggtaaacgttccaacaacaaccacaggcaagggaatgggaagaagggaaagttcgctggcaaatccgaacaaactccccgggagaatcaagcaaagtacactgcattcactatcttgactgaagacgtagaaagtgtttacatggaaacttagttgctggccccatacaagaagtctgggcccatgaagaaagatgtcaacaagagggacatgacaaagttttgtcgattccacggagactacaaccatgacactaatgaatgcaacaacctaaagcgggaaattgaattccagataaggaaaagcaacccacacttgcagaagtatgtcaagaccgttcagggccagaggaacgacaataaccaaga

SEQ ID NO: 266096 - DNA, 1078 bp, Cannabis indica
aataatttaatattaaaaagtagctactctaaaataaccgattcaattcgcacttttgcggattggattggattggattggatttaagttattgtgcaaattagattgaatccaaaatatgaaatccgcacttagtacacatcggatacattataagcaaaataatacgaattgaattggacgaataccctttatacattttcatatttggatggtaagaattaatttgtggattattaagagaaaagaaccaataccgacacataaatgaacacgcggaggcgcagctttctttctcatatatagaatataccatttggtggtgttatgctgttggtgttttattgtgtattgaatttgtagatggataatatataaaaatataaaattgctaattgtatacccaaaaggataagataatatgcgtatatttgtaattgtatacccaaaaagttcacatctactaatagtgctattttgtcttttctatttttatatatataagaatttaactgacaatgactttacactaatatctattttatatctcattcaaaaaaaaaaaatctattttatttctattttagtgtaatatatgtgaaagccaaattttctatgcagattaagaataaattgcggtaaaatttttaaaagtttcactttattagtaattaatttttaaaatttaaattttgacagtaaaatcttctaaatttatattctcttagtaatttattatttccatctaattctaattatgaacaatatacacgtatacacaatatacacgtattacaattttattagtacaagtaatttaattatataaaaaaagaaaaattttctaaaaaaatcatcttaaattaaaaaaaataataaataaataaaagaattaaaaaaactaaaaatacaatttccctctaaaaaccctcctaaaaaaatcctacaaaaattccatatctcttctacctccctttcttactaatcggtaacctctgctaactcgttgttgacggaaccccagcagaagctccttatgccagcctcgatcagtttcacacaatctctctctctctct

SEQ ID NO: 266097 - DNA, 775 bp, Cannabis indica
agtcttcttctcttcttccagtcaacggaaaacagtctgaagaactcccatttcctcttgaaggctattcacttctgccgagagggtgccaatggtagcttcaagctggtgggaggcctcgaggtccttagtcaactcgactattttcctctcagcagtaaaatgctttttgttgacttcacctagctccatccagacagctccaagttccaccctagcgtcatcagcatccttcctagccaagtccgcctccgccctcatggtgttggacatggcaacatttttggaggcaacatatttagctcgagaataggtgtaagccaacttcagaccagcctacacagagaaaaaactttaaattctgaaccaagtaaagtaggattaaaggaaactgtcaacaaagacttaccctggtgaattccctcaagactcctcccatcaacagctccagggaagactcgttgtcagcaccggccaactgctcacttacctcaggaaccaactagttcatgtaatgggcgagtatctctttgtctttcttggcctctagaagcactggcaaaggtggagtagggccacgcatctgctcaaattcgctcttggccagctcggatccaccctttggacttagcaacttttggagtagaaggatccgcaacatctagctcctagaaaaggtcaataacctccccgaccggtgccttttccttggaaggggtcgcctcaccacccctagatttcttggctgaagcagatgagcttaagcttcctccaa

SEQ ID NO: 266098 - DNA, 2399 bp, Cannabis indica
tactcgaaaataattctaatataatatagtattaagaattgtttattggtaatttcgttactattgataattttttgattatttttgatttttttttttcttctaagtgtaactctatttagttataacctctcaattagaatattattttcttggtcccaaatgtattcttggatagaggttctactgtatatagacatatgaaagtaacatcatataataataatagataaaatcctaggcgcgcgggacccatagtatatatatatatggatgataatttataatatctactattaagataaaaaaaaataataacagaaaaggtagtttggagttttcaaatcttaccatggtataggtagagagtaccatattcaactattccattccttcctcggactccccttaattattattggcctctcaaattcacctcaatccaaaacacaatacaattacaagagataatgaacaaattatgatgaacccccacattctaaagaaagagatcaaaggaggaacaataacacacatcaaaattaaagctaatcattctctatcattaaacagtactaatcatcataacaatgtagacactattttttgggtcaaatttccctctatttctcctttgttatcatcctcattaatttattcattatttattttttaaaacaataaagaagagaagagaaaaacaattttcgataaggtaagcaaaactataaatttatactttttttcttattaatttgagggtgaaaatcccgcgtgttttcgcatatatatatatatatatgatgtgctggtgaaaacgacgagattgtgtattatatcacatatatgatgaataataatgataactcaaacacgaatatacacacagtagttgagctatatatacagtacactaactttatagcacagacagaatttactactgtatatatttattgttaatttccaaacgtagtactaattagcagaacagaaaaaacattaattaaaagctcaccgatggagacctttcatcaacctccgaatcccttttctgtagagagagatagagaaagagctatagcagcagcaatattattccagacctgctcgatcccaatatatatgacaaagaaagaaaatctctagttcctcttcctgtccctcatcagtaacatatatataaaaatatacatacatatatatataatagagggagaaagagagagaaacgttttttttttaagtgtttgtagttggaatattaatttgttttaagaaattattatataataggtttctgcttgtgggaaagagtttaatggtaaagtgtaataggtatgtatatgtacacagtacatatatatatgtaaatagaaacagtgtcagttttggagatcatcagaatatatattatatagccaaatataaaattaataattctttgtacttgtacggaatatctaatataatacccggtgaaaaatctttgacttattaatacctctgacttatagcatcaccaaaaataatacaaaatctcatctcaccaaatgccataaccctatctatgtgtagaaccctctatctattttgtataaataataatatatataagcgaagtacggtaaaaataaaaagaaagaaggcatttaaaaacaaaatgcatggagaaaggtcttcatcaatgaaaaaaaaaaaattgaatacttttaagacagagagagaaagacttgacctagacagtagtagtaatctattacaatctgctatatactgtagtctgtaaagtataaagtgtcaattttggacttttgtggttttgatttttgaaatctcatctcaacattatgattagagattattataattttatgctatatatatactttttgtttttactggtcagtttaatttagattttcaacttattttattcttaattaacagcgatattggcgatgaggcagccaagcagctaagtacttttgatgcatgctaactactgcagcttttcctttttttttaactttttttttggtcattttgtctttttttctgcaatttgaacaattaatgtactcaaaaaaactgggaactgtgtcatttcgtcatgattatttatccacatcgattgctgggaattgggtttctaattttctattaatagttaatacatatatataatatggtttttactagcttaaaccctagctggcttattagctgatcatcatgctcctcatttcatatataatagtgttatgatgatcattatgaagcatatatatataggtatcaatattatcatgggataaatcattttttcactattaagtactatcttaagatatcatcatgaacaagaacgaaaaagtgacattaattatatgttgagg

SEQ ID NO: 266099 - DNA, 567 bp, Cannabis indica
taagtaagaaacctatctgcagtttcaatgagtaattactcataacggtaatgactgtatctttattcattcacaataacggtaatgaccgtgtcttttcctcgatcataatcgagccacaacaaatacatatcattaatctcgatcttaatcgaagcactaacaattataattgtttcttatttaactacttagcagtgcataaatttttcttaccttagtcaaaaattatacgtgcgggccaacctgagtggaaacaaagcttgacgatctcgagtcctatgtcacgacaacaaaattcattaaataccttaaaaaaaaaaatctcaggattaaccctaattcccaaaactggacaaaccataacttctaatagctctaaaataggttttacaatttctaaataatctacactaaccaccgaaaatcacccccgagccctaaaatcgactttgagcaaaactaaaaattctcccctgcaggcaaaacagtctaccggttctgctacaattgaaccaaccggtctacttgtcctggcaggttgcagtcttgagtttcctcctccaa

SEQ ID NO: 266100 - DNA, 990 bp, Cannabis indica
taataattagtgatgagacccattaaatatattatattatatatagttatataaatagaaatatatgtcactgtatatttgctgttgactaaatcagcatctgtatggtccaattaataattaattatatataagaaaacaacaaagatcagaatgataactatatattcttcatgctagctagctagtttggtttaatcgataacataatcaattcatattattgtttaggacaaccacataattatattatgaaattcaaaacacattattgattgttgatagaacaaaccaaattatgttgtactataggtgttatgagctgactttacttataattaacttgagttagcataactgaatattatattaaatatataaattaaattatctatttttcaagttcagttgtattctacttctactttcttgtttctctattttgccacatttaaagcttcaactattaaaacttatccggcatcataagcaagacatatggcacaaattagatatatgtttagtaacttcactgccatgcaggctctttgttattttatatttgattatattattatgcttttcttcccaaaaaaataaatatcatttttttttttgaagaataattattggataaaattgatgatcaaatctgccacaagaaaatttaataaaatcagcattgggtttctgatgaggaaagataatagctaattaaaagtagctgaaattatttagttgtatttcaaaaaattattatatttcaatatttaattatagtaatattgatataatattttgtaagtaactaaactactattatcttttatcttttagcatttcttaattattaatgtattattatataaaagtttctaaatttaattagtgttaagtctttattatttgttttgggattgagaaaagttattatgtttgcctgtcttatttattgggtttatttataagataggctgtttttattcattc

SEQ ID NO: 266101 - DNA, 2344 bp, Cannabis indica
cgatagtcatattataatataataaatacaatgaccataattaaaaatatttttaatattaataataagaagagaataactgaaaaacaaaaagttttgaaaacaattttggtccaaattcaaaaaatcgtctcagaaaaaggattgagataagtaaatggtagctatcatggttttaaagttcttctgcttgacaattatatgattgtgaccttagatgtatcaaaaaagtgcataaaacaaaattgggaatatatggaattccactgtcaaattcctatttgttggttaagaaagaatatagcaagattaaaatcttaaaaactgagttgaggagaaagtgtgataaattatttgtagattatttttgtacctttcctttttctttttttcttttgtttttagcctattagtaattattatatttgtcattatcattaaagtgggtgtgttcctagttcaaagtgggctagcctagcccagcctctgaacttattttgatgttattccaatttggttatgactataaatatggaaccgttagtgaaggtctaatgagtcgagcctatattaaatattttattgaaaaaagatgaaacgaaaacaacttgtccttttcagccccttttgacctgtgattacaaattagatttcaccatactctccttctactttgcttctgaaaatattgagaaggttgtatgatattccaccagagtagaatagtgtatgtataccaacaatattttcatcaaaaagaaccaagagcttttattaaacaaaattaaaagtggcttcgaacaatccaaaaaccacgaccatatcttgtcaatcctgcatttaaaaacatgttgcaaccgcagttgtcgcacaagatgcacactgaaactgcagttggagcatcaggctccaactcgcatgatgagcttagacatggatgtggtccaatggtaaaccatgcaaatatcagttgatattccccatgcatatgtattttatctgtgtaagcaaacaaaaccaattttttagacaagaacataaaatcatttgttgaaccaatttatacaagtcatttgctgtaaagataaatttagatagtcacatttgcatgatgatgccgcggaagtgagtgataaaatttcagaacagaatttgtccaagaaatattgtaaaaggagaaatttatattataactttttgaaactatactatatatgactatacttgaggagggaaaatgaacatctaaggcagtttatacttgcctccaaatattcgtcaaatccatatttagaaccttctcgtccgagacctgattgtttgacacctccaaatggagccacctgcacagcaattgataagacaacatacatgaaaaagaatatattaactctgtcagggacctacctctgttgaaatgatgccctcattgacaccaacaagtccgtattccagggcttcagcaacacgccatgaacgtggaatgctgcttgtaaacatgtaagcagctaaccctgcattagcagattagatgttagtggctattgtagaatgaaactgattttccaaatgcaagaagcataattttctgtatggtttttgttgagactaaatttttgagtgactgctaagaaataaatgaaataaacctgagttagtgtcattagcaacgtggattgcctcctcctcagttttgaatcgcaacagggatgccacaggtccaaatatttcctctctaaaccaagggaaaacatcaaatggggaaatgcttaatgttagcataaattatatagttgtcaattatcattactctagcttcgtttcctaagatagatgtatataaatatataccattttttctaaagtatatgagaaagaattctcttttcatctcaatgaacacttgacataaataacttgataaacaattcaaagaggaaatgaagtgtcaataaataaaattctgaatttaacattgcatcccataattatacacgcaagcaatataatatacatttggaaacaatgaaaagaaagaaaaagtctatgaatctaaagaatatgttcaatttaatacactcaagcattgtaagaactactagataccttctaaagttcctaaatttggtattctaggcacttatcattaacaacaataattctctgcaaaatattacagcaatatgcacaagaatagctacaataagatatgatgatgtaaaagtcgccaattataaacttgcatttactgattaccttgatatgcgcatctcattattggtgtcaccaattatagttggctcataaaaggtcatgcctagattatgccttttccctcccagta

SEQ ID NO: 266102 - DNA, 675 bp, Cannabis indica
ataacatacacataacaaaaaatcaacaacaaactaacaagagtagaacatatcatattttctataaataaaataaaaaaaaattgtaaaaatattttaaatttcgttcaaccgtattttaataatatttttattatttttgtgtatttgtgaaataatctaatttttaatgtataatatttaattaattacatgggtacaattgaataattaggcctagtttgattgtaaactccttttgcatctatatatatatataaaaataggtataaagccaaatgatggatcttacaaggtatcggctataaaagcagctataaaggagaaaattcgatacgatccaatagtgagatgcgtggagaaggagaagctcaagttaatattgtatgagattttcttgtgtgtggctaaagatggaagcaagtttgaggagtgtgaaacatcaaaagaagatattccaattccaatagatgaggaagagtatgaagcttctacatgcccaaatgatggtacgataatttttcttaagattatttggaaggaggataactactgcaaaatgatgatcatgaaataataataataataataataataataaataataaataagaaattaagaaacaataaaaacgaagtactatactactactgttgtgttgttgtacggataag

SEQ ID NO: 266103 - DNA, 955 bp, Cannabis indica
taatattataatttattataaataaaatattacgatatatatatttagtatgtgaaatcggtttttcttttaactgagttatttttatattattagcaataacatatatatatttattatagataaattttatatggatggtgtgtataaatgacatagcaaacaaaaataaataacatagtgataaaatatatagaaatgttcattttaattaataaaaaatacaataaaatttaatatttactaattaataaatatatttctttaataaataattattttatttttatatataattaacattaaatagatataataaaaaacattttaattttaattttttaaaataatatataagattcttatactcaaccaaacagtgtaatttaattaacaagaatatgattacatattaccctacacagtcaaacacagtttacacatttccctataatcatattctccttcataatattccctataattaaattactttgaacacctcgtaccaaacgctctcttagtaatttataaatagtaagaaagtttataaatatatgattgtgtagttattattaaatatagaatgagtaaatagaactttagttcaattaagagatttgttctgtctaaaaaaaaaaaaagaaaaacactgttacctattactttgtgcctttctaataaaaatttttttcctctaaaaaaaatatcactaatctgtttaataaagaattgttatgagatatgttgttgaattttaataatattataaataatatttcaattaataataatttgggcaattaacattaacaaaaaagaaaaagaaaaattgagcaatttgttttcatttatttcaaattgggttacaaagttatcaacttgtgagagagataacgaaagcagataaataagaccaccaaagagatttgaaggctgtttggctttacagttt

SEQ ID NO: 266104 - DNA, 637 bp, Cannabis indica
agatctaacattgcatagtgattattatttttctttttcttttatgagttttagattcgatattctatagtaagttttctatagatttctttttccatgagttcctttacaatttttttaaatttttagtattttatccttattttgtatgttaccccttgataatctcacggaaactcatgaggttaatagattatctaatttttagtgtttttaacctatgataagattttgataatttgataaatattatgtttggtgtgatttgtaaaaaaaataataacattgtatatatgataatgtagtgtggtagcaacaatatatgaatgttttattaatttttttattctatgaaatttgatcacgtttggtcaaattttgatacggtgataataacgaattcaaatataatgacgactacaagtaaaatacagtgatgacaataactttaaatgttcaggtgactacaagtgagatacagtgataattaacaagggctttgaatctggcagcgcgacggctaagttaaatacaacgatgacaataattttcaactttttttcgtctttcaacatacatacttaaaatatagttttctccttaattatattgttatgttttaaattttgtagtgtac

SEQ ID NO: 266105 - DNA, 2792 bp, Cannabis indica
tccaatgtttgaaggtgagatttataaactttgaaagaacaaagctcccacgaagagattttaaagcataatttggaggaaaaaaggaaatacttttcagatatttgtctggaggtcgagaaaagtgatgcggaagttcaggtgaatacttttgtattacttatgcatgcattttaacttgttgtgcttctatggctgtcccctggtgtaatattaacttttcaaaatccatctgcttgacaggctgagggtgtgtacaatcaaaggcttcaaaatttggcagttactctggacaaggtgattgtctatttttatttgtagaaagaaattatcaccatatttgattctttcttggtcttctttggctgtgttattatctacagtaaattcttattattgttaacttatataattgtaaaacgtgtgcatataccaagttgagtccaagtacaatgacaagactgggtattttgcacattatacgctttggcattgcaatgattattttatactttgtaatttgcatgtgatcctgacatttggcttataattatgctgaatgctgtatactcaggtgaggtatgttatgagatgtgtttttggtgacccaaagaaagctccacctcctctagagaggttgagtcctgaagaaacggtttccttcctctggaagggggaaggatcacttgttgatgaactccttgaaagtttggctcctcacgtggatggagaaaagcttgatgatctgaagtgcaaggttcatgttcatgatccaatagggtctgaagactttgagagagatcttaaaaggtcattgttatggtaagtagcatgcatatatttgtttctaaggttatccattttttgttttttgtttaggagagaaatagtttccgttattttgttgaaggtgtatgcttttgtcccttgcaaaatttattttggactatttattttgaaggttgagagatgaggtcaggaatcttccatgtacatacaagtctcggcatgatgctgctgctgacttgatccatatatatgcttatacgaagtgctttttcagaatacgggtaagtctcatttcttggaaggaagcaagggtttgagaatgtctcttacgacttacatgattttcttttcttaattatatatcttcaggaatacaaagctgtaacttctccaccagtatatattagtccgcttgacttgggtcccaagtacaaagataaactgggaacaggttttcaggagtattgcaagacatatggggagaattattgtttagggcagctgattttttggtacaaccaaactaatgccgatccagattgtagcctttctagagtgagtaggggttgcttgtcgttacctgatgttggttcgttctatgccaagattcagaagccttctcggcagcgtgtatatggccctaggactgtgcgatttatgctgtcaaggatggtgggtttagttttcttgttgaattttgttaaaaaacgcatattggattccacttttgtctgattcatttgctaaacttgtttgcttgattctccaggaaaagcagccgcagagaccttggcccaaggacagaatatggtcgttcaagagcgccccaaagattctcggcagccctatgctagatgctgttttaagtaattctcaattggatagggatatggttcaatggttaaaacacagacctgccatatttcaggcgatgtgggatcgatgaatttttgcaagcagtaggaacaggaagcagtgtcactggtgaaagccgtttaattgttttggaatgattctcttagatttttagttaaccgctgctccttttgatggtgggcaaaaatcattccaaagcgccattcgttgtgctactttctcattattctgtacagtttttcatttttgtaatttgtaattcgttatctagtagttagagcatttgttttccctattctaatttaagaaaatatgaaaggaaaaaaggaaatatctatcgcctttcttcaaatcccactgctcttactcaaaatataattatatactagcttaatcttctgtgtatatatataacacgtgattaatttagcagaagtaacatctttttgtccctctctcattttgggcaacatgaagcccatgcatatatttagaggatactgatcgtgtaacacaaataacaatataaacaattaatcaaatattccaagcttgaaacgactgattctagcagacgtctaaattagtttgactgagctcttccatctttgctttctattctttttgagtataaggcctagtaattggtgtctaatttgaagctgtggcagattaaatagggttatttggtttctcagaaaaaaaaaaagattagatcttggaatgattttttgttatattcctgaccaaaaaaaaaattgaaaaaagtatatgtaaactgaaacctaacacatatttcttcaatctggtaaggcaattatccgagtatgggatgatattccagcttaaatattctatctaattataattataatttattttttttttcatttttacattatatgggttggggttgtttcgtcggctggaaaaaaattaagaaaaaaaatcttcggcaaaaaaaaatataaaacaaaattgggtttgacttaaatattttgtatttaagcatatttttgatagtgtaaaaagaaattattttgacattttttaattaagtagctaaattaagctacatatattcaaactttttttaattattcgtcattagaatcaaaaatctaata

SEQ ID NO: 266106 - DNA, 507 bp, Cannabis indica
atccaaaagatcctggaacctcaggtcctcacaaatataaagggaaagggatagttgtcgaaacttcaaagaagactctttctactaagcagcataagaagtctaaaactgtcgaccaacctctacagaagaagaaaggaaaccatgcttcagggcatggtgactagactaattttggagacaaagtcgcacagaaaaataagactgatgtcggagtccagaagccagagtctaggaaggacaaaaatcatcccagtgattccagtaatcaagatgacaatttcgatgaggtgtatccagtatcaaacaaaaatagtaaaagtctttccataaacgatcttcaaagaagattgaacgagaaaaaaaagagccaaaaagaaaaagtcaggcctcgtgggaacgatatgagaaatcatatcaacgatcatgtttgtagaagagaatcttcaaatgacaagactcaatgcctagaacgcaaagtcgaggagttgatgaaaatcacagaaa

SEQ ID NO: 266107 - DNA, 525 bp, Cannabis indica
gtacaacaaaaaataaaataaaaaaaataagaacgttaaagtgtaataaaaactaaaacataataaaatttcatcactaattaatcttatttaaattaaaaaaataaactaagtaactaaaaaaaaacaatgaaaaatgccataagaacatttatcaatctagttatatatatttatatatttaattctttaattttgtagtcataataagtacatgccttgatgtaatatgtgacagaacgggagcgctaagcatagatggcgtttagtaatatttttgttttaaatttttaatcacaaaataaaataaaattcttatttttaaaatttatttttgaaaaataaaaatgtgctctataaccatttttcaatttttgtttttaattttaaaaacaaaaataaaactataatttattattattttcaatttcatttgttaattttatttaagtagtgtatgaagtcggggctaaggtttgggtttaggtccaggtctggttcgaggttcgggttccaaggtgtagg

SEQ ID NO: 266108 - DNA, 895 bp, Cannabis indica
aaaaaaaaaaaaagaaggtgacatacattctatttaataagagttgtatttttttatttaatatttattattaaatattaaaaaaaagaataaaaaattaactgaattatgttataaacaactaaacaaatgaatctttactcaataacaagaataatttaggagaatatttaaaatcaataataatttagaagcataatttttcaaggaaataataccaatttattttttaataacacatactaatcactttaaataataataataataataagaagaagaagaaattacaataaatcttacaaactatatgtataattgactgtaaaaattatttaaatatttaccattttaaaatattataaatgtataaagcgacatcgttttgtagtacaatatataacccaattgagagtacaataccattgtgtgcaagtttcaaaaaaaaaaaaaaaagaaacaagttgtgtgaccgttggggtggggcccgttgaagttacaaggtaaccgttaaacattcaaaaaaattaaggtaaaaaacttccacaaacaatgttgtgtgctttttaggccatttctcttataatcccaaaatctcaaacaaaaattcacagagaacagagaagaagacccaactcatcaatgggctgcgtttcgtcgaagctcttcaaaaaagagcttaatcgagatatcatactcaacaatggcggcgactacatgaaccatgtagtttctcttacatcaaccacttatggggttctcaatctcgacaatgggaagcaaatggttaaagactctgttgctgttacaacagagactaataagaaagttgagaggtcatcaccgattcgagaaaacaagccagaggttattaatgcttgggagcttatgaagg

SEQ ID NO: 266109 - DNA, 1264 bp, Cannabis indica
tttagttgtttcaatgttgtttttagttagtctgttttgtgttctactattattttataaaaatatattatttttgaaaaaaattccgtgtgacatgtatttttgtaaaaattaactcaaattctagtatttttgtaagttttccattaatatataatttaaaattaaattagttaaaatttattaaatgcaaacttttcatgtagcatttcaccgttgagataagtcaaccctgtcatttattcaaggcgcttttcacagcgcatttgtcatcgggaaaggtccaactttcactgatggactattgcgctaacaatttattaggaataacttttgtcgcccctaaaacacctataagttgctcctaatgtcttttagtggcgacatgtcgcccctaaaagatcgtctctaaaattcgcgcataaaaataccattaggggcgacaaaaaaagtcgcctgacaattggggcgatactgtcgcccctaaaagtaaaacacgaattgtatattttttatttttagaggcgataatgtcgcccctaatacccaaaatatcgcccctaaaaggtgttgtcagaattgttatatttgacttttgggagcgacatcgtcgcccctaaaggtttttaaattataaaatatatatattatttgaaataataatttttaatttataaaaaaataattttaataacaaataaaataaaaattaataattaatatcaaatataaattttttcattaacatagtagcacaataacatgataaaattaaatagttcttacaaatattattattaactaacacaacttaaaaaatattataataataatttttttaaaaaatataatagtaatttttagttctataactcaggtaaaaaatcatttcatctctcgttctcattgaactctggatggtttggtggctggcgcttgatgtggttgtagcggttgtgatgtatgcagtggctatagctatgatatatgtgatgattgtaacagatgtgatccaatgcggtaaaacagaactaatttcacaaaaaataataaataaataaacatgaatttatatacagaaatatatatatatacatacttatattatttaaatatatatatatgcacgcactaaatttatattcatatataaaaatacatatttccatatagtaaactacaaatatatatatactcacatactacatacatattcatatatctatatctttttttatattatatatatatatatactaataac

SEQ ID NO: 266110 - DNA, 638 bp, Cannabis indica
gatggaagcttctcgtggaggaggagagcaaatccgaagatgcatgtgttgaaatggtggttgacgccaatgagaacagtgaggggcttattgtactcattcgtcatgtaggttgtgtcaaatcctagtacatccccaaaagctacatagtccacgcgtgagtttccatctgcccagaataagttagccaagcgattctcgtcgtcaacctgatagacaacgaagaaattaggatccttctctgcgagacaatcaagaaatcccagagccccttctgagtccgtctctatcttctcttctcgcttcgcaccagcaaccctgttgtacacatctcgaagttgacatggcattttctcgtaacctccactttgcaaagcaacatgagacattatgttggcagttttaattcctacggagttcatcgacctaacttgggcaagcaacccattggagacaactctatatgatctcaaaaattgtacctcacttgatgaagccagctcgtgattgtgcattgtgctgaactctttgcatttccaagtgttacacggttgtgtgagtaaaatacgcaatgctgcctgacatccggttctagtgacatcatgaggtcttttttttcttggtgtgtccggtgatgc

SEQ ID NO: 266111 - DNA, 4386 bp, Cannabis indica
ttacagttgctaatcacaatagaaaaaataagacaaatttttccacctttaacgtcacctattaaccccccctggatttatgccacataaatttttttacgtgttacaaaaactatgtgtaagcatttcaactacaggtgataccctattatataacacttcgtctaatcattggaagaatcaataattcaaggaaaaaaaaaacttgtcttaaaaaagtaaataataacatgggaattgagtattacctaaccaacaatatttgcaatatctgaaatgtaggtttgaacttctccagcagtcatggcagcgtacactagtctctgtaggttgatttgaagacaaagttctcttccaaatggcaaagtactcaaggataagaatcgaagcaaatacaaagacaaatacacgccataatttacgtataacactcctattagaaagaacacaagcaaccagcaatacgatgtatagcatagagatgacattcaacaaagcaaagcttgcaagaagcaatgcaatcatgtttatctcaagaccaaagagattaaacatattctctaaccagaattttaaatatatttttaaaagaatcttttgtgcttcaaatctttcctttctcaaggatagtattcgcttcttgttccacttatgactttcactggtgcttccccaaatgtagccaaatgagtatcttctgctgccactaccctcggagctccgtgctttagaggacacattattaggtgattcagacaaaccagaggaaaatggccatggaatgcttgtcacacgaacttgttctgcaggcaatcctccagaatccaatgcggtattttcctcaccagaaatggaaacactactgataccatcttctcctgaaagaaacaatggacaaggttcttcccacttccctttattcaaaatactagcaggcatattgtccagccaacggaaaacattatattgaagggtacatgcagcaataaccagcacttttcctctcaagcctgattctagaccccaaaaaccatgcttaaatacacgaaaacccaaaaatatagacagatttgagtgcttttgtccagggaacatccccgccaggctaccccacatctgaaaaagatattcagccgttactagaaatcctgtagtaaaccaagaatgatttgggtgggaagcgtgaagccttaggtaaagttgaacaaaggacaagaccaaaaagatatagaaggccaaatgcactaattggtgatatagatgcatagaacaatgccataagcaaaatcttgtggctatgccaaatgaaaaatcgtcgaacgagcccaagtaatccgaattccaacgtatcagaatcatccaacctgttatgcttactctgtctcctctcatagctataaagctgcatgacaatcaagatagcaagagattcccaaacattctccaatgatgaagcgtcaatgttatagcctaggtagaaattaaggtctataaatctagacaaccaaacctcaaagctgggaaagctgctcaaactataaataaagataaacaccatgattgcatatgcttttaatggaaaccaaaggcgtctttttgttctctcaactagttgtcttccgattatccaaacaaggaggaggaatatgtacccaaatgatatataattaggcctaacaaggtacactgtgagaagaatagtcagaaaggcaatgtaggttccaaatgatcggtacactgagagaaacttctgcccaattgcaccaaggaatgatgctattcttctttctagaagaaaattaaataactgcttgttagcgtaatagtagcaacaaaaataagacagtagcagaaactcagatataattatactagctgtctacaatttttgagtttagtaaataagcatatattaattaattaatattacaaaagtttctttagtaaacagcatcattctctaaacagcatcatatcatcttaacaacaaaaagcttaaggtataaggctatcaagggttcattaaagtgttctttaccaaaaataagtaataactatatttaattcattccagagtatgtaggagatagttataaagccagaataagtgatcagcagattttgctctcttgaatctctgagcccaataattcattataatatgctaatttgacatcttaattaaactataatttgtagagaagcattaagccaaatatgaaaactataccgtatgaaggattatcacgtgtatgtacagtggtaggtgaggcatacactgacaacaatacagatttgttcaggccagcttttaaaatactaaatccaataggagggcttgaggtattctgcactattgccgagaaagaaaatagcatatcaaaaccatgattgtgaactgcacagaagcaaccgagtaaagctatttccaaaaaatcccacgaactttcaggtttcaagagacctgtggcggtagggaaaaaaaagttgtgtaagttattttcagcttttctttgtttgtgcagtctgacattaaagaacattcatatacataaagacactgtttgtgtaagaacattcatataatttttcaaagtaagtcatacctaactgtgagaggacttccatacttaaagaacctttttgttctaaagtactggagatcaaattaatctgaagaatgtataacagtgcaaagtgagcctcgcataaaagaatcaaacactggcgaatccttccactgatgttgtggctcaagagatatattaaaaagaagatcactgaaacaaggttcaaaagaacataaaataataagcaaactggaataaactttaaatcatataataagtacggattcaaagtgatgtactatagcatataagaacaaaatgaatagccaagaggagctatggcctagtatagtttacagcaaaggttatataatcatgataataacatacaatatacagcgtggataaaaccaggcttcaaggcaatgagaaatatcagtgccagcataatagcacgagagcttttgcgaagtccccatgcaattgtggccacaatcaataccttggtctcttcctgccctgttaatttgtgcacacataaagtattatatcaacacaaaaacatataaaaagatttggccaaacacaatgcataatattaacaaggattaaaaaaggtattgaaaacttaaatgcctagctataattcaaaaatagaaaatataattaaatgaaacattgacgttcaaggtaacaacaagtaacagcatattataatgatgagttttcaagcctatacacagcactattttatacatgaaaatctagcaaaaagatgcatagctcctaattatttaaaaaataattgctaataaataccactaccttccacaacattgttatcattcgaagatcgcctatcttcatcagacaagtagagaaaaactgagttgttaacaagattacccagggcgaccaatattccaagacaaaattgtgcaagcaaaaaaaatccaggtacaggataatgccacaagccaaccatttcccatatagccatgtcctacacgtataaaaaaaatagaaaaaaaaaggtcccagtttaaaattgtgagtattttcaattaataaacaggaactcatctcaaaagagaggataccttccccagttttgaattcaataatgtgaatgccacattgaaaacatatgtgctgacggcccataacagaatgaagacaagaagcagcccgttcaaccgatgcaaatggaacaatgacgggaagacatacaagatgtaaccaacatatgcaagtaagccgaatgcacatatacttgcaaaatgaaaactccaaaaggaaagagcaaacaaggacacctgccaaattcacaccaaatgattcatatagcaaataattagttcaaaatgcaaacagaactgcaaatcgttaatttattctattgataaaaatcaatagttagggaataagcaaacaatgatttacatcgtgcttatactagttaatgtaagtattcattccataaaatgaacttattaaatcataaattgagttcaatacagctttagacacaaaatatatgaagatttatcttcatctgactagtaggatccctaatggtgacaaatgaaattaatgacctatactgacaacttttgttcttattttttttataacaaaacctcaaactcatcatattaacaataaaaaaacataaaaactttttttactcttttgttagcaataaaatacatatcaacctttgaatggaaacaacaaaaggtgcaaaagaatatataccggaaagccatacgtgaaaaagttgaatgctaaatatccgaaaactagctctctcaag

SEQ ID NO: 266112 - DNA, 1247 bp, Cannabis indica
ggttgttaaaaccaaccttaaatatctcatcaaaattcaaaattaaaaaaaaatgaaactaatttaaaatatctaggtttatttgaattatttttagcaaattaagttaaatatctaataagataaatgatttgaaaataaccaaaaagatattttcaatatcattttccaatcttataatttaataaaattaaaataataaaataaactaattttaaaatagatatggttaggcaattattattttaggaataataataaacaaataataattatcctaattatatgtcgaaatatctcaaattaagcatttttcaaactctacaaaaatatctaggttattaaatatataaaatactatttataaatttctaataagaaaaatgatataatataggataaatataattttttaacttataatttataaataattaaatattgaacagaataaccaattttgaattttaaaatattatggttagaatatctaaaaaaatatctaagttgatttcaaatttattaattatttaatttatcttataagataattttaatataatatttcaaattaaaaagataaggctatcattaaatttaaaatatgtccaatattaaaatatctaatcttataattaaataatatataaatattaaagaaattaacaaatttttaaatctcaccataatttaaaaaataaaataatcaatttttaaatttaaacgttaaaatatcaaaaattaataataatatattaaaattaaatattattaatttaaaattgatatttaagtttaaatatattaaaaataatattttattttaaaattagggtttgaaaattgcaaaattcaaaatttggggaaaaatcccacaaaaatcgaattttgggtgtggctgccagcaaggctgcacgtgcagccaagagaggctgccagcagccctcatgcgcgcgcgggaggaaggagcagcatggtgggcacccgaggaaactcggcgtttgcagcatcctggaggccaatttgcagcgtcctgggcgaggcccgtgtccgagcattcagtgccttcaaccacgaaattgtctgaagatccacgcgcggagaggtgtcttgtccgagatgcctggtgcgcatgagcaccatctcgacaccattacaacccgattttcaaaccttcatatcttactcaatttttatcgaaatcgagttctgtaaaaaccaaaattgcttaatttttcacaagaaat

SEQ ID NO: 266113 - DNA, 905 bp, Cannabis indica
tagaacttttgccaatataaaataaaaagcgcttgcaaaaataacttttcccagtgcgtaaatatgctggtaaaaattaaattttagccactgcaaatgtacgctggtaaaattttgacctctttgccagcgcagtttgcgaaatgagctgttaaaaattatttttaccaacgaagtagcgaactgtggtggtaaaaatgacatttcttgtagtgctatgggagtgagggaggctttgagctggctgaagaggaaagcttggaatcatgtgactattgagatcgattgtcttactatggttcaagctcttcgtagtccattttttatggtttcttactttggaagtgtgatttttgattgtaaggctttgtgggatgatgtcagtggtgtatctattttatttgttaaacggtctactaactgtgttgctcatgttgttgctcgagcttcgtgttgggttgtgattgtgtcatcaggagtgatgagtgtactcctgatattcttgatgtaatcttgaaagaagattgagaataaaactttcttttaaaaaaaaaaaaaaaagctatattaattgcattttattaaatctagttgtcttgctaaatttaaatttgaatttgatatatttttttttgaaaggaagaatttgatattattggagtacttatatgaagtagacatattgaagaagttcaacaaaattaagttatattaatagcgttttataaaagctagttgtatttctaaagtttaaatttgattctgacacatatcgaatgggacaacgttttccgtatttccttttaaaacttacctaaatgtcacgtaaaccaattaataatattaataataaccaatcaaacaatgagtttagttgccttgttccataataataataataataa

SEQ ID NO: 266114 - DNA, 728 bp, Cannabis indica
ttcgttgtttattgtgatgcatcgtgatagggtctgggatgtgttctgatgccagctgaccgagtcatagcttatgcctctcgtcaactgaaggataatgagcagcgctacccaactcatgatttagagcttgttgttgtggcttttgctctaaagatatggcgacactatctttatggtgaaaaatgcgggatttatactgatcataagagtctcaagtactttttcacccagaaagatttaaacatgaagcagagaatttggctagaactggttaaagactacaactgtgagattccgtatcaccccaggaaagccaatgttgtggctgatgcgttgagtagaagaggtcccgggaagatttccactactgttatgatagcccctcaactagcctttgagatggttagtgcaaggattgagtttgtagttggaaagttgcataagttgacactttaatctgatctgttagagagaatcagaaaagcacaactagaagatcccgagctagtcaaggtttgagatgaggtgatggctagtcggcctaaagacttttcagtctcgaataatgggatgttactttataaagctcgagtttgtgttcctagtattgatgagcttaagaaagagatccttgataaagctcacaccataccttattcactgcatccgagaaccaccaaaatttatcaggatttaaaaccctacttctagtggtatgggatgaa

SEQ ID NO: 266115 - DNA, 662 bp, Cannabis indica
atccgggttcagctcccaatttgggtctagatctgatttggagtccagttcctggtccgtttacggttatggatcttggtccaatttaatatattattcaaagtccaagtcctagtcccagtcctggtcaacttcaacttttggttcaaattttgggtcacagggtacgggttcgggtccacttttaggtttgggactgggttcatggcctagtgtgggttcgggtccttgtcaaggttcaagtccagggctgggtcccaaatcaagacaccgactatgggttttgtccaagccctgggtcgagatccgaatccaatctcgggtccctgtgttgttcgatttctagtgccaggtcacgagttgggtcctaggttcaacttcaggtctgggttgggtactaggtcctagtcctagttttgtttcccaggtccctatcttgattcagggtccaggtgtcggttattgtgtgggtttgggggtcaatctaggttaagtttcgagtcctagtcttggttcgggtttagttctctatctcagttttgatctgggctcgtgttttgatttttgtcctggtcctagttctcggttcgggtctgggtttgagtttgggtcagagttcaagtcctggtctgagttttggttccggtccggatttcagtgta

SEQ ID NO: 266116 - DNA, 671 bp, Cannabis indica
acaaacaaataaaaaataaaataagattaagagataggaaaaataagaaatagattttacagatgaaaactaataacaaaaaaaaaaaaaaacagccagatacgaacttggatacgcccggtgacaacggaggatgttgcgaaaatgaacggccgagatcgaaatcgccggagaagtgggacgagcctgggagcactgaagaaaagttgagagggttttagagacgagctgagaatggtttaaatatgaaaagctaaaatatgaaagggtgagctttaatgaagcttttagagggaaactccgctttttcaactatttctttttttttttgaaaaaatgaaaccattactgatgacaatgacgtcagtaatgtataaaatcgtcattaatttataattttaaaaaaaaaaaattatcaacgacgacaattaaatgtcgttagtgatattctcacttttagtaaggacttcttaccgttagtaatagtgccgttggtgatgctattaattcttgtagtggaactacatatgtcaataactttgtccacccctaagtgaaatagagatcatgtggagttatgaatataatccagagttcaatggatataaaagatcgttgaactgcatatattattcttaacttcttccacccctatcagatcaaaagatctt

SEQ ID NO: 266117 - DNA, 523 bp, Cannabis indica
aagagtatacaccttacatacataataataaccacatcaatggtcaaaaaaagtttcttaccggtaggtaactttttctaggtcctactatagtcttgccctataattataaataagaatattttggttatattgaaaaatatttaaaccatagaacttaattgtaatctctataaactactagatgtaaaataaaattttaaaaaatgtaaaattcaaattattaattaatcaaaatacaatgtcaaaaagattacaaattatatattatataactttttggatttggatgataatcatccaattatacttggattagattatgaaaaatgaactctaattagattttttagtgagtagagaaaaaatccaattagatatctaattgaatatttttgttactatttcatatataattaattaagccagcccccactaaattttttctttcattaatactttattaatttttgggactttttcatttttacactttcaaaacagttttttttttttttttttt

SEQ ID NO: 266118 - DNA, 617 bp, Cannabis indica
tctaaatatcaaaatagtaaaaagtgtattaatgtatcctttttaaaaaaatgcatttaataaaagcaccctaaattctgatcaatttaataatttttatcattgtaagaaaattatacgattgaagcctaaattcaacaatcatatataataatgttacattttattatgaacttaaatcaaacttttagagtaatttgcgacataaatatttaattttatttgattgtagataaatatttaattttaattttttccggtaataatacttaaattacatttctaaaactttcgtagtacctgaccattaagtatcaagttcatggctatgtagcagtcctcgattgatccatgtcatttaatttttattttttatttaaaacaatttaccaataagaaaatgacatgtaaatattaacttaacacttaacggataggtactcacgaaagttctagaaatataactaaggtattattcttattaaaaattaaacttaagtgtttatctgtaaccgaaaattaaacttaaatatttacgctacaaattactcaaatatatttatatacctcttgatatatgttatgataagtgacattaggaccaggcatcaaagcag

SEQ ID NO: 266119 - DNA, 3194 bp, Cannabis indica
aaatagtgaaaaaatcattctatacattggaataatattctaatattttaaaatgtaactaaacaaccttatatattacattatttctttaatattctacatcaatttttttttttgagactgaattattttcaatgcaacaaatgtacaacagctttggatcttataaaaaacgtacaagttcgagcaatactaggaccacacaaatcgactcaagccaaattcattattgatttgggacaaaaagctcaagtgccaataatatcattttcagcaacaagtccttctcttaaaatttcaaatcaaagcacatattttttccgaacggcgactggtgactcatctcaagtcttagcaattagttccatagtcaaagctttcagatggcgaaaagttgtgcccatttacattgacaacgaatatggagaaggaattattccttatttggttgatgccttaggagaagtgaacacggaagtcccttatcgtagcgccattccaccctcggccactgatgatcaaattaaggccgaactttacaaactcaacacaatgcaaactagggtttttgttgttcacacgtcgtctgacctagggataaggttgttcaccatagctaataagattggaatgttgggacaaggctatgtttggatcataacacaagatttcgccaatcgtttaaactccttaaattcctcgatcatcgactcaatggaaggggttttaggaatcaagacttttgtaccacaatcaaaagagcttgatagttttaaagttaggtggaaagccaattacttctacaaaaatattgatcaaattggcaaaaatcccacttttttcgatgccaaactcaacgtcatgggtttttgggcttatgattcggtccatgcattagccttagctgtcgagaaacttattagtacaagtggcagtgtcattaatacaacgacgttaaatagtgtcacaaatactagtggctcaactaatctcgatagttttaatgtgtcaccaatcggtccgaaattattggaaaccttatcaagtacaagatttaaaggcctagctggagatttcatcttagataatgggcaactaaaaacaccaatttttgaaatagtgaatattgtgaatggtggtaaaggaagaattgggtattggacacaaaataatgggctagtaagaaatttggcagatttgagtgttgaatattcaacttcaaaatcaagtctaaaacctattttatggccgggagagtctactaattctcccaaaggttattgggagaatccaactaatgagaagaggttgaggattggaattccaaacagtagtgtttatagagaatttgtagatgtgataaattgcgatgcaaacactagcattttgtcatcatcagatgtcataggatttagcatcgatgtatttaaagcgtcagttagagcgttaccatatgctcttaattatgatttttatgtcaatcgtgatggttcgtatgatgacttgatttatcaagtatatcttggggtacgtaatatatatttttattaatattactatttttgtcaatgtcggtagaataattttttatttttagtatttagagaaattataatttataaatttttatatatatgattgtgtctattgtagttataacatacatcacattctatatgttttagaaaatttagaataatgtattgtacttaaaatatggttcaaatattcagttgcacatttattattagtatagtaaattatttagaacttttcagaagctaatgaaatgtccgttataactataatatcgattgacatctaaaaaaattgagctataacttttctaaatactgaaaatacatatatctttaccgacaaaagtaacatactataattatcttatcttgtatatatatatttcactaattaactgtattactatatttgacagaagtatgatgcagtggtagcagacgtgacaattagagcaaatcgatcccaatatgtatatttcacattgccatacacagaatcaggtgtggcaatggtggtgcccgtgaagaacaacatgactaaaagtgcttggattttcttgaagcctttaacgtgggatttatgggtaaccaccttttgtttctttctcttcattggttttgtcgtttgggttttagaacaccgaatcaatgaagattttcgcggaccaccgtctcatcaaatcggtacaagcttttggttctccttttccactatagtttttgcacatagtaagtattctttctctaatatatttatcacaaaattacacattaacttttttatatgacaatttacattatagtagatatctttttaattttttgaaaattctaaataaaatattatgtcaaaaataaaatttaaaatatcaattgtacacttataatataaaataccacgcatacaacttgctatgcaaatcatatttttagcacaataaatttattcaaaattttctaaaaacaagcatcaatatgcctagctacaataaaaagttagtttataattttttttatatactgaaaacaaattatgatcctacagtagaactaaaaatgatgccttatctaaaattttttccacatataattttatttctttaacgaaagatagggtttgtttgcagaggagagagtagtgagtaacttggctcgattcgtggtgattgtttgggcgttcgttctgttaatattgactcaaagttacgcagctagtttaacatcacttttaaccgtggaacaactcgaaccaacaattaaagacattaaccaaatattaaagagtggagaaagagttgggtgtttgggatactctttcgtgtatgagttgttgaaacaaagaggttttgccaattcacaaattgtattgcttaattccactcaacaatgtgaccattttttatcaattgggagtgcaaaaggtggtattgctgcatatgtggatgaaacccctaatactaagatttttcttgctcaatattgctccaagtatacattgatagggccgatattcaagaccgctggctacggctttgtaagtatactcttatttaatgtagaaataaacatgtatttgatttttatttataaaaaaatttattttcttaaaaataaaaaattttgcccgcgaatatatgccatgactttaatatgaaa

SEQ ID NO: 266120 - DNA, 746 bp, Cannabis indica
cttcatcatgaatcacatcacatttgcattatatcctttcatcaaaataaattgatttctttgtcaaaaaaaaaaaaaaatattatacacttgacatcaagtccacaaataatattcttggtaaaaaaaaaaaaatccacaaataatataaaaaaaagtccccaaagataatttatattaaaaaagataataatcctactcttggagagaaatcaataataattaatataaatagaatcatattgaatattttgggatatatatatatatatatattttttgaagaaagaccatcaattttattacttgcaatcatttgtgattacatgaagcaattcagtagaaacatcattgcttgtaagagtacgatcaacaataaaataggatgctctcgcaaaggagtgagtaacactattagcagaccgtctaataaaattaacaaaaacatcacacatttgttctaataacaatttgcaatcaaaataacacttccaaaataggataacaatggaagattactacgaattgcttaaactactgagagcaatccgactccaccactgtccttgccaagccttcgcttgatataattaaaactcttcgctttcttattttgaaaaagatacaaaatataatatataaccatgtaagattgttatttaattttttttttaaacatttatattgattttttttttaattattaaaaaaaaatatttaagattaacatacattagagtttttaa

SEQ ID NO: 266121 - DNA, 727 bp, Cannabis indica
ctactggttgactggagggacgttgtgatggactcagaggagttcatgttggaagagatattctagtgcggaggcactattccataggtggatctgaataacgacagtggcacagagctttgatcaagtccaagagtgggcgtgcgagatcgtcaccaagagggtggttctacggaggtagagggacaagtgcagacttaggattcgggagaagcttggggtaagcttaggagtcaagatcaggaagatttgcctgcggtccgtcaatgagggcatcaacatgttgaagtgggggagaatgttacgtgcatgctaagatggcacgttacaagctaagtgatgcccagaagttggccaagtggtgctcaagtgtggcgcatgttgtggtgcatgttggtggcatgctgatgcttagtttgtatgcagtggtatttttgtaaatatcttcaatattgttcggaacgggacgggacttggtattcgccgtttatttgggtctacaaagagaatggtgcaatcggtttggcgaaactatgtgatttggtttacggtttcaccgtatgtctacaaagccaaaatcatgtatgttcctggtagaaggctaaaagctcagaatgctctttaagggggtactctagtgtcagctctccagcaccccttgcaccttggtgctaagtgagctactactagtcagtgggactagtagagcgggcatatgaggaccacg

SEQ ID NO: 266122 - DNA, 3164 bp, Cannabis indica
ttcttatatacaactgacatttgcaaaaacacggtttttcaattataaactataaaaaaactaaataaagaatttgatagtgttcctccacgtacaaagaaaaacactattcattttctaaacatattttaatattatatataatgttttatttttttttcaaaatactctaacaatatataaataatattttatttatattttaataatataacaataaaaatatattttttaaataatatagaaatataaaataaaaaaacgaatgtaatgtaaaagtttaaagtaaaatataaaaaattaaatttaaatattgtattttaaaaatagaataaaaactaatttaagtgctctaaagaattcatctccatctccacaaaaagacaaaataaaaaaagacttgtttttattttatttgtgaatttttttcttataaatttctttacaactttttttacaataattgatttttattctaccttttgtagtacttgacatgaataacagtatatcactatttatagtatttatacctcccttattatttttttatgaatgacaactttttctttttttttttctctacaaaaacttctgtaggttttttttaagatcttaatattttttcttatgaatgattttttatatataatttttgtgtaatattttttatttggtgaataattttttcttttgctaaaaaggtgagttatttttattattatcattaataaaatattattatttcaaaccttaagatgtcccatactatacagacacgacacttaataattatttagcagtgtttaccaagattttcgaaaactgagtaattagagcttaagaaaagtataaaaacaataaatattagataatttttacgtggtttgggcgttaataatctctagtctacgattttgttgtattagtcgtgtcggtgagtgtttgaatattataagtgtttacaatataaatactaactctgtattcttgttgtttctcttaaagaagaagaaagctagtaagaattttagcagaggttctataaatatgaaattagtcacactttacacaggaaaaatcgtcgtatttataggcacacaggtgggtaaaggcataccctttagccacctagaacttcttactcaacacgccataagggttgatactacaacaggatgatctgatagttggttggtaggtagctttcccatcgtgtggtgtacgactattataaggcattgtgtgggaatgtggacacgagttgctcaaagatttcacctttgaaagtggttgcctagacaagtcgttggacaaaagggggctacaaaggcacgcacgtgcactaccgtggtctggcgcatgggacaagatctgattcagtgtcaaaagatatgcaattgtcgcattgggctccagatggaatatagtcggattggttccaagaccggttggccacatcctttcgggattacacaaacctggtgtccttctagaatgcttatgacttcgggggactctgtcctttcttagcagtggatgaatggttggagttctagaatctttctcgtccttgttaacacggggatccttcgactatacttggaatataacttctttcttaaccttattaagcgaaaggtacacgctaattagaaatagtccaaggcagcactcttccgtgattgccacgaattaagcatctgggaatacggataacatttctcccctaagcttccaggactttctgagctttgggagcttacaacttctctcgggaactcgctgttgacatgcaccaattgttggggtcgcggatgcgtctttttggtgagctgtaatccgttaagggtagatagaatgctagaaactactagcattgcaatcatgcggtacactagacgccctggttaattcattacacgcgtgttggggcgcatctgtcagagaaagttaaaattgatagtggggtaattcgaaaagacctgtctttatggctcaatggacccgaggtaaaccatgactaataaattcttctagccctttcaactcccctatcgttggaccatgatagaagatctggaccgttgattttgaaaaaactgaatgtcttcttgaagtataaattgacactaacagcgttcttttcgttttttcacaccacacttcaaactttttcccagtaacttctctcttttgtcgctcttattgcacgcaagaagagtgcgaaaatctgattaagcaactgctcaacctccgcatggagctttttcctaacattgagcccttgcaaatcaaccaacttgacccagacgaaggattcgactttcaagccaattacgaccgcctcatcgactgggctccaaaatttcaaacgagactcttcgacatcaactcatcttctatccacccaataagtaagtacactaacccctggttgaacttttactatttcgtatctaggatagaaatttcgtgctcatgctagggctaggattgtttacatgttgagtagcaaagtagaatatgcgaaagaaatttcgtaattttaagaaaaaatctgtctgaggatcgaattgtcataaaagcgaataatgtcttctgggcatgtttcttttttattatctgagatttagtaagtgcccatatgtttgtagatcgtgggatttagtcgattagggtactagtttggaggtttttgttttatcaattagttgcttcaagaaactcacttttctttttcgtttttatgctagtagaaatggacttgaactaggatctccaagcaggcgttgtaggaatcactgagagtgtccatgtcgctcttgttgaggaagctccaacggaaggtatccaggctatggttctcgttgtaatgcctcagcaaggggcaactctagaaattgtcctagaggatgaacctactacagaggaaggaccctccaaaaaggacaatggaaaaaagagggccaagacacccccagccgcacaggcttacaatgactccatttgggagatggacgaaaaagctaactatatccaatctttcatctacgacagcatcattatcgcaacaacaataatagcaccaacaacaacaacaacaccatcaacaaattccaccaccacaacaacaacaacaaaaacttccaccacaacaactg

SEQ ID NO: 266123 - DNA, 1220 bp, Cannabis indica
aaatcacgtaatacgcctaaggtagttagggtgttacagaatagctacaaatcacctccacaatcttagacttagaaccatgaatctccttatttctttcagaccaaatacaccacataatacatataatcctcttcaaatcagcatctttgtttacagtagcaagataggagaaaatatcataccctttaaggttacctatgttgggcatcaaaccatggcactttgatatcttccaaacagttctagcacgagtacagcaaaaaagtgcatgtcccacagactcccaagcacataaacagagtgaacaagctaatgaagtcgagatcttacgatccatcaaattggcagctgtggggagagcatcattaataaaacgccatgcaaaaatcttgactttcttaggtaattttagagaccagaaacgattccaccattgacgattagatgaagaaggggaatcagcctccatagatttcaaacttgccgctaagtggtagcccgatttcactgtgtaatagcctgtgtctgagtggtgccagatgagcgtgtcctctctaggagtgggagcaagcggtatggaaagaatgcgttcaatatcaatattcccaaaatgatcttccagaatcctcaaatcccattgtctatcattggtaatgtaatgagccactgtgaaaaagggatcccctccatattggtaaggagtaaaagtagtgtttcccggaagccaaggatctgtagcacatctaacactttgcccattccctattttccatctcagaccttttaacataagtttttttccatcacagaggctctgccaagtgagagaaggcagcactcatttttttgccgaaagaaaattaccatctttaaagtatctagcttgaagaactcgagctaaaagagagggcggatcatcaaaaattctccaagcctacttagcgaggagagcttggttgaaatggaggaatgaacgaaaacccataccgccatctgctttagaagaacgtaaaaattttcacttcttccaatgaatttttgaatggtttgcattagaaccccaccaaaaatttgccatcatcgattctaattgattacaaaacttcttggggaggctgaaataactcattgcatatgtggaaatagattgaaccaccgcttttaaaagaacttcccgtcctccaatagaaaaaagcttggcatgccatgtattcatt

SEQ ID NO: 266124 - DNA, 590 bp, Cannabis indica
ctttcattcctcgtgttttcttcttttccttctttctcttctttttcttcttcttcttcttcttcatcttactttgataatttcaactaacttttctttaacaatggaagtctttcttttggtaatggtggctagtactttgttcaatatgccaacatagaaaaagggttctttccaaagttagaaagtccacatctattttcctccactttggcccactaaaatggaccacctttctacacaaaacatccagctggcatcacttaaagtcccatgccacctaggcactaattaaatgagaaaaccccaactttattttacttgccatgtcaacaaataattcttaggatgctacaacactctcttctttggtaatttgggaattatttcagctttttctttcactttgaacttctaaatgtccttcttcaaccttcccatgcatcacttggattctctttttacataaaaaaactagtacaaaataaccatttaaatttaaattaccatctaaaatactgtgacagccagtagtctcgtgattcgtaaggagaaataccgggtaagttgtacaatcccacactgcctgg

SEQ ID NO: 266125 - DNA, 450 bp, Cannabis indica
gaacccgtaggaacaagtaaagacctcattctccgttgttgagcatttctccattgattaaggactactcttgccaacagaataacctccgccgctgacatgatttgtcccgccaaaccacctcatttcgggcataccaaataatgctattatgaaaataaggggaaaaacaacgaaaaaacaacaatatgtattttttgaagaaaaaataaatctgtaaataacagcaatttcgtaaaattgtaaaatttttgctatttttatatatttatgaaataatccatgacctttcctttaacaacaagaatgggcttaattaaggcacaagaaacgacatgtcgtattttttagtcttgtatgactatataaatgataaaaacgacatgtcgtaattttagtcggtccgagtcactatataagcataaaaacgacatgtcgtatttttgagtc

SEQ ID NO: 266126 - DNA, 520 bp, Cannabis indica
aaaaaactatcttatgtacaaccacaacactagatgcaatagacactatatttgcaagctcagttctagaaaattggaataaaaaaccaaactcttagagcatgtttgatagtttttaaaaaagtgttttaaaaatgagaacaaaaaatagtttttgaagtttttgaaacacaagtcacgtttggttagtgttttttaaaaacatattgactaaaagtgaattggtttttaaaaaaaaaacattttgttgttttcaaaattcttattttttgtaactttgttgtctgaaaaactgttttcaaaaaaacaaggccaaacaagccaaattgttttcaaaaaataattttctgtttttaaaaacataaaataattttttagttatgatgccaaacatgcactaatttttcccaaatcttcttcttcctcctcttacttcacatgctcttttttttttttttttggttacctactacaaaataagagagagagttagcttttatttagctaatgttgtagactt

SEQ ID NO: 266127 - DNA, 558 bp, Cannabis indica
cttgcttgagagagaagagtttatcatatcatttaagttttttttgttgaatttcaagtgacttatgcaaagattatagctttaattttctctcttttaatcctcctttgtttggtaaacatatgaacttaacttccattactcatagcaatgtaatatccatcacctaaaactatttgcaataaataattgagagacactcaaccaggacaaaatgatgcaataacatataaatctctctaaaagaaatcaacaacttgtgacatatatagctgacttagaaactaggtagaaaattctcatctatatttatttttgtaggaacatggcaagtttgtccacaatgttactggtaaacttcaaaaaatagacaatccaaatgacgatatagaaagaatgaaaaacgtgaagaactaattactaccatgtttcattttttttaatttcctatcaaaagactactatgttttcttttcttgaaatcttaaagtatttcctttattcaaaatacttttatataaaacactatacgtgcaaacgcacataaatttaatctag

SEQ ID NO: 266128 - DNA, 911 bp, Cannabis indica
atttatttgtagggtgttgatattaaaatttgtgtatttataagtatatagccaaatcttaatgatgttaataatttttttatatgattatctgtaaaatattgttcaaaaattatataaatttaaccaaaaaatattaaaaaaaacatatataatttagtaattgtaaaaaaaaatatataaaaaagtaaagcacgaatttaagtttggatgtgaaattagattgatctgtttaagaaataaatgccaacacgagtaaaacacgacacgaaaatatcgggcctaccctttaaaaatattagtatgacacaacacgacccataattttttgtggcacggcatgacacaacacggtttttgaaaagcacggataaatatgtgtcgggtcagtacgacatgcacggacttacagtactaataacaaatgcataaatgaaaaaaaaaagataattacataagacaccattttttgtaaaaaaattacatttttacgtttaatgaattttttttttacatttttacagtttcccgtaaaaacaacacgaaaacaacaaaaaaactacataaaagtaacatgaaaataacatcaaaacaacaacaaaaaataacatacatatgacaaaaaatcaacaacaaattaacatgaatacaacataagaagaccgtatttttgtaaataaattaaaaaattcgtaaaaaatgtttaaaattccgtgaaactgtattttgttattttgtgtattatgaattatcctaaaaacactaaaatagtatacatattgaaaaaaaagctttaaaagtcacattaaacaactacaaacaacataatacatcaatctattgcaaatgcaaatcaattcataaattaactctatataactacaaaataatcaaaaaaaaaaaaaacgaat

SEQ ID NO: 266129 - DNA, 4004 bp, Cannabis indica
ttaaaaaataaaaaaaaatatgtctttataaatgattgaacttatgagattatagttgatgtaagagaaattacaacttacatcataattatattgttggttatatttgtattgattattttaaaattaaataacttgaatgttttgtacttttttagctataattattgtcgagtagaaaataaaataatatataaatttaaaattaaaaaataataaattaaaactaaaaaaaattataatataaataaataagaaaaaatatatgtttggagttagctttggagtattgttagttggatctaattattaatatttaaaattaattttaaataaaaaattattaattatgatgtaatttttaagagttaatttatgtcatttgattaaattgactataaattattatacctatcaataggtaaaaaatataataccttttatgttagcttccaaacgatatggtatttgaaaacttattacaataatatggcatagaaaaatgcatacaaatgtaaaaagaaaaaaaaaaaaaaatctaaaaccctaatacattaaaaaattatgccatgaaaaagttaaatcttaaatttttcccaatgtaatttctacaaattggtaaaagaagatttgttttggagaatggaaatgttcttctaatggttatttctgctgtgttagtaaatatgactttccttttgtagcattgattgtactgattttttctttcttaatttatttatatgtatatatattaaaactttgatgaccaaaacagtaaaagtagcataataattcagatcctaaagtgtaaaatactctaaaattatgtataggacccataaaagggcatgtaactattttgggaagcaagttatcaataatgaaataaatatatataaactattttgggaagcatcccttcaaaaattgagaaaacataacttaattaaataaatgtaaaaaaaaaagaaaatgcagattacagagaaggaattatagcctggacttacatataaattcatgtataaatatataatttctactcaccccactaccttacacacgatctataggttaagaactcaaatcaaattacatgtgaaataattatttatacctaccatttaattaaagatagaacaaaagaacatcccttgcatttgaaggtagttaaataatcaataatttatttatttattcattaaaaaaattaattatttatttgcttattaaaaaatacaataattgatgctagaataagtaatcgagatgcaaacaaaatttaaaattaattaaaaactgacaaaacaaaataataactatatatatataaaaaataataataatgatgtgttttataatttaattttaattaaaatttaccaagtaaaccaaagatataaaataaaagagagagacaactgtgttttcctgcagcctaagccttattatgactcattctttcattagggcacaccacaaaagtcaggtaattttcccgggaaaattaactgtagcacctttactagatttcccgggaaaattgacagcatctggttcggttcttctctcttttcatctaatctaaatcttcttcatcacatcacaatctcacatctctcattctctctctccctcgatctattttgctgttcctccatggaggaacctactactgtagcaccgcttagcaaccaatcgcctatcagaagccttaattcttcctcttcgcagattaatcttccttccaccatgactcggacctctcttgctctcgaaaccctaactccatctcgccaaatcgaccgtatgattaactcgaaccattcccaatcaccgtctcgaactatttattctgataggtttatacccagtagatctggttcgaactttgctctatttgatatctcaccgtcggctaattctccgtccgagggccgggaggaccaatctagcgcatatactactcttctgcggacagcgctttttgggccagattcaggaggagtagtggctcctgctacaccggagaagcggagcttgctgatgagcccgcctagccggaatatattccgatataagaccgagactcgccaatcaatgcattcgctctcaccgtttgggttcgatgatgcggttcctggagttaatcatagccctgttaagactcctaggaaggttcccaggtcaccatataaggtgaatgggtgaatatttgggcttttgtttttctgatttgatcagaagtgatgtgctttttagatatatttggggttttacggaatgtttttgtggtttgggtaggtactggatgcgcctgcattgcaggacgacttttatctgaatcttgtggattggtctccgaacaatgtgttggctgttggattgggtaactgtgtttacttatggaatgcctgcagtagcaaggtgggttctgttgttatattgctacaatatatgaaatttggtttggtcttcttttggtctgctttattcattattgcatttgttttacaggtaactaagttatgtgatttggggatggatgacagtgtctgctcagtgggctgggctcagcgtggaacgcatcttgctgtcggtactagcaagggaaaagtccaggtttgagatctttcttattcaacagatcgttatataattgttggaaattatcgatgtgggagtttcaacctgtcaacagagaagagttcgtgaatccaaccagcaacaagattatagaactagtatgtagaatgactatccagttagaacaatgataggaaactatgattttataaatttaagtttgaatagctgataatgaaaactatgtgaagagttgcattgggtttttctagaggatgaaacagtgaatcatactaacgataattcacatcttatcactgtgctcatccgaacaagaagaaattctaaaatcagtacttgattctaaattaggcttggcccagtcctgagttaatcttgatatgtttatgagcttatgcttctattagtttttcgacatttgtataattagattatttgatgtcttgtaaactttcccggatgcatttgtcatcttctatatagatttgggatgcatctcgctgtaggaaggttagaaatatggagggccatagattgcgggttggggccttggcctggagttcaactatgctgtcttctggtagccgagacaagagtattcttctccgagatatacgtgcgcaagaagattttgttagtaaactttctggacacaaatcagaggtcagactcctcatcttcagcttgattaaacttccatgtttaaccataaatctttatttttgcctttaacttgtctagtcttcatgttatattataaattgtatgtactatctttactgttgataacccagcttgatggcgaattatttgtctttcaggtttgtggattaaagtggtcatatgataaccgcgagttagcatcaggcggaaatgataatcgggtatgtgattctattcatttaaaaaaaatgtgtgcttttctttttctgtggatacagtaactttgttaattatatttaatttttggctcatatcttattgatcattgatgtacagctatttgtctggaatcaacattcaactcaaccagtgttgaaatactgtgagcatacagccgccgtgaaagctattgcatggtctccccatcttcatggccttctggcatcaggtggaggaactgcagacagatgtattcgattttggaacaccaccactaactcacacttgagttgcatggacaccggaagtcaggttacttattgactttggctatactcaagcctcttttgatttatttggaaacttgtatggactattaaagcaagttattgttgatagtcaatattggaagtaaaatttacttgatatgcattttgtgagtaccatggattcctttgttaagtagcccatggtggtccagtatctgacatctggtactctttttttttttt

SEQ ID NO: 266130 - DNA, 1529 bp, Cannabis indica
atgcctgttaatttttaatgaatcctttattcaaaaaaaaaatatgttaagttactttatttaacaattatttcatgttaattgatatttaggaaactgataaattagcattcaaaaaaaaaaaaaagaaaactgataaattataatcaaatataaaaattaaccaacaatatatataaaatgttagccttaagtttattatcaaattagtataataataattatttattattttaaatataatttatttgatgatatttaaggtactagtatatatatttttgtagattattttttagagatctattaaaataacaaaagctgaggaagaatacaatataataattttgttgaaatttaaaatttaattaatttttatttttgtcaatttttttttaattaaatagaaaagaaactaattattttggtgacgcaaaaaaatatatatccttcccgcatgtcaaaatgactatcttgaaaagaaggtcgtgatgatgcaatttttaatttcaaataattagcaatgtggtaggagaagtgtttttaatttttattttttttttcaaaaaaaagagggcaaattcttttatattataaacaaaaagacaaaagacaaaaaaaaaaatgagaaaaaatggttgtcaatgaattattcaagtgaaagtgccaaaaattaaaaggaagaaaaaaataaaataaaataaaaaaattaaaaagaaagtgaaatggtcgtcaaacgcaattaaatatgattgaataacttttaaaaataattcataaatatatcactaaattgtttgtttgtttgtttaaaaatttcatgtatacgtaaccagttattttaaaaatttatgtataagtaacgagttataacaatatcaattatttttgttagggtaaatattattttaagtctgtaaaagttaataattgaattatttattttgtttaataataaaataaactttgtatttttcaaaatagtataaataggatcctaaattgatttttttgtcaaaataaaatttaataataatccgatctaaatgtgttatgacaaaactatttacattttctgtatctgttcgtgttaggaattgttttcaagttggctatattaaaaaaaaagttttcgaaaataaagctcatggtcttatttttactattttagaatatacagagtctattttgtcatttaacaaaacaaaagatccaatctgtaacttttataaaacacaaagtctaaaatagtatttaccattttgttaaacaatttgaaaaagaaattcccataaatatatacatatttatatatatatatatctttatatattaaaagtgcctatctaacggcattttttggtttaacagaatatacttaaaaataaaaagaatattctgttaaatttaacgattaggtttgatatcccgttaacaaataaacccaataattaaacccaaaaattaaacaatcttttaaatattaataatcttttttaaattaaaaaatcaatcttagccacatatct

SEQ ID NO: 266131 - DNA, 616 bp, Cannabis indica
ttcatttagtttttggccacagttctccaccgttggcattagtttttcccaacggtttatttgctttagttctaaactgttgggaaaattttttgttgaccttttccaacgatttctataattgactctcttattaaccgttgggaaaagcctatttactagtagtgcatatgtgcacacacataccaccactacaaaaaaactgttacttttggtgacaaatttttagtgacaacataattttttttgtgactaaatgtgacttttagtcactacaaaatattacttgtgaataaaacatagtatttagctacaagtttctcactaatttagctttagtcacaacaagtattgtgatgactaaaaatatatttagtcacaacaaattgtaatttttgtgactaatacctttagccacggaccttttagtcacaacataggaatgatgatatataatagtcacaacttttttcactttttttagtcacaagttttattgtgactaaaaataagattttttgtagtgcacataaatgtaactactaacactacaagaaatatcacttttaccagcacagttcgctactgcgttagtgaaagtaacttttaccagcgc

SEQ ID NO: 266132 - DNA, 1196 bp, Cannabis indica
ttcttagccttcttcaaggcttgggctttaaagtccttgagctccttcagctccacaaccaagttagacctggactccaagtccgcctggtgcaattcctctaaggacctcaccttggcggccatctcgtctaaggcctccttggcctcccgaagctcctgtttggccttggcagtagcctcgccctctgcccttaacgcttcccaatgcttcacctccagcctatccctccgaaggacctcctctcggatcatcgcctccgcttgggcttccctttgcttagcctcttcttcgaacttggccttagcaagagcctcctgccgcgcagcctcctcttggaacgcccgcctttcagtagacaggtcctgtaggatcttcacgacttcgtctatgcccccaaattcggacaagacaaagtcatggttaattatggttttggaaaggcggctggcctctgcattaatctggaaaaggaagcaagagtgagtgaaggccttaaataaaataatgagaaaagaagtaaatcaacgaagtacttaccgcggccaaggcgtggctgagatcctgaacttggaagacggagttcaaggatgcacaagcagcgtaccgcttaggcgcgcaccgagtcagctgggagacgtactcaccggtcatctcagtggcaaaaggagccaaggtgggcccgaggaaacgtttgaaccagtccatcagggggtccaggtttaaatcccacagattctggtagctctcctcgttgagggaattttgcacctcctcttgcaaaaccctcctcaaggcctccacctcggcatgccccccagagtactcgtcaaaggcataattgtacttggctatccgaagctcttgcctcgcctcatctccggggaccggagtcagcacaatgtcgtgaggcactgtaaactcctccgcctcaggagggatcccagaatcatggctcagggccggagtgtccaccctccgcgaccgtttggaggactcctctgctacaatctagcctttgcgcttgtgcacgagagcaacctcttgctcttcttcactttcttcaacttccccaggaagagcccattgctcttcttgaccttctttagcttcctcaagaagtacctcctcctcatccactaagtcaatagtgtttggaggggcactggaagaagcatttgttgggttttatgccc

SEQ ID NO: 266133 - DNA, 864 bp, Cannabis indica
ctgattttacttcgagcaacaccttatctttagctttctggtcgggatagctaaatcgatctcgatctcttccaattcttctacaggtccaacattgctccttaggtccccaagtcaaggatccacatcttcatcgctgccttgggaagttccctactagggaatgttttttcccttgtctgtgctctgactagaggatacttcgttcttagccttgtccacttcaaggttataacattcccgtgcagactgctggtttcctttcagacaccctaccccattctttgttcggaacttcatgcacgagtgaaatattgatctaacagcctttaagtcatacaaggtcggccggccaagcattacgttaaaagctgaaggtacatccaatagtaggaattgtgccataatagtcatgctcgtcggagcttgtccagcaatgaggggtagccgaatttgtcctagaggtgcaactccttgaccagagaaagcatagacaggctggaggcatgcggttagatcgttgagttggagtcccatttttttgtaagaagttttgaaaagaaatgttggaagaagctccattgtcgatcatggttctagccaccattttattggctatctggacttccacgaccagcgggttgttgtgtggaaatctaatcttgagagcgtcttcatcgttgaaggatatggttggctctcctgctcgtagaacttcaggcttcctttcttccacgaccaggataacttcttcttgttcgtgttgcactgttcaggcatacctctcccgagctctgcctgaatctccagcaatgtgagggcctccaacaatgacttacagatgtccatctacttgtggaggta

SEQ ID NO: 266134 - DNA, 1227 bp, Cannabis indica
gaatgatgcgattcaacttgcattttgaatctatttaagccctctatcaagtcacgtctcacactagtcaaaattttgaagctatcatcgccaaaattcacctccaagggaattacaaaaataagctccgagtaactcgcagcgggacccactagacataaaaaaaacaacaatcattactagaagttaattttcaccgttggatcatcatcaacgttggaaaacactttatttatattttataggggtttttatacgattttttgttgcgtatttaagttgcaacgctagttgcaataggagtttttatgtagaattccgtaaaaatatataaaaaaaaaaaaacctcttttgaagtgtaaaaataaaaaagtctcaatatattttaatattatatatatgattattttattttttttaaaagtagtttaataatatataaataatattatatttatattttaataatatagtagtaaatatattaaaaggtatattatttaaataatatggtgataaaaaataaaaatattaatgtatagtgtaatgtaaaataaagtaaaaagaaaaggttgaattttgatgttgtaatttaataagaaagtataaacttaggcagtaacttatagcttatagtaagagagagaggtatggaagagggcacagctttacagctaaagaaagagaagggcagagtaggcatataaatatggtatatttataatgtgatatcacgggaaatagtatttgacatagaaaagtaggcagctttttcatgttacagtatctgatgcagcgtaattggtagggtaggattactcttaacaacaattgtgggactccttggagaaagaaggcagccatgtgaaattgtgccttctcatatcaaaatattgaagtggacaggaccactcatcaaatctatctgtaatctaataaatgtatatttatttacatgtatccccattcccaaatctttacccaacttttaagtgggaggaacttgtaaaagaaggttcattttctaataaaattataagtaagtaccccttaagaattaatgaaggagattaaaagtttttataagagataactaagacaaattttaaaaggttagtattttttatcggagaaatgctaaagggcaccattggtgcctagcaccctcctacgtgccaatatcgctattggtgcaattaagtatcgggtctcatatagtttaatata

SEQ ID NO: 266135 - DNA, 1285 bp, Cannabis indica
gtcattattattctgctaccatcaatgtaaagatttcttaatctcttatgtgtttatttattattttagtaaattcatatttcgaatgttatattgaagaattataatcaacatacatgttagtaaatgtagatcctggaaaaaaaaattccaatagagagcagctgtcagcacgaacccccacagtgtatgaattgaagctgtcataatgatggctgatgtggatgcgtgactgatgggtaaccatcaatcatgcatgaaacatttttcaatatctatcacgtgggactcacatccgtgtttccattcggacaaataccaaaagtcctcatccaaacagatgtttgcacaggcacctggggtgcaaatgttaccccgattttgttccacctgacgtggcaattacatgtagtttcatttagctgacacttggcataacgtgggacatctgggaaagagcatactagacagttttcacataaggctggtatcaacattttattgtatattacgttccaggaagcatctggccgggttaccgatttgacggttaggaagaaagaagatcaacatgccttacaagattgaatcccgtcaaaaagacaagtgtcaaggagagcctagtgtggctgtcaataggccagccaggatcgcagaaagatcagataggacttagcaggccttgatgtcttcttcaacaaactctgggaatatctccaacaacattctacaaagacaaattaaactcttcagtctgaaaggacaggagtttcagatagattataactcccctaaaaaagagtgattattatgtatatgtcatatttcaaatgtttaaatgtgctttcctacttcctataaatagtgaaaatattcaaaaggaaggggacctaaattattatctcgattgtaagagtacttttgtgaatgatattctctgtaagcgtctcgagagctatagctagaattcattttatattccttagtgatctacacaaaattttataaatatcaatacagctaaaaaaggagtaggtcattaccaatatctacggggccgaacctctataatttctagtgttctttttattttcttattactatttctaacttttcattgatgattaattagcatttattagactccaagtcagttggtaaatttttcagctaacaataatataaaattattgcattcacttgagggaatggcgttaaacacgttgaacatgattataactttcttagaaacatgttaattgtttaataaaaatataaaaaatta

SEQ ID NO: 266136 - DNA, 648 bp, Cannabis indica
gattatatgtttcaaagtttatttcccatgatttgttagtatcgttgattatcatgtcagggcatccgattatagtatcgttgaaacatataatcatgattatatttcactgtgttaacaatactataatcatgaatgactatatattctaaatttaatagaatttatacattaaatatataaacatgaaaaaaatcatgatttgacaatgccctgacatgataatcaacgataaagtatacttacaccttggataagtgttatatcatttccagggcattggcaaagtatgctagaatcggatgtatggagtatacatcggactggaccgatattgacattggataagatatcacaaacttaccgttatatctatctaagacaatatcaattagttgatcttaggtccatagaccttagtcctgatatggttaaattctttttaaatgtattatctgtgttcttggagttgttcgttaaagctgaccaatggatcaacccaatacttacatcttgagaacatgggagttcaattgagtgggagcgctaatcataaatatggaatctatagcttctataaatcatagaagtgaaatgataatttcttcgagcttggcttaatagagataaatgattgatgtctcattt

SEQ ID NO: 266137 - DNA, 773 bp, Cannabis indica
tttactgaaatatcatttataggagtttagttgtaattctaaatacatcccaattttccaaaagtatttcaaattaattaatatcatcgtaattgaaatcaaatagtgtttcctttaaataaaaaaattgtaattaagatttattcttataatcttagactaatcgaacttaaattaattaaatcttatattttatatttatttttaatatttaaaagtaaattttttgctaacatataaattattgaataaaaactcattataatactattttattaataattcttctttatatatttaaaagttggtttaactaatcttaacgtagcactatatatatatatatatatatactaggtaggagttacgtgccgaggcacgtaaatattagtttaggtcaagtttaagtttttttattttttcttatttagattgtacgtgaaagtatgatcatacgaatgattcgttttattaaagtaatatttgtgctattataattggttattcaaataaatttgggtatatataagtcatcactaaataatacttaatatttacttatagaaaatttggaggaacaagtcataagttttacagattttaaagcaaatattatgtaacataaattaaagtgaatgtgcgatcttaaaatagaagaaaaaagtatttaaaaaaagtcttaatatatgaaatattattagaaaaactaaaaagagtatagtgaaacttctacctaatcttccattggttcagctgagtacattattttcaac

SEQ ID NO: 266138 - DNA, 528 bp, Cannabis indica
ctttgcactgcggaccgcttcgttataatatttggcattgaataaatcccgaaattcctcctaggtcattctggcgacatccctggtgagggacaccatctcccaccaaatcagggcatcctcttgaaattgaaacgtagcacatgccaccctatcattcccgatcacacctataaagtttaatattctttcaataacagttaaccactgttcaactttaagaacatcaggacctccaaggaacaccgggggtgcctgcttcctgaatctctcatataaaggttccatacggttaccagcaacatgttgctcagctggcaccgcaggggctgcaggaaccatagcaggcagttgcgggggcaactcaacaagagcatcccgatgcctaagtcgccggatctcttcttcttgttgttcaattctagcttgcatttcagcaaatctttgctcccagtcaactggagcctgaggtggattatcctggccacctctcggggcacgaccgcggcctctactgcgtccacgggg

SEQ ID NO: 266139 - DNA, 768 bp, Cannabis indica
tttcctcatggtgactcatgcttatgaacagaatatttactttctgatagctgacttttcattaaaatatcaatttactacaaaaaaaaaaattattaataaataatccatagctttcgttgcaatctccaactttgattatgtcacttaagaaattttagcgcttgttttttctttagagacatgacaacttgtcacaactctcatcaatgtggtcctgagaacgacttttttttgttatattattttttttattttttagttttaaattattactacatattaacatttaccactaggtccagtaccgccattactatactagtagtgttttgctgtaaatattaaattcattctaataatggtgtcttcttaattgcagtctgtgccactttatctgtcggagatggctccatacaaatttaggggtgcattaaacattgggttccagctctccattactattggtatccttgtggctaatgttctaaactatttcttcgccaagatagaaggtggctggggatggaggctgagtctgggcggagctgttgtccctgccctcatcattacagtcggatctcttgtcctccctgacaccccaaattctatcatagagcgtggccagcacgaggaggccagaattaagctccaaagaattcgagggattgataatgttgatgaggaatttgctgaccttgtcgccgctagtgatgcctcaaaattagttgaacatccatggacgatgcttcttcagaggaagtatag

SEQ ID NO: 266140 - DNA, 93 bp, Cannabis indica
ttgtatcactttcaaataacataaaaaaaaaactagcataaaatttagtatacgtgcctcgcacgtagctttttactagtatatatatatatt

SEQ ID NO: 266141 - DNA, 517 bp, Cannabis indica
tacttgtgagtagatctaagatcttggtaaaataattccaacaggtagtgcttgtgggagcttttgggtgagtcggttgggggttgatagagaggttccttggaacttcagggaacatgggagcttgatactaggtatcttgataccctataactattctgtaaattatcagaaaaaaatctataatattaattatttgaagtcattttttgagtgtggttatacatttatgagtcaccaataatgtttttttttcttaatgaaaaacttcattaaaaaggctataaatcagtatagtaaaatttacaatagagctggagtactcatactactaaatatatttatttggctaaaatggacttcagcaggttaggtatatgcttaagatccactcaactcatgagtctataaacaaaaaatttatacagaaatacatatttttgattaataaaaagtgtccactcaacacaagtgtacacaatcgaaacaagtaatataatgataaataaagtatcgt

SEQ ID NO: 266142 - DNA, 477 bp, Cannabis indica
tagcatttagtttttgatattaagaatattaagttttaaaataaaataaaaataaatgtatgcatctgaacctttcacgtgtccatatttatgagtcaacgaaagtggtagcaacggtgtaagagaattgtaacattaggtatttttgcctccaaaataaacattaggtatttaagtgtataaatctgaaacattaggtatttatgccgcaatttacccaaaaattaaaatactaattattcttagggtaaattgcggcataaatacttaatgtttccgattttatacacttaaatacctaatatttattttttgtggcaaaaatacccaatgttacaattcttgacaccgttactattactttcgttaactcataaatatggccacgtgaagggttcaaatgtattacatttatttttattttattttaaaacttaatattcataatatcagaaactaaatgctacttgtttaaaa

SEQ ID NO: 266143 - DNA, 1139 bp, Cannabis indica
tattactaaaataactcgtaccaatttaaatatttgaaagtcataacctttagacttttgagtatgttgtataactgagttttagaaaatcaaacaagggaaccttaaaaatgatatataattatcaataaaacattatgtacaaaatcaaataactatgtattatcctaattttaaagggttaaaaaacagaggtactcattaatagaagaggtattaggaaaaaggcaaaataacagagaattaccatgagagattacattctgtattagcagcctataaaaaataaatagccactgaaatttgagaatggcactcaaatttgatgatttagctgaacaaaaaaagcaatttcagtgcaagatttcatcttgtaacaaatctaatactacatagaaaaaaacatagaaataagcttcaaaacttcagccatttcttctctttttccttgctcgtaactgcattcgatgcagatgcatgagctgcctgtgtgtctgctaatgttttccgagtctcattcaattttctcatagctgcctcataaaccgccttttcttttctgttcctgtttgccatttcttcaagcttctcgattttcattctcaactccttaacttcatcatcatatgcaaccaaagctctccgacgacctttttcccctctgcagcagaatctctattttgctgctttttcactgaaccattcaaagcttccccatgtttcgagagttggtgattgataagagtaaagacgtcgggaaccatttcctctttctcttttgcagctcgttttaatgctgcaaacttcttatctcgtttccttttaccacctctgcttcgcttctttactttctcgctcttttcttcttcacgagactcaacagcatgatcgagagattgtttagcaggaagagctctgacatttataggatccacgattccctggccagaaacacctaatcccattccttcccgataacccatattagccatcatcttagaagctatacctctagtgtggttctcccacttggcaaagatgacagtttctttctggatgccacttttcgaggtgctgctgtctaaaaaccctatgccccgtggactatcttcgtcgtagtcactagaatcagattcttc

SEQ ID NO: 266144 - DNA, 4995 bp, Cannabis indica
caaaagtgagaaaatggtaaccagtgacatttttattttctaacacctcctctcaaactaagcggggtggaaaccacacctagtttgtcaacaagaaaatggaacctgctgttggatagactttttgttaaacagtccgcagtttgatcatgggatggaatatatctgatgtcgagttcttcggcaagaactttatccctaacaaagtgtacatccagcttaatatgcttggtcctaccatgataaacaggatttgaggccaaggaacttgctcccatgttgtcacaccaaataattggagtatgattgagaggaaattttatttcctgcagcagagatcgaatccaggaaagttcagcagccacttgagcaagtgccctgtattctgattctgtacttgatcgagagatgacagcttgcttctttgatgaccacgacactagtgagtctccaaagtaaacacaataaccagctacagacttcctgtcatcaggacaagaagcccaatctgcatcagtatagcctgtaagagtcaatctgtcattgtatttgatgtgtaggctgtgatcttgagtgcccttttaagtacctgagaattttctttgctgcagaccaatgaacatctattggtgccttcaaaaactgactcagtttatttacagaaaaacttatatcaggcctggtgtgagtgaggtactgaagtgctccaattaagcttctgtactctgttggatttttcatgagagtaccatcttgaatggacaaagttttgcttactgtcatgatagtgggacaggattttaggtgtgtcatgttgcatttctttaagagatctattatgtatttttcctgagataaatacattccagtctcatctctgtgaacttcgattccaaggaaataatgtaaggtgccaagatcctttagagcaaacactctgtttagcttgcttgtaaactgtttgagtttttccaagttgttacatgtgacaattatgtcatcaacatagataagcacaaacacaatattagtggtgattctgtagaaaaataatgaggactcagccttagagttacagaatttccaatcaaccaaagtgtgtttcaatctgtcgaaccatgctcttggagcttgtctcagtccatacaaggattttaacagcttacaaacataaccaggatgttccttatcttcaaatccaacaggttgttccatataaacatcctcagtcaagcatccatttagaaatgcattatttatatcaagttgcctcacttcccatgaccttgacacagctatggttagaacgattctaatagtgcaagccttcacaacaggactgaatgtttctccatcatctataccaggtctttgactaaagtctttggcaacaagcctagctttaagtctttcaacagacccatcaaaattgagcttgattctatacacccacttgtttctcacaatgttcatggttggcaattttggaaccaacacccacgtattatttttctttaaggcatacacctcttctcccacagctttgttccaaccagcatgagctaaagcttctgctaatgaactgggcagttccagtttattcataatggcagtttttcctatgtaagtcttaggcttaaaaatgccagacttagctcttgtcatcataggatgagttggagctaagggagcaacagtgggggcaacagattgttcactgatctggttttcatcttgctgatcattactttcatgttcctgttcaattatgttatcaccagtattttctccaggaatgttagtatgttcaaaaacataactgctgtcatgatcatcatgtattccctgatcaaagtgactgttgtgtgaaggtgcttcattgctatcaagagttggagtactatcagtttgaagaggatagttgtgtttggtttgaggttgtggagattgtactgggacatttacagaggcagaccaggaaggaaaatgaacttgaataggtttttctttatgaaaattgttaagaaaaccatgcttgaatggaaactcattttcattagaaataacattcctagaaatgtaaactcttcatgtactacttaagcatttgtgtcctttaaagttttcactataccctaggttcacacatttggtggagtggtactgaaatttgtgtgattggtagggtctcaaacaagggaagcaagctatgccaaaggttttgagatggttatagtcaggctttcttgaaaacagagtttctaagggtgagatgttgcctaaaactggtgtaggcaatctgtttataagataaacagcagtgaggaaagcatcacaccaatatttaagtggcatgctagcttgggcaagaagagtgagtcccatttcaacaatatgtttatgcttttgctcagctcttccattttgagctgaggtgtgaggacataaatgttggaaatcaatgccactttctatgacaagtttcgaaaagggttggtattcaccaccataatctgattttagctttttaatttttctgtcaaattggttttcaacaaggtttttgaactgtgtaaaggcttgaaaagcatcagattttgcctttaaagggtaaagccaagtgtacctactaaaatcatctatgaagtgaatataaaacttgaaattggtatttgacataataggtgcgggaccccaaatgtcagtatggaccaattcaaggggaaattgagctttttcatgatttaacttgaaaggtaaagcatctgacttgccatattggcatgcttcacaaaaatggaactcactgccttttaaattcttaacattcatttgatttaaaacaaggtttaaaacatgattggatgggtggcctagtttcctatgccacttatccttgattgaattaaacttagacacactctcagtcacaggctgagttacattttgacttaaaacagaagataaaagcagaaaaacatgtgggtttaggctgagcagaggagacagaagtggtgttttggtgggatgactcgacacatgtggaatcaaactgatagagtccttctttaagcttcccttgaagcactttcttctttgtttgattgtccttcacacaacaatcatcagatgagaattcgacagtaacattattatcaacagttagtttagaaatgctaacaagattttttgttatgctaggaacatgcaacatctcttttaaaacaagggaactaccatcatcagtaggcatgaaaccagaaccaatatgcttgatagataatttattaccatcaccaacaatgagagaatccttgccattgtacttatttttctgattcagatttgcagcttcagaagtaacatggttgctggcaccactgtctgcataccaagcatcatcttgaagcatttctggtgtggcaacaaatgctgcagcattctgtcctggtttgttgctgtcattagtgtttccaagtggtgttgttcccatgaatgactcagcatagcggttgtaacaataagctgctgaatgaccatatctcccacacacttggcaagtgggttttggtcctcctctaccacctctgcctctgccaccaaatctgccacgatttccattgttgttggttcctcctctgcctctgttgtttccttggccaaagtttccaccatttccaaaagcacccttgtttgcaaaattgcagtaggagaggcattgtttgagtgcttggtgtttctagaaaaagaactaagtttatccaacttgctatcaaaacttagcaacagatcttcaaggatctgccaagttgttctctctcgagcttcaatttgcagaactatgggcaaatattccatattcaaactagataagacattagaaatgagtaatggttcagggtaaggatcacctgccagggctaaaacatcagcccattgcttcttttgcttcaaatgcgcagtcatgttcatagatcctttcctgacagtttgtattttatttctgtactcatccattctagattttaaatgagcaccaaacagtgcttctagactactccacagatctgcagaagttagagatcccatcacctcagtagcaatgctctcagtcatagagccataaagccagcccattaacagctggtcattgacaatccactgttcgaattcagggtttatctcagatccaacaccctgctgttcttcaacattgagaacaggtaaaaactcttctggtcttgatctggctcccatcaagtagccatcaagccgatgtcctctagcaatggccataaccattgtcttccacaagagaaattgtcttatcaagcttgagagcaaatggctaattcaatgtgctcccaaagtgtggaacagagagagtggaggatgaggcaccatacacaattgaagtctggttagcaacattgctaccagcttgagctgaaccatttcctggggtttgttctccagtggccattagaacgaattggtgctctgataccaaggtaagaaaataggaaaatggtaattggaaaaatcagctcaataagctgctgtgcaaacttttcattatatagcctctagggcagcaatagtacattctagaataattacaccttactcccaaaaggttaatgtacagacaaaagaagagaatattctctctgacatttataaccgaaaagagagagaatttgtacagagtgcaatgattggaaaatcgtgcaaagaataactaatttacataaatgacataaaggaaatagcaaaagtgagaaaatggtaacaaatgacattttcattttctaacattatgaataaccaaccaatgaaggtacctaattctctacgaacaagacataaagtgatcatctaatcggcctgaccgactgaacaaagatgactcactctagatcaacgaaattgattttcttgttagcctataaatagttgttcatttcatagaaatgggtgttgggttttatgccc

SEQ ID NO: 266145 - DNA, 933 bp, Cannabis indica
ttttaatcctgcgaatttatcaaaaccttcgaatttttaacattaattccataataatgttatttgataacagtgatacaatgaattcaaaccaactaaataatttataaaacccttaagggtttttttttttttttttttttaaattctagattttttttaaaaaaaaagtgaattaggaaaatatagatatttaagtaaataagttaaaagttggaaaaaaaaataaaaaacttaaacaatggaaaaaataatatactttttccatatttagatttcaataatccaaattaaccctaacagctcacaattttgtctcttcttctacaattattttctcacttctcctctaatttccttttgtgcaattggcattctcctcaaatttttttggtgtgattatcattgtcctctgattttctttggtgttgttgttcagtcttctccttgatcttcatgttctttttctgtgatgaagcaaatcaataaatatttatttaatcaaattgaaaaatagagaaaggtacgtaatttattgattgatttattcgaccaattgtaattttacattctattattatttctactattgacactcatacatatattttgattatatccttgacttaattaacatgttatttggaaaaaatgacaaggtattttaattttaagcttttatttagctttttaaagtaatctggtaccttcacatgagtatgttgagttgtgattgcattttttttaataacaaccccttatattttgaaaaagttacttgatagtttaatttcgggcttttataatttgcttttaaaagtaacctggtacatcacttttgaatatggttgagtatattgagttgtgacaatattttctaatgaagaatcctaatattttgaaaagtcacctagtagttcaattttaggtttt

SEQ ID NO: 266146 - DNA, 1232 bp, Cannabis indica
agatgggtttttaaatttgtgggatttggtgaagaagaatttggagcggttggacttcaaaaaattaaaaatacaatcttttttacttcttcttctgctgtttctctctcttaactctctctcctctctttactttgctctcttctccatgtttttctctctcttcatttctttaccttagagaaggacatagttggaagtttatttttcaatgggatcctctgcgatgtgggtctacgttaagagttgtgatcctcctttgatcttcacccttggattcttctgaaaatgatcatcgaacggtcaggagattgtgatgtaggtaatagtgccttattaaattccttttgctgttaagaaacgattccatgaagtcagctctctttgccctatagaaagcgtgtcttgtggggttgtttttaatgttctttaatcttaaaatgttaaaaaataaatacaaaatttgaatgaagatattgagactttctattgtcaagagatataggtttttaattatttaatttgttttccttaagttatgtcactaattaagggttcttattaatcttattcctatccttactttgatttggtcacatcaaatttatgacctaacaaattatattaaggttgattagacaagttatataaaaatattttagtgttatctttcattggataataatgtccaaatttttaatgggagaaagaaaatgtccacaaaagtaacaacctttggctttgagtaaacttccttagacttcaaaaaattcggctaggcttttaaattttaatcttatattgtggtaaagttaagtaatacttgaacaagcaaaaataatttggttttattcaattcttttttattttttgtttcatcaaaatttggtttcaatacttaaaagcttgaattggctcttcttgtacaaactactagattgtgacttgtgagtggaataatgcaacagctccaccatgtaaacaaaaatgtacttctctttatctaattttccacctaacaacttattttcatgccttaaaatagtattggagaagttcataagtaaattattattattattattattattattattattttaattataaaaatataacttcctattttttttttctttttgtatgttatggatcattattataacttactagtatattgttacatgcgatgcacgtatgctatgttttatattaagtattatattatgagt

SEQ ID NO: 266147 - DNA, 878 bp, Cannabis indica
ggtagaaatttcagtaacctaaagagggaaaaacattctgagatatgatgaaagaaacataatacataccggttgttctgtatcacaaactgaacagacaacctggaaagaaagaaagaaatctccattaaagtcattcatattggcaaatttacaaacagtagtaatacaacaaacgaatgtgaaagagaaacagggagtccatagcttacttctttaacatcgttccgaaccagctcatgtcgatcaaaggggttctttaaaatgctctaaatagatcgaatatgaagaaattaacaaaaccccaaatcagaaaataagtggagaagctaaaacaaggttaaaacatgggatgtgaatcaaaaagaagaaaaacataccgtagcctcgttatgacaatgacgacatgggtagatctcgttacagcacggagctcgaatctgacatctccttctatagtgctggcatctaataaaataacaaaaccaagaataaaataacaagaacagagattcaaaaataaggaaaaaagaataaccataaaagattatggattaaaattacccgtaacccatcttcccaaaatcaagacgttcattggtcgtgccttccatgagtgtgggagagagagagagatttgcagagaaagcaaggctaatgaaagaagtttcctgatttgggaagaatgggccttagtcccaattattttgtctcaatcttcaaagaggaaaggggcttaaagccctcacaccaaagaggctataccttttatataacctcccattattgtattaaacaaattcataaacaaatatgcatatatataatataatatacataataatggagacccacttggggagagagagagagagaga

SEQ ID NO: 266148 - DNA, 729 bp, Cannabis indica
ttgtttgagttccctaaatctgtatcttcttggtatatgcataatgttttgatgtgcggtagttacatttcatggactgatatattcagcatttgcttccaaatgtatatattaactactgatcataaatctggttgacaagctggaaagttagttttcaggtattgcttaccatataaggatataatcataagtattttgttatggagatctattgtttatgttgtatgtgtatctaattttcaaatgtatatttatgtgttatctatatcatatttatttgctatttatatatgaatacacacatgcgtggacacatttatctggaaagaatatagatatatatttggttgatgagttttgattcaagttcatgttaatatgtatgtacttctatatatgatatgtatagtaaaggtatgtggttttagttgtatgcttgttgaaagtaaaaaaaaaggagaatatctcagagaaaatattgttcactttgttgtgttaaaactgttgcgactgtcactctgaggtgttactcccttttataatattagtttttttagtggttaatcttcttggttcttgtggattgcgatcatcaggtgtaggcttgtcttggctaatttttattcctcaaatcagaatttgagatcaaaatcaaatctattgaactgggtttgtgcttgtgcttattcattttttctttccgtaatactagataggactaagcag

SEQ ID NO: 266149 - DNA, 732 bp, Cannabis indica
agaatctggtgtgagattagtaccagatatctgttgttgttttgaggctacctgcgtgggagctatttttgaaggattagtaaggccagaatgcatttgttctggtagtgcaatttctggtgtgccaaaatcagtgggaattggactgatgtgtttggttgttgtgacagcagcattatgctggtatacaactgatcctagtggtgcagttggcagtagcacaccttgggaagcatggatttgttgttgtactgatctgacagtgggaatgacagtatcaggtagtagtcgattaattgcagaagtggatgttgttgaaagcaatggaaatattgtttcataaaagacaacatcccttgaaatgtaaatttgcttagtttcaatatcaagaagtgtataggctttcatgccttgaggatagccaatgaaaacaaaggctctacatcttggtgtgaacttatgtcttttagaaggaagggtggagccataggctaaacacccaaaacttctaagatggtcatagttggggtttgtaccatgcaagagttggtatgaggtcatgcctttaagcatttttgagggagttctattcatgagataagtggcggtttggactaggtatgaccaataaaccaagggtagattggattgaaatcctagtgcacgtgctatgtttagtatgtggggatgttttctttcaactctgagttctgttgtggtctttccacacag

SEQ ID NO: 266150 - DNA, 618 bp, Cannabis indica
ctctcatataatgaacattaatataattgtaacaactatatttcataccatttgaatcatatcatcaaatttttaacaacccttttattacactaataaagtgtgatcaatacatgagttacaagtgataacaaattgtaactcctctccaagttacaacatttaggttataaaagtgtaggttaaattcaaaggttacacatttattaccatacacttaatatatattattcacataataatatatttatcacattttaatttatacttattatattataaaataatatataaattaaaggataatttgtaaaagtatattattttacaacaaaggtcaaagtgttacttttgattaagttataaatattacatatctgtgactagggttatacataaatttttgtaaaccgcccaacccgaataatctacccaaaccaaaccgagataattcgacaaaaaatacaaacaaaaaaacctgaacgaaattataatctacccaagttttatattgggcaggttgaaaataataccaactcgcccaatcaacccgaactaacccgaccaacccgattaagagggtttatatatatatttatatgactattgaaaaaatat

SEQ ID NO: 266151 - DNA, 419 bp, Cannabis indica
tcccatttctgagtttgagttcaggatcgagactggggtggggttctaggtcctgacctttattctttgtccctattctagttccatgtttgggtctgaggtcaagttccggtttgggtcccgagtccagtttctggttggtatccgggtccggctcccaattcgggtgtaggtctgatttggagtctgggtccggctcccaattccggttacggttctagatgtaggtccaatttcagttatcattcccagtttctggttgggactagggtccggctcccaattctggttacggttctagatctaggtccaatttcagttatcattccaagtccaagtcttagttcccgtcccaatcaacttccagttttggttccaattttttgtcacagggtacgggttcgggtccacttttgggt

SEQ ID NO: 266152 - DNA, 4287 bp, Cannabis indica
ttgatatactacatattttttctcccatcttttaacactacacaatttctagatttcaaaaaaaatcagctgttaaaatttatcatattattagaatgacactacaaacttgcctaaatttccttaaggataacaaactttaaagatcgaattggaaattgaaccattaagtgggcacaaaagtagaattagaatatattacctggttcaagaagcacactagagcttccaacctctccatagcggtaggcaactgtggaatataatttccttcacctagctgaccagcagctacagattcggctagtgtttgctggagcttttccataccttgagaaagagcatcttctgcttgctgacatgattgtcttaggttataaacatctagaagctgattatccgtcaagggttcaagatggggctcaagaacctgttaattaagaaaaaaaacagttatgaaatgaaaacccaaaaaagtatagctaagaaagcataaagagaagtagattatttatcaatgaacgaattgatcaatgagacggcaccttaagaagttcagaagggcgaaagcctcctatccacaagaagaacctttctgctgatgtcttccacattccagacatgacataaaacacgtcagcttttgcagccattgatttcatgctaaaaaagtttgaaatagtggttcatgctacttctactagcatccgaagctctccatctcctatatgtgcatgtaaagctgtcctcaactcacaaactaatcgattttgttcttccacccaatgcgcatactccatctcaaaggctgttatgcctgtaaaccatgatgtttcccattttagaacatacaagaaaaacaaaaaacaaggtctgagaacatctaatagtaggcctagatctagatgctttcatgcccttactcaattcataaagaatttggaaatggctttatgaaatcattaatgtcaagccaacctctaactctactcctgataatgtcaacctcctaccaagatgatcaatcatctaagaattttgccaaagagacataaagaaatgaaagactatataggcaaaactacgatgttatgttaccccctattagcaaaaatacctatcacctcagaatctcaatgctaaagaaacaataacaaatgtaaactaaatatagaataaagtgaatccctttgtctattattttataaaaattgatgaagagagtctgataatgcaaaactaatctgacatcattacagtattacataataagttgaactaaaaaaaaattgcaactcattcacaccccctcatgactccggtttattatgtaatgctaaaatatgcactggatttttcttggaaggtaagaaaaaaataatggtggggagcataaacaaacctgcatctgtagctccagagtaacccaaacgattagcatctaatccaccactacctacataaaggccctgtagtcgaaaaaacatcatcactaattgaataattattacaatgaaaagattgtaaatattgaactgcagtgaaagatttttatttaaaatttttaatttcttttaattttttcaccttgaccgataatgtatcttataataggtttaagaagctagaaactagaccagctggtcatctacttacttgtttcctggctcgctcaagctcttgctccaattgaacaagtttcaaacgacttgtctctaactgctgaacataggcctacaaagaaaactgacatcagattagtcttcaaatagagtttttaagtaggccaaatgccttccaaagcacaccccttccttaccttcttacgtaaacgacttttacgagcagcttccctattctgtgcaagtcttctctgtacctgcaaaggaacaaagtctttattgttacaactagtgaaggaacactacgcattgagaaagaggcataattattctaaccttgtcagcaggtttagttccttctaagtaaaatttgtcagaatgtcccaggattccatttgaagtatcttctgactgaggaaattaaataaagatcacataggttaattcaacacttgatggataccaagaaagaagaaagtataattaaatttcatgcatttgtacctgagtgtttagttcatctccatccacaagaatagatggtggtgtatttagagtaccattagttttgaagttttctccccacatgcccatctggtggattggctcataagctcccatccttcttgaggaaacaaattgggaagtagagttcatgcttattcaactgaaaaacataaataaagcttgatgagacttcagtgtaaaatataactcaaaaaggaaataatgaaaaccccactaaaattaaaaggtatagaaggtaaattcaaaagccaaagagcaccacatgtgcaatacctaacattatgggacttagccaaataagttactagttttgtaatattcttgatcacatcaatacatctttaatttgcaaaatttcaaataacagaatgtcattattatgacaaagaagaaacacgcccttgttttttgggtatgtcaaataatataaagaatgttgtacaatcaaaagtattaacaagaacaagtgaaagtcaggaactgcaacatagatgaaaacacaatatatagcacgagatgaatcagaaaagttcattcttcaatgaatgaacaggaaatattggaaagagccacaattttcccttttaaggtgaacactttgctttctttcaaaagaaaaaaaggtgaaaactttgctctgatataaacccagacaacagaagggtgtactttttattcatttaagaatatgagacgagaaaagaaaaggaaaaagttcaaattttccttaaccgtttttccccaacacctaccaagtttcattagcaaagaaagactacagaaaccatgaaacaacacccgaaaaacactcccagaaaacagagcaaggaaaaccaaataaaagaatacagaaatacacatgtacacatacatatatgtatctgcatacatgtatgtactatatatgtgtatgagtagagtatatataattatatttaaatacacgtacttgagtgtattccttaaactaacatgaactttctcattttgcttagagctaaaacaataatcgagaaaaccatgaagttgttctcgctattcttcgcttcaagctttctcaccaaccaaacacacacacacacacacaattaaaaatgaattgaaacaatataacataagctttctaagccaaatgatgaagctgatcttacttcttcttcttcttcttctcttcgttattaattcttccagctcaaattctcaggtctgcaactacagagtccgaatccaaatcagtacaagcttttgtagagaagagaacgaaaaccctaagtctcatcatcttgaagaagaatcaaatggaaaacacgacagcttaaaagagactccccaatctgttaatcctattttaatcgatccattaaaataatattataatccatacaatactattacaattattgttaattcccattatttcttatacctttttttatttaaaaaataaagttttcattcgtggattttattggtctccaaagtctacacatacatatcaaatcaaagcttgagagagagagagagtcaaagcttacaaataatactataaacaagtaaacaactaataagcccctctctcatcttcgtgtttgtcatctttccactactacccttaattctaatgtgcgcaccagatggacactgaatcctccttcgctatgctcacgcttaaccttcgcactcggctgacgtcatctcacagcggtgggtatccaaaatatttgggcttcccaggaatttaccggagaaaatgagtggcagaggcttgggaagattgaagagagtttaagatgcacgcgccagaagatcgcgtgggagatgagaggaatggcgttggtaatcgcgggaatggggtgttgtgtgatttaatagaaagttgcattaataataaaaaaaaaaatcgcgcgaatggattggggaacagaagcgaagagcgtgtaatttacgctcttgggttggcgtgtggggtcgaagctccacaaatttttgagtgggaatagtaacggctattagttagattcacaattccacattccatatcgtccacttgaggacccaaatgagaatttagaatcttgagggaccttacatgaaataaagttctatgttttatacgtatcatcaatattcaatcttc

SEQ ID NO: 266153 - DNA, 1859 bp, Cannabis indica
attttacgtatttttttaaatttatttaataaaaaattacagtttttttatatattatttttaataaaaataccgtaaatatatatatgtgaaaatttaaatttaaaaaaatatattttttataattattcttattttcgattcaattgaaataatacgaggaaaaaaaaaatttgtaaaggaatctatagccgttgatctaactagctgtgactactcttgaaaagaatcgagaccgtcaaatcagtggcttgtgctgtttatccctttttaagctaaaaaaaacctcagaccgaaacgaacacacacgcacaaaccccaatggtggcccacacgtgcaaagatcctcttttattaagcttacgtggaagtaaaattcgcctgcgtactactcacgcgggccatacgttcggtgtttccatatgccacgtaggattgacccttcaaactatgggtcccacgtggcttttattgattgacggtaaagattcgtgtccttttttcatttgataatttctcttaaaaactgagccaaaaactcttcgttctatattctctctcatttgacttgaattaaataagattggacgaggtttaattccaaagcaaatcagaatttgttttaattattttaattattttctttttctatatataaacaaaaataaattaactaatagaaacagagtgctttggtttcagtttcagtggcatggccatggagttagttctttcaagactcattcctgtcatttccccgaattaaaaaacctcatttaaatcttagttttttattggtacgatttgctatttattttcaattttgtctacgatgtttttgtcgtgtatctatatattatatatatatagatatgtgtatttgattggctttccagaaaacagaaaacggtgaaagaaagtatttttattggtatttgtgaaattttcttatctgggttttaatccattgctttgaatggaaaaggattgcccaacttaaaaattatgtaatttgttttaagggtttggccaaaaaaatgaggaaaattacatatacgttgaaatgtctttatcgtttaattacctcagaaaatcatgattttttttttgaagggtttctttcttgtgttgtaatttatctcacattaaaaaaaaaatggagtttttgattgtttttctcttccttctgatagttccagccttgtaaaagtgtaagaaaatttgagaagaagggaaaatggcggtgacaggttcgaattctgaacagccacagttcattgccagctctggaaatggaagcttttcatcaaatgccccattgattgagaactctgatgctcagattgttgttccagatgtaagtctttttcttttttctttttgctttgtataaatgtattttaatcattaattggtttgtttttttataaataaatacaaaatattgattaagccctgaatctgtttgtaataagtctttacagagaatttagatgaactcactttctttctttcttctttatattcttttgtgataaaaagattgttttttttttcttcttttgatcaatggggaaaagtgttttgttaatctatggatgagtataaatattgtctaatttatttacttggtaaaaggtggctattcttatgtcttttaccaaactcacctgctcagtgaaattagatcaagttgaaaaagtcatctttgagaatgagtgatgaaaagtattaaagaacaagctgaaaccttcatattgtgaatggtgacactccaaaatcaaggggcaagatggtaaattaaaataaaatatatatggagttgagttaggtagttcttctattttgactaaaggctt

SEQ ID NO: 266154 - DNA, 2607 bp, Cannabis indica
attacacagtgtaattacattcaattctcatgggggggccatgagaattggagagtgtaattggaatccctcaattactttcaattacacaattacagtgtaattacatggtcaaataaacatgctaaattgtataattacctctaattacacataaatccaattacattgtggctttctaaatgcaccctcagtggattttatatgattcatttttaagctgggaaacgataacagaactactgtttatactggtgcatattacattcatggctatgaaaagaaacgaaactgtgcaaatgcagataagaactataatatgatacattgtgtatcaattttaatttactgccaacaataataataatagtaacaaatcatcaaaaatgacaaaagagaagggggtgttgtaatttgtaatagggcagtaaatgaaacctcgttggtgcttatttgagcatacagtaaggcaaaaaaaggataactaacaaaatgtctacggtacaaacaaaatttaagcctcaagatctaatttgactagcaccgccgattaaattagacagcgattatgtatgaaaatctttgaaaaaattgatgatcctctgcttcctccacgcccatgagacggtacatgtatctctcaattatgatatctgcaatgaaatgcaagaatgtccttcgtcttcataggttaaataattcaagttacattgccgctgctggagccatcgtttaattcataaaagaagttttttgaggcttcataagtagaccagcatattgcagcagcaggagcatggaaaagaatcctaggacaccatccccttaacaaccctctataaccatcttttttcaatattgttttgacaacatctccaattgagccacttttgaatctatcgcatccgcatataccctgaacaacaaatgaacgtaaatgaacattaatatttcagacacgagattaagcttttacaagttgctaacaaggttaaaaagtcatataagaattctctaggagaatctccctactttagactatttaggatacatttaaatgttacaatgaacgttcattatttcttacgatttggttgatcatcattagctgaaaatgatccagcattctaagatatatttcttaaaagccagaatgacaataataaggcttcatcttctttcaataaatcttcaccctagcaataattctgtatatcatataaatgaaagcaacggttcaagaagatctacacaaacagagtcactcaataagttctatcatcaaatttaacacttgtaaagtgaacttttttgccccattactagctaaaggagaagcctcatgtttaaagtactctaatttaatcacataaataattactaacaatttgaactatatttatatttccaagctttttcgtcactgtagaattaagtttcaaatacttataagccagcggcatcagaattatatcacaagttagagtcttcaaaccaaacataaatatatttatagttggatatacctgacactgcaactgagttttgaccacatcgagaggtgtagtaacagcagaagccaaagccccggcaacagccccagcagtggcatgaacaaccaaacgctcgtcgctgacactctctggcgaaatttccatcaaacctttctttgcagcctcataagtcgcaaagtgcacggctgtaaatggcgcattcataagcaccgtagtcctgtacgaagcgtagaatgctctaaacccatcttccctcaacaccctcttcatacaatcccaaaccccttgtacggactgttactcaactgtaatctctgcttcaccatgtccattggggtaaaaactgcgtcgctagctacggtggcgaacacccctgaggttgcgtgtgcaagtgagttatttggattcccaccggagaagaactccttacaaatctcataaaccgaaaataaacggcgtgggctggcccggcaccgagacccattgccccaatgccgcggtaaaggccaattggaccctcggtcttcaagatggatttaagggcctgtctgactccgactgacttaatcgggcaggacccgagagcctgcatatgggtcttgaccgtgtcgactgggaacatagccatgtgctcgacagagccagcgatggagcctgcaatcatgaactgccagaagtgaagaccgtcatgggccctgaccacaatttccgggtgaaagtctggtggctgagggactgtccggaagtctgggttttggaacttgggcgaagcgtctgtagccatagacagatacggagaatgaaaatcctcctatttagggatttgacgaatatatgtgaaaatttggagttttcttattgggggtttatggttttggtgttagagagaaacaagttaggctttccaccatgaatgaaaagctaacaaaggggacgagaatttgtgtaccaacaaaggattaggaattgcagagttgaaaacaagaattgaagagttgaaggataaaaattggattttggttttgactagtcttttaggcttttagggttccacaaattagggatttacggctatatacagtattttattaat

SEQ ID NO: 266155 - DNA, 909 bp, Cannabis indica
aaaaaaccagtttccaatcttttacttagttagtttcctatagaataaaagggtgtgtgtaaaaaccaaagaatttcattggagaaagtttaagaaccatatatgggcaagcatgtctcattggttgaggtacaagaaaattaattcataagaaaagattggagatggtgatgtgacaagcctcttccccaagaaattcactatttcatgaaaaatccactcaacacattattattgttatattgaaatgaccccaaatagtgtagaaagttgttgatgttgttgttgttgtttcattacaatgttatgttagttacaatcataaagaccaaataaaaatcattaatcagtaaatggatcttgaattttgagtgtactacaatctcatattgtcagaataaacattaattgttctaagacaacttaatataaaaaccaaatatcatacaatagtttcacttgtcccacatgattcctttgtcccctctttctcccactaagatccactcatgatttggattgttggtccactaaagattttaggtttgttttgctgaaaaaaccaccactgcctctcttattccaatttcaaccaaaggtgtaaatttatcatcacttttcactcatgcacaaggaatataccataaacagaatagggagtgagaaaaaattaagaaaaataaggttaacacatgtagtactattattatccaatgcactctctcaatcatttcacatttgatggaaaccataaaatatatattattagtttctcaaaaccttgtacaacttggttcttgtttatatggtcacatggaaacaaagaaaataaaaatataataaataggattttcactacccaaactatgatttttattagattttgtcatttgattttttttttgtttt

SEQ ID NO: 266156 - DNA, 1090 bp, Cannabis indica
cattctttggttgcgcactctatggccgaggttatagaaattctccaagggctgttaatgtgttcaagattgggttatcaccatgtagaagttgagttggattttagtcttgtcatcttggctctctctaacaaaaccttgttattttttattatctttctttatgttctagaattagttatcagtttatctcaatgtaatatcgagctgccaattctattgtccataatttgactaaagtggctcttactatgtagaggcagagccaagagtgaatgttagtgggagaccaaattatattaaaatttaattaataaatatatttataaatatagataagaatattgctatgaaacaattataaacagttatagtatttagtactacgatgaagtattgtcctataattggttaacgactttttataaaatttattaaaataaaacaagtgagactcgatattgaattgtacttatagttatattatgccttacaaggattctaaacactatagataccctttaatatttttctataaataaaatagatatcaatataatcaatttatttactaaaatgatggttagtttggtttgaacaaaagaagttacctaataatttattggttaggtgtttacatattattttttaaaggaattttaaaaaaaaattagtttgtattttttcagaaaacaattctactgtatattattttatttttttctaagataattacttatattattacttggtataaatgaaaagtaatcaatcacacttaccaactaaaaaggaaattaatttttaaaaaaatgtaatgcatcaattattttacacataatatttattgaaaaattattttatatactatttttaattttttattttaaaaatttacggttttagttactctcgtagttttttcgtggtttttatatgggttaatatgtagattttgcttacgatttagattaatctagtaattactataagaatttttatgtaaatttacgtaaaaaaatatataaaaatattattttaaaatataaaaataaaaaagacaaggaggccactaagtactcgttgtaca

SEQ ID NO: 266157 - DNA, 1035 bp, Cannabis indica
aactaagaattctgttatatatatatatgctgatgttatgttccaattgctttttgtagtgattttctatttttctctgttattaagatccaataatttcttatctcttcaactaattttatttttttctcttaatttcttgttgaaatgggtcttttgtgaatgaacctgcatcaatttgaaattcagttgatatattacaccacggtcagagcaacgccgaagaagcaaaattaatgacaggtaattcgctgctcttttcactacgtgtgacagatgtatgccctgagtgaatcgtgggatgctccacttctctggtcttcatctgttaagatcgaattaatttaaggtctcctaataataagtgacagaagtttattatgtgttgaagaatttcttattatgtgtactcttttgtaatattaatacagcaagtttatcaaaatgtcttcaccattttgttacagatgaaggaagagtaacaaggttatttgctgtcatgactcataatcacttttaacataggttaccacctcatatcatgcattgcctaacactcaagatatagcaaataacagctaatttatgacatagtaaagacaaaccttttgccttgaattcatgaattaattaatgagtacattgccttgcagttaatgtgtgcatgtgccaaatgaaccaatggaagaaggagaggcagaggaagatcaagcttcattattactcaaataatgaagttatgagcaaagccattaaaaggagtgactgcagctcgtggagagtgaaattgcaatgacgagaggtaattttaaagaagaatatacagtgattatgatgtttgtttaattggggcatcaagaaattagagaccacttttgctatgatgtacttaatttgttgccgtgactaagtatttcaagaaatagcagatcaatcaattgttttcaagaaataactttgctggttagtggttattgctgctttgtttatttgaagtttaaatttataatgcgtttcagaggttaagagaactta

SEQ ID NO: 266158 - DNA, 1188 bp, Cannabis indica
gatgcaggaggggtaggagcaccgccaacaattggagtaccactaaactcaatcatacatccactgcaccctcagctcgtaatgccttatccaccatttcagcataagtggttttgtcgtcagtagtaatcattagatcgtgcatgatctttgcatttaacccatccaagtatttttctttcttattgaagtcagttggcacaattcccgaggccaacctcgccaaatggtcaaattgcgttgtatactcagtaacactcatattttctttctgagtcaaatgagtgaattcttttctcttaacacttctaactgcttcattgtaatacttagcattgaaaagttcctggaatttctcccaggtcattgttgtaacatcgtgaatcatggacaccatgtcccaccaaactaaagcgtcttcttgaaattggaaagtggcgcaaaccactctatcattgccagtgacacccataaagttcaagatcctggtgatcacagttagccattgctcagctttcataacatcgggacctcctagaaatactggaggtgcttacttacggaacctttcatataagggttccatccggttcattgcaacgactggttcggttggcacagcaggggcaggtgccattggtatttctggaacaggcactgcaggagaaccttgttatcttaactactgaatcacttcctcttattcattgattctagtttgcaattctgcaacctgtctcccaattctgggcatcccgagtagcttgggcaacctgtggtgggttagcatcaccccgaccacgtgccctgcccctgggacctctacctcagccacagacatttgggggaatctgagctccctgaccttcatttgatccaaccgaattaccctggctcctggtgttttgtgtgacgtccatactaatctgaacagcctgcgtaaccaagagctagtttggtcagatcgtgatcaaggaaaaacttactaatgccgcttatttggaaattaaaaacatgcacctataatatcaggctactaacatgcttttcttaaatcatactactaaataaactactaagcaataaaagcttactgaaccgtgaaacgagctatctactgatgatgattgtgttagaaatttattttaccaggatcttagatctactcacaagtatgttgtttaaaca

SEQ ID NO: 266159 - DNA, 4741 bp, Cannabis indica
aaaaacaaaatgtgagtgaaaaacaattcaaccaaaattatatcaagtactagtgaacaaattaagaaagagaaatataacttttcttatataacatgaatggaaatgttctttataacaaaaagataaataaactatcccatgcatgaaacatgtgctatatgtttttctaattgcttgatgtgctctcagctaattattttatattatatatatatatatatatttatataaatgaaaacaccaaagagaaatagtcatatgagaaacttgatcaaaaaagagaaaaatcataacagtgtacttcataaagtactactaagcaaagaaaaacgcacgaggagaattcaatcacgagagcagcatgtgaggtgagggattctaattaattataatatattagctaaaaatactatttttactattttcttttttaatatgacgatttatattatggttgacatatattataaatttttaaaaagtataaatacataatttacaaaaataaagtttaaaatagttttttttttttaaaaaaaaaatatgaatataaaaattacacagaatgaatgcttgtactcttttcggtgctttaaattattacaaaattaattaaatatgctatagttacaaaaaatattaaaagacattagtagtatttaatattacttaattattaataattaagtagcaagttttatataatttaatttagagaaattaacctttgaattggtgtatcattggtagaatttaatttcgagttttacataatttaatttaataattattatagaatatttttagcttattataagacaccacctcattatagtactaagatactaatacgatgctctttaatttaataagtattatgaaaaaaaagaaatattatacatcatgaaaattagtcatgaatgatatggtatgtcgtaaattaatttttttgttatataaatttattttgacgtttttaggttatttttttaatatagtgacacatcattcaagatgttagtacataacaatttgtaacgatatgtagcattgctctattatggaatatagctagtaatttacaacaggccaccttctggtagctagtactaggcactacttacgtacactgatatataactatagtctatatatacatcggctttaactataaatcaatttaagcaatcacctatagcctcacaaaatttaaggcctatattttaagggtaatatatattgtttttttacatacaatatggatgatatacattaaaaaatatataaaatatatttttttaaaaaaacaatcattcaataaatttaaacattaatattcactactaattattaacaaattacattcaattaattttaagtctaaaactttagaactattaactaatacttaatgactttaataagaaattttatatataaaacaaaaaaaaaaaaaaaaatagtacatagtgtatagtgtggttattattaataaaacaggtaaagaataatataaaattgactataaaaaataaaaattttaataaaaaaaatttaaaattaatttattttaaaaaaatgaaatttttaataaatcttgataagcttaataattttgacaaaacctaaagcctttacacaaataattcaatcaatcgtaatataagttatgctatttggtagggctgtagtgcttatcctactaaatttatatataaataaatataatataatattaattttatttaatattaccccagcaagtagcgtggctacagtaggtttaaaaacattccctcttaacgcgaaacagcatagagttattatccttgttattattattattattattataatttacaaccatatccttgttattattattattattatttataagttataacttgttattattattattattctttattataatttttgagagccatatatatgtagcggagccgatcgagtgaattatgagccgagctagtcagctagctaatgtatcgtgatcgaatgggtatggaaattggaaagggtcggaaagtgaatgtttatattgaataataagttttatttattgtaaattaagtcaaagtatccaatatgattggaaatggtggatcatttgatacgtgtggggccagtaacccgcacaatctgagccgttgatcaaaaacaagtgcaaccaattatatataatatatatatgatgcatgcagtttttcagttatgaatcttttgtccccaccaaaccgtatatattacctactcacttctactactactactatatactatctctctctttatatacggtatgaaacacattattatattttaatataaagttgttattgtatttttaataaataaataaaataaaaagttattgctctctttctctctctctgtctatacaccttttcgcaagtataaaaacacccctagctcttcatattccactacaaaaacattttgactctctcgatcattttatacatataacgaacctacatagagagagagtttaatatatatatataaacaaagatgaaattgaactccatcggagtggtaattgggccatgcaaaaccagttccacacatggatcatcttcctcctcatcctcatcgttccggtgctgcactctcagtactactcctcagccaaaggccaagagagtcagagtgctccccggattgagtatggaagaaaacaatcatcatcatcatcaccaccgcaatgaacagaacaatggcgccaaactcatcagaaagaaatggcaggagtaccaaggtgtcagaaactgggacggtttgctcgacccgcttgatgacaatttacgccgggaaatactccgttatggtggtttcgccgatgctgcttacaagtcctttgactttgacccttcttccccttcttatgccacatgcaaattccccaaacgacttttctcgaaaactccggccttcccggaaccgggtatcgggtcacccgaaacttgagagctacttctggcattaagcttccccgatggctggatcgggcgcccagttgggttgccacacggtccagctggattggttacgtggcagtttgtcaggacaaagaagagatcgctcggctcggacgtcgtgacgttgtgatctcttttcgtggaactgccacgtgtctcgaatggcttgagaatttacgtgccacgctgtcacatctcccgtgccaaaccagtgggtccgattgtgatgggcctgacgggtgtgggcccatggttgaaagcgggttcttgagtctgtacacatctggtacggatctcaacccgagtttgcagcaaatggtacggaacgaaattggccggctcctacaatcttacggtgacgagccgctgagcctcaccatcaccggccacagcctcggcgcagcgcttgccacgctggcagcttacgacattaaaacccacttcaatcgggctccactcgtcaccgtaatttccttcggtgggccccgcgtcggcaaccggagcttccggtgtcgtttggagaagcaaggaaccaaggtgttgagaatagtgaactctgatgatgtgatcactaaagttcccggtttcgttttcgaagattgccacgcgtcgagaccggatgaattccacgtggcaggcctgcctagctggattcggaggcaagttgaggatagcagtcccagttgggtgtacgccgaagtgggaagagagttaaggcttagtagcagggactccccgtatgtcaatgggtttaattttgccacttgtcacgatctcaaaacgtatcttcatttgatcgacggttttgtgagctccaagtgtcctttcagagctacagctagtaaaatgcttggcaaacatgcccgatcagagaatcttgccagagtttaatagcactccccagctatacctttttcagtccgaccttaaacgacagtattttgaactttcttttttcacctaaaaacggcgacgctttagtcaaattttgtatatacatgcttgcacactttcttttgtttcagttttattgacgcggggtgcgcaatgtacataacatattctttgtaaatgaaaagcctttactttttacgcccacgtgagtgaaatttttcaaaataagaactgaattgtgtgagtaaatggagtcctataaatactttattaaaagtgtatataatgtgtaaatttgaaacataggttaaagtcttagcggtatctaattttgtgcgcattcactcacagaaccacccagcacgcggttgtactgagcttgcgggtgtgatttatttttttttaaaaaaagattatttatttaattatttaaaatatgtttaattaattatttaaaaaatgtttaattaattagttataagatatactgagtgtagtattttgacaattttttatcctgcaataaaactattttatattaggacgatgaggcttatagtgcttgtaaaattttaggtaatgttgcaaacctcttaaaaaaaccatttaatccgcaactcaacttaaaattttaattcaataaatttcttttttattttctgtagtaattattttccaacactaactcttactaacatgcgccggtgtttaaaaatatgattagcgtaagcttgaaaaagttgatgtttgtttgtatcgttcagaagcacgggcagtggtgatggtggtttgaaatgacaaaaatatccttgaggtgg

SEQ ID NO: 266160 - DNA, 3105 bp, Cannabis indica
cttttctctgctcagtgttggcttaagctgatatagatgttctgtactagacacttgtaatttgtttattagcttcacaaacttcaaaaaggcagcagtgtagaaaaagtactaagatatacgtaatagtatctctctattttatatatgtgtctcacagccaccataacgctgcggctctggcattctagaaaaaattaaaagcctgcaatctggcactttgatagactagtgatgacatggcattcttcaaaacctctctctacccactaaattataacaaccaatctggatggttaaaacaatcaaagcaaagcttgtttagtgtattacttacctttaactacattcaaagataagttgacatgtattgcttaccttgtgggactgaatgattccatataagctgtcaggttcattgatatgagtgactgctgagacaagtatctcaatatgttgaggtagctgaaccaaaaagaccaaataatacagattagagaaatggtattaaaccagataatatctcaagctaaacatacatagatatacaaacataaaatacacacataaaggaagaaccatattccctgtatttatttttgtttacttctggtttggtggaattctttacttgtatttccccaattaattatacaagcagttttgtttttttagaaaagaagtgatgcaccagtttttaaacaacatattctcaacatcatctgaaactcaataagaaacgtatgacatgttatcttttagcaactaaccatttcaatgtcagaaaaatctggactgcccagtgttaggctcttgaaatgctcctcacaccattgttccacatacatcacagaagtaaagtacaagccacaaatctatacacatgttaattgaaattaacaaatgcaggtcaaaaggtcaccagaagtacaaaaaaagaaatattcaactagagtaggaaagcagcggaactcacaactgcggacttagcaacagcaagatagtcaatagaaagccaaaacacctgggaacataaacttgttagcaaatgagatagaaagcaacaaagtatcacaaaacaagcacaagactcaaaaactgaatgtgtttttagtagtttctgtacatagataattgttccgaattgtgaatatgcctaagtttcctgatgttgtattctttatttgtttgtgtctatagcccctgttcactaagaaccagagtatacctatattttctgaattaagacaactaaagttaacaaaaatacaaataagtggtcaaaaatacaaaagaaaaagaatctactaaaagtcttcaactccacataggaaaaaccaaggatgaaggatgtataaagtaacagaaactaatagccaggtcatgaacttgaaatattaatgcattaaacaaaacataaggccaaattatttctgtagccagttccagcgaaaaaaagcaaaagccaaccaaaataatgtgttgcatgcatacttgcatgaaaaattaccttatcccataaagaagtcgacaatgtcattgtagcctttccagaagtggaacgtgatttagagccatagctagaagtcttggcacattaagacagaaagatgtatgcattgtgagaagaacccttgaaaagaaaaaagaaaaacctctgtaaaacaatataatatggtaaaccttagtacttccttgcttggatggtagacaataagatctttcagtgacataacataatcgaagttcattcaaggcattcagcaagacttgaattgacttcattaatctattagactctgtaaaaatatgttcttgcacctgcatataaagcaaagataaaatattcaattcatttccatctaataatgtgcagatatgtagaagaatgcagcaagagactagtaaagtttcacccaaatatcagttgaacaatataggctgagaaaattaatgaatttctgttcctgctccagaagtagacaaggcaaatccaacttttgccaaagtctataaactagattattttattaataaaaccacatatacgcataacaaaaaagagattttatatagactgttgactgataacatttcttctttctgtgaaagattcgactcttcaatagttattttgtctcctagaaatcagaacttaagttgtttagagttatctgtttcctagcattaaatttaatacaaaggttacttcttttaaaaaacttacaattccttttgaaaaaaaattacaacaaccattcagcaatattatagctacatgaaatattaggagaacaagaaatatgctaatgaaaagaaatgaaaacaaaaacaaaaaacctgtaaggatatcaatcgttgaagattgatatctaagtctctcctcccggcgagatttacaaaaatacttggtaacagaagctctgcaacttcaacttttaaaaacacaatctcttggcataatctgaaagccggaaatacaatctaataaatttgttgtggtattcaaataaaaagctaaacaaattgtatgatcaaatgctttctaataaattataataataaatctagatagaccacacaaacttcagaagaacatataataccttagaattacatctgtacagtagccacaaagcaaatgggcaagcggacaaatccatgtctcaaaagttttaccatgtgtcgcccataaagttgaagttcccacagaaattgcttccgctgatgagaaatttaaggaatcactaattgtgtctcgaacaaacatataaaatgaaagacaaaataataacagcatagagagcagaaaagaatgacagataaaagcacagatacatgactttgatttttctctagcattaattttatttttctcatcaagtcattagaagttgactaataccagtaaaagcaaaagaaaataactttggttagaaagaagcaggagaatcttggaagtagtttaaaatgaattttattggcacagaattaatgtagtgaaagctaacactcaaaaattctttaaataggacttttatcctcatatattgcaaccttcacttcaatcatgacaattccaatcatcacattaagcaacagtac

SEQ ID NO: 266161 - DNA, 1069 bp, Cannabis indica
aagagatcgtcgatcctaggtaaagaatactcattcttgattgtcaatttattcaattcccggtagtgaatgcacatccgtaaagacccatctttcttcttaacaaacaatataggagctccccagggtgacacactaggccatggaaaccctatgtcaagcaacccctgaacttgaattttcagttctttaagttctgctggagccattctgtaaggggccttagaaaccgattctgctcctggttccaaatcaataagaaaataaatttccctttgcagtggtaaacctggaagtgcaataggaaaaacatttaagaattcttgaaccaccttgatgtcctctggccgaacagactcaggccgagtggtatgcaataccacggccagaaaccctagacatccatctcgtaacaattctctagctgttaatactaaaattactaggatccaagatccctgaaccgatccaacaaaaacaaacggttcttcgccttctagttggaaggttaccatcgtcctcttacaatcaatacaagctgagtacttggataagaaatccagtcccagtataatatcaaaatctgctaaatccatttctattaagtcagcactcaactccatatcctcaattttcatcggcaaagacctaatcaaccttttggagatgactaattctctaccaggcagtagcgttctaaaccctagttcataactatcgtgtggtctaccaaatttactaaaaattatggcttccacataagagtgagtggccccagagtcaaataacacagagaagtaagagttgttgaccgagagctgacttgttaccactgaggggctagcttctgcgtcagcttcgttaatgcgaacacccttgctggaatgggtttcactccaatcttctattcttcattcttaagttgggggcaatcccttttatagtgtcctggaataccgcattgaaagcaccgttgccctctacactctcctagatgatgctttttacaattggggcattctgggtaagtgtatcgggttttggagctaccctgacgattgcctcgacc

SEQ ID NO: 266162 - DNA, 652 bp, Cannabis indica
tcaatagtatttctaagcttgagaagctttttgaaataccaaatgcaattctgcttagcattgaagctctagaagtttcgtccctttaagtaaatggtattgaccaactttaccaaaggtaatccgatttagaggtgatagcccaaatatatttgcctataagagccatattacacttctttccctctttaaagtcaaggacgctaaaagttttgggaaggcaaacatgatcccagaaagttaagtgcaacttatttttatttcccttgacacttaagaaaattcttacaaaatttttcaatagttgcagtaatcttctgagaaagaataacaatttcatccaatacttacaaatacacaataacactgagtgaataagctgagcataaccagcaaaaaaaagatttttgctagcccaactatgaagcttcttcctctggattttatccaaaataccaccagagtcagaggctttctatttggtcggtctcaaattaacaccaaagtaccttaaaggaaagatacatttaaccatttgaatatccttcaaaatttacctcttaatgtcatctcgcacatcactgaaataaatttgagatttatttttattaattgaaagtcctaaaattacacaaaacttatcaaaagccaa

SEQ ID NO: 266163 - DNA, 832 bp, Cannabis indica
aataaaaagttacccatgaatttctcataaaccaagaaatttcagttatataggcacactttatatagaatagatatttttaattttatttatattatgtatattttaaaaatttaaagaaaatcacttattattttttattcttttttaataaaaaaaatattatttaaaattttgaaaaatcattaaatagtcacattatatataaacatatatatatgggtgattctacaatacaaccccttaaaatggatgtactgatgcacccttcttgtttcggcatctagaataaaaatttagtctataattttttttccatattcatgtacgctatagctatttaagatatcctacaaaattttgagaaatttggaataatttacaatatagaaaataatgttcaaacagtctattttacacgcgtataaaataaaatagtcacgcgtgcaacacactgcttgatcacaattttcggcgtgttaaactttttcgaatttcttaaaattttacaggatgtcttaaataactataatatacatgatcatgagaaaaaaattgactaaaaaatgatttcggatactaaaataaaaagagatgtattggtatatcctttttaaggaggtgcattatagaatttccttatatatataaattatgactatttaacggatattgtagttttaacgaatttttaatttttatttttctgttaaagttaagggataaaattaacactatgacatcattaattaattatttttttaaatatttgatttaaattctttactaagaaatatatattttacatatgtctaaatttaaatttaaatta

SEQ ID NO: 266164 - DNA, 969 bp, Cannabis indica
tccactcaggtcgccacatacttacttggacttaggtaagaaagtataagcaccatatatggtaatgttatgattgttacaatctcgattatgatcaagatctcggtatgtgtttattgtgacttaatcttaattgaggttaacgatatgtatttgttgtgactcgaagggaatcgaggtaatgatgagaaacaattattgttgtttgtaaattgtttatgattaagggaaaaacacggttatcactgttgttatgaatgaactaagatacggtcattaccgttatgagcaatcattcttgaaactggggataggtttcttacttattgtttgctttacgaggcaacgatattgacacacgcagctcgtggataacgagtggtaatgttagaaacggtcattaccgttatgagtaattactcgttgaaactacggttaggtttcttacttatcgtttgctttaccaggcaatgatagtaacatacgcagctcatggataacgagtggtgaggattggaaacggtcattaccgttatgagtaattattcctgaaaccgcagataggtttcttacttatcgtttgctgtatcgggcaacgatagtgacatatgtagctcgtggttaacgagtggtaagggtactttatgaagtaccaggattgtgtggttacaatgttgtgaaatggattaagcctgatataatgtgatgagctgtaattgaatacatttttattatatgtgactggatgaatgttatattgcttatgaaattagtcactttccatgcagagcttcagtgactcacgggatgtaagaatatgtgtttatagggatgtaagattagaatgctttatgaatccctaaaaatgtgtggttatgtattgattagatattcatttagtacaacgataaagttgttgactgtaaggtgttatgattgtttgaactgcctgcttatttgaaatgtgta

SEQ ID NO: 266165 - DNA, 506 bp, Cannabis indica
aaaaaaaaattaaacatatatatgtaaaaaaattgtcgaaaatagtagtttatataaatttctccaaaataatatatatatgggtgtattcttaatgggtattacccatgaatgagtaaaattaaaaaaatttaagtttttatgcttaatttttctatctattagaaaaatctatcatttttacatcgtatgggcttatattgttctatcagttgaaaaaataatataaaaaaaaaatttttagcaaaaaaaaaaagagataagtaaaagttgagtttaacttaaatattttaacattaacatatttttgatgtagtgtaaaagcgatatttttgatatttttttaattaagtagttaaactaagcataaaaatttaaatttctcttttattattggttatttgatcaaaatttgattgtttattatttttaaaattaatatttataattaaatttatttagtaatcatttatgggtaatacccattaaaaggtgttctatatata

SEQ ID NO: 266166 - DNA, 493 bp, Cannabis indica
cttaataagatgttatatttttattgtgttgatgaaattttattacattgtttattttatttttataatgttgtttgtttattagctgtgttgactttaaaaagatgttattttttttattgtgttcgtgaaattttattatgtagtttgtttatttagtgataatataacccgcttatactgtattatatagcttggtatggtttttacgattttggtacggtcgcagtttaaaaaattgtagaaacatacgtgtagtttagcaatttttttcttttaattttgatatatattaaatcatattcctgaatttttttctccattaaaaattcttttaaaactattaacattattagatttaaagatttctttatctaattttagtaaaaaagattctaaaaaatttaagggcataatttagtatatatcaaaatttgaggggcatgattttgtagatattaaagtttggggagcatggtttagtacataatca

SEQ ID NO: 266167 - DNA, 1517 bp, Cannabis indica
ccactcttgtgcaaagccattgataatagctgtccatgaaactacatttctcacaggcatttttagaaaaattctatgagcattgtctaactcattgcatttgctatacaaactgactagagaacttccaacatacacattttcaacaaacccaagttttatagctacacaatgatattgaacaccaacacaatgattgcgtttgaacgcacatgaactcaacacagatgacaatacggttgcatcaatccttaaactctcatggcaaggttgatgaaaaacagaagtagattcaagtaccttatcaaacacatcaattattttgtctgatgaacttgaactaggcaaaccaaaatcattgctcagatgttggggcctaatttgttctgaagttggattcaaaatgtccttgattaggcgaagatggccttcacgatgacatacaatactggttttggggctaatcatgtcgagcactctgagtgccttatctaaactttttctcctctcaaatttatgagtagaagtatgggaagagaacgacctcaagcatggagattttatttgcagcatgacataagaaagtttcttccaaaaacacaagtgaatagcagtgttacatgtaaaagccatgaattgaaagctatgcaacccattctgaattcctggatagacacattctgtccaatttgatagctgttttcaaataatcaacaaaccaatccgaaatacccttcttcacattgcgttgattgtccattgaaaaagcttaataagtagagctcatataagggtcctttcaaagctgcttacatctgggctttgagaaattgagactcttactcccaaattatcaaaacaagaattaatgttcaataaacagacagattctacagaattatacaaaaagtatataaaaaaaaaagaacagattaactgagacagtgtgattcttaaaactaataacctcgttaggtcaacatgattacactatcaataacccaaaaagaaaagccaatttttactaacaaaagatatatcccagaaaagaaaagcttaaatattttcgatttcgaagattaattgaaatgaagataagagtgaacctcaaaggcaagtgagtactctccctttcacgaagaaaattaaggcctttagagacgaaatttatccactgatgaatacgtttccggaatcggagatggactcagaattccggtgttggaaggagagaatggagtccaaatatttcaaaaattgggataaatactgctcctctgcactttttatgggggtatattcaaaaatacatcttttatttatcaattaactacatcattacaaaataaattatcgggaaaagaggatggaggcatggtaccaaacttctgatgggaaaatacccacttagccacattatggaccgcagaattacattgtctactaacatgttcaaagctacaactaataaaaaagggagagattcttttacaaaaagagacatagttctcaagctc

SEQ ID NO: 266168 - DNA, 1069 bp, Cannabis indica
aaaaatttaataaactattattttatataaaatgttaaattttgtggtgaaagtattggtggatgttggttgattcgagtcttgtccaccaatgaatatgcaccagcgtagcactgtagcaaaaccaatgagtcaccatcatggacacgtgttcccctcccaaccgtccacgtattgaacctaaaatagctcataaaatcccgccaattcgacctaaaaaggcaaaagaatcaaaaagagtacaaaagcctttttttcacttccatttttccttttttttctccaaaacgcaaggtggcacagaaacagagctccaaaaattacagagccatacatggtcgtcactgcctggtactaaaccctaccttaactctctctctatctgttttctgttgcttttgtttctagtttttttattttttttggattaagctttgagaatgaatggtttgaggaaatgtttttagtgacgatgcgattcagaatgttagcattgatcaatgtgtgtatatatatatgtatacagtggatgtattttggggatttgatttgagttgaatgaatgcatttcttcatgtctaaactagttttggttaccagttttatttgtgatttagtagcttgtttgtgctgatatttcttttcgataattgattttgataggcttttattcgtacaatatgttctaaattttaacttgctttgcattgggccggcttgtgaatgtgatactttttgaaatggattcttagttactatttagacagggctttttgatgtgtttaattggttgtacaatttttaaaatccttgttacaataatattcaaatttaatccacacaatctattataaataaatagaagaaagaaattaaatgtacaatttgtatattataatagaatatatcaacagcaaaaatttatattggatgtagacaatgcatgaagatttatataaatttatgatatgtttctttaattagtaagatgattagtttgatttgtttaattatgaaacagagagaatttgaaatattaaagttttataggacttaaaataacttctat

SEQ ID NO: 266169 - DNA, 929 bp, Cannabis indica
tttaagactgtgtaggtaataggtatgagcagtgacggagttagaaattcggttcagtgaggtcttaaatattttttttttcaagggcttgaataaaaattaaatgaaataaaaaagcatgttaaatagagttacataggtgcttagaaaaaaaaaagtgttgattgttttttttttttttttgaatttggtgttaaattttagtggtactacttttaaaattgggtaggaacaaattgagtgagggcttaatacacatttataataaacaaaaatttaaatgcatatatataacataaattttttttatatattataaaattgagtgagggcttaagcctacacaatgacttaagtgcctccgtccttgggtatgagattatacagttgaagaggacttaagtagattgattggtactacatatattaacaaggtgtatctcttgaggtaatttcaggataggtgaactcctcgaaagttttctcaaaagcgtgcgagtgaggaaaaagtatgctgaaaacagtcgtgttggtcttattcgttgataagagatcattctgtggatgtaaggggctcaatgggagacttgtaacaagaaaaataccaagtaagatatccaatctcacattgcttagagaatgttaagtgtgatgattctgagactgtgtaggtttgggactatacagctgaagagagcatcaattgattgattggtactgccaatatcaataaggtgcatcttgttttctggtagctcatcacggaaaaattccacaattaagcgtgcttgatttgggataattttaggatgggtgacctcctgtgaagtttttcaagaaacgtgcgagtacacaatggcggcttaaagatggaatattacaatttggtatatgtcaaagtttagaagtacgattcgatagatttcaaa

SEQ ID NO: 266170 - DNA, 612 bp, Cannabis indica
atgaaaaagaagtagagtgtaaacacgacatgataagagaaatccatctaatgttgaaactcattttctccataacagctgcaatgtatgaccattcaacacgatcgaaggctttactcaagttcaattttaaagctgcatatcccttagagcctctccttctgttctttagactataaatcatttcaaaagctaccaaaacattaaataatatttagaatacttgtcactaaaaattgatggagataaaagtataacagtttgaaaacattaggtatatgcaatataagtctaatattgtaaaaattttgggtattttaagcacaatttaacaaaatgctttaatttctttgagcacgttttaatattttacgggaaattttactaaccattcttaaaaaaacataccttaaattaaaatttagactctcgtaatttgtaccaaatgatacctataattttctaagatacctaaaatgccctttaattaaaatttcaatctctttctatctttctctcttccccgtgctctctctccaaactaacatcttcccacctaccttcgagaagcccaacggttaaatcacccccaccgaaggtctctctctctct

SEQ ID NO: 266171 - DNA, 973 bp, Cannabis indica
ttagacaactatgagtgtggttattttataaagtaacagatgcaacttgtcttattagacaagtacttgagtattattggatgtttatatacttgtgattacttgaactgatgagtatctgtgttaatttgaatttgtgaatttgcttatatgattaatatgcgattatttgattttgattatttgactataactaatgatacccgtgtactgattcgtgatgttgtattattactttttttgttaagtctttgtaactcacgggtgttatgtgatataggtaaggagtggaaaatatttggtcaaccatgagtcaagaattttctacaaaaatatacatatgaacttatttgacaagtggagctgagttatcgagattcatattttccaatgttagggactataatctgtattttgttaaaataatgtgatgtcattttttttgtaatattttataaagggaatccccattcttaaaagagattatgccatgacattttatatttcaaattagtttgtaataatttaatttaattcaccatttttacttaaattgatagtttattattataaactagtttataaatgcacacatttaatgtccatataagttaggacattacattatagtatcagagcagtcacgattttgaaggttttaaaaactgactgaataagtacatttgctcagaagataagctccagtcatggaatagtaagtattatttgcttattatgtgattaattgttatatgatattattagaagtatgtttagaaaaaaaaagcatgagttaattttgattagaattatattttttacatatttatattgaagtataattataaatagtgagcataaatataacacaaattcaattttttttattaaatttagtacaaattttacatattgtatttgagattgtctaaaaaattataataaaagaatataattagaactattttttttt

SEQ ID NO: 266172 - DNA, 1765 bp, Cannabis indica
tgagattacatctatgtagtcaacattagaaaaccaatatttgtgaaaataaatactttctagtcttgatgaccatagtgtagtccacccctaatcactttaaaatagccaacaaacatgcaaatttgagttagcagttctagattttcttgaagatatgattagggtatctctagatttaataatggtgtatactaagtacttacctaattctaaggttttaccaagatcggacttagatgggacgatatttaaaatatcatttgctatctcaaggcatatccttagaagaaatttagtcagttgctagtaactattccaatgcaaaataaaacaaaaattaatttttttaatcaattttttttttttatatattttaaatttctcattctcatttctattattttcattcctcccaaccaaaggtcatctaagagaaagctcaagttcttaaactctttctaattttttttaagtggacctaggtaattcttttgaaccgaatcatacataaatttttctgtaaaattgaagttcatcttaattaattcttttctcaatttgtttgtaaaaatctagtaaactaaattaagtgatatctataaaatggtaactgctctcagcttatctcaaatgttattggtttcaatttggatgcaaaaaaaatgaaaatgacagtgtaaccgaaacccttttcggttcatcgaacataagaataagaataggaatagtccctttagccttagccaatgtggagcatgatttgcataccattattcaagctactcagaaagttctattttgatctttccaacaatgtctccaaagtaagtttgtactcttttctttctctatttgatgtgtttattagtgtcttttaacactcaaaaatggataaacttctcattgaaattgggagagctagattatggtggttgtcaataatgacatcttatccaaaatttgaaccatttatcacttaacactctataccatattcatcaataggtgttaatctctgatttcttatatgtcattatcacacattacattacaagaccaataatgctatgaatcaatactcttactttggctttggctttagctttattacaagataaaaatgccatcacttttgaggctcttttgaaaggtaggtctcccgcaacaaagtgaacttggtaaggagcttggcataatctggccaattttctttaaccacagggatctcattcaaggccgccttccaagccgacaagcgcggcatggtgtgctcatcaatgaatttcaaacctgtaatctcttcaaaaacacttaccaagttggaaagccatcctaatgcaatatccaccattcccatttcttctccaccaaacaatttctttcctttgagctcttcatccaacaatttgagcttctctatcgacctcgaataggcttcctcttgctccttccctgctgcctttgtaaatgcatcccatactgctggcaaaacctgtgcacaattaaagtataattaaattcaatggaatgaatgatgagctcactacttgtgcactgcatataatgtttattgtagaaaatttgtgttgtaaatatttaaagtttaactctcatttgcagataaattaagtagtctaaattaattaggggcttcgccaaaaaatataattaaacttttttatatgaaaaaatttatatattttgtatatatataattatatataatagtgaaaatttaaaatatagtattttaaaaatataa

SEQ ID NO: 266173 - DNA, 521 bp, Cannabis indica
cctacacaacaccaaactctaattaaccctaattcttttcttcaatatacgacagcctcacttctctctctctcaagaaatttgggtggtggtagcatctcgggtgtggtcgacggaagaggaaagagtgaaatatgggatttagggtttagccgaaggggagagacgacataatttttgttgcaggccggaggggagagggatgagacgtaggtggtgagagaatttctgggcttggacgcttgggaatggttgaggtgcaactggtggctcggagtggttttcggagaaggagatggatgtttaagattgaaatggtgcggctgagagatcaagagggtgggtggtgagttttggtggttggttgacaatatgggagcaggttgggggtgaatcggttttatagtggaaatgaagaagatgaagaagacagacgaagaagaagaagacgaagaagagtaaagaagaaaataaaaaaaaaaagaaaaagaaaaaaaccatttttaaataatatatttatt

SEQ ID NO: 266174 - DNA, 503 bp, Cannabis indica
atatgaaagcttgcacaatagaacgttttcgtaaagttattaatttacaataaaaataataaaattaactcatctaattaatgtatacaaacattagtaatagacttttatattatcattattatttattatttgataagaattcacaagactattaattatagtaatagtaaactgataaaataaaaattaaatagtattatatattataattaaactttaagtggtggtatccttttctagttatatgttatggagtgttatttaattattttttcttaattatgaaatattatttttttttatttttaatccaaaaaatgtgctattaaaaaagagtgacaacaaccaaagcaaaagatataataattatttacaatatgatagatctattaaaaatcaactagccaaagtgaatcaaaaattattaaaattttatcatgtagaagactatgttttgggtggaatataaatctttatttttgaacaaatataaacttttg

SEQ ID NO: 266175 - DNA, 1092 bp, Cannabis indica
cccaaccatcagaataaatgggctgaataacacatgatttataatattttgggccgatattggagttggctgcacattataagatcattttccaacctcaaaatatatacagaattatcattatatactattttggaccccgtgttttgcaaaagttacagattggaccctgtattttgttaaatgacaaaatagaccctgtattttctaaaatagtaaaaataggaccccgagcttaatttttaacaacttttttttaatacaaccaacttgaagacaatgcttaatacgaacagatacaaaaaaatgtaaacagttttgtcataacacttttagattggattataattaaactttattttgacaaaaaaatcaattcagggtcttatttgtaatattttagaaaatacagggtccattttgtcatttaacaaaacacagggtccaattggtaacttttgtaaaatagagggtccaaaatggtatttaatttttaagataactttgtaaaaatatgactttttctctacaaagttatttacaagaaaattaataaaaagttaaaaaaaaaatggaaaaacagtaaaagtaggggtagtaatttagatcagataggataatacgatttaaaatccgcacgaaataaacgggttagggtttgtcttaaatgggtttgggttatttttgggtcgacgcaactaactcttttactaaacaggtcatttttcgagttgacacgcttaatccaaaaataatatgtaataatttatgtaagagtatacacttttaaatttattatatttatgacatgtaaattacattctttagttaaataagacataaacatattaaattgctcatgaatgtgtcataacaggattataatcatgttaagcttgttataaacatgttaataaattgataagttaatcaaaattaagtatgattccctatataaacgggtcaagtcaggtcaatccgtttgtaaataggttgggtttgagtttcagtttttcacacgatttataaatgggccaggtttggattaaatagtaaaattaagcacaaaaaactctaatttttcttttatta

SEQ ID NO: 266176 - DNA, 3203 bp, Cannabis indica
aggcctcaaccatataaccatctcattgttacaattggtatgtgcatattctaaatacctttatatttttcctaaattatttaagaacactactttgcttacagacgaaacgaatgaaattgattggtttctgaaggagtttcctgatgctcaaacttctcatccaagcattacgttttctaccaagcttcttgtacagcacatatatattaaatatgggatctagtatattaaaatagatcagtatcatgtattggatagattttagaaattcttaataggatctcgatctcaatcctagttgccttgaatgaaaatgtagataacaattttgcatcattcgatgttgtaaattccccacacataacagtacaacagtattttctttttctgccttattaaatcagacctggaatgtgtctaacatgttttctttagaaaatgtttcaatttgaaatgatcgaaatgtcatcattacagaaatcatggtgaaagcttttcatgtattttctgccacctatatgtctatccttcgtttgtgctacttcaaaaataaatatcaactaagactcagattacacagtttcaggccaataaatatttgaaacaaaaaagctttttacttataaataacgagatcaaatcaaccgtacaaaattgtttgaatcgttcaaaattcttcttaaaaattgaatgaatcaatgaatcatttttggggaatacaactaattagaaactaccataagagtcggggatataaattattgtataaattttctctcatcagatctatctataatacatagaaacggcacctgttttctcaacgatattttgttgcagcatgtccggtgtcactcaaatgcttgtgtaatttattcctgccataacaaaagcaaaagtaatcccataaaatgactcggacaatgatgaggaaatttgggagaataaaataaagaaaaggagacattataaagacttgaattttcttactttgattcaaactcttctccacatttttcacatgtgttgctagaatgctttattgcctgatctcaaggataataacacagatttatcagcaaagaacaatagggtcaatgccaaaacttacttttgaattgttcaaatattagtactaattaatctgttcaatcaacaacaaaacaaaatataaagaagggatgttattgaataccttagcttttcttcctttggatgagttctttgatttggtattagtatcatttccttttctatcatgacactgactcgcactcttcttattttctacaaaggaagaatcattatcatctcctttatcattaagtccattccccacaacagaatgagaagatgactcctctgcctgcacattctcctttccattactttccttaccctgaccatcgttgattacatccttctcaatatcttgaccattcttcttactcctctcctttcttgccccacgtttccttcttgtgctcttagtcttgttgtagtccataaactcaaactcatcgctatcgttttcaacattaactttggttgttgatgtctcattcaactcccgtctcaaaaaaccatttctcctattcttgcgtccacctaacattgcttcaagaaaacctatttcatcttctccatcttctttttcttcgacgttgccatcattgtcaccatcctcatctaagttgtcaatgccagttttctcctcaaactctgtggacttatcggcattatcaacaccataaaactcatcactcctatcacttacttgggtctcttcctctccaatccgaacatcatctttcaattgctcgactagttcatcaactccatcatccacctcatctttctccccaacttcaacttccaagctttcttcatcctcaatagaatccctaaactcagcaaccttttcgcgatgcttcttggattgctcgtgattcttccattgtttctcactcttaaacttcttcccacacatcatacaatacaattcctcagcctcagttttcttcttctcgtctacttcttcgaaaccctttagatccacttcctcctcatcttcgtcctcttcagcaattctagcccactctggctcctcataagccatagccctctctaacttctctctctccaatctcttcttcctctctttctcctcttccctcttcttctccatctccaaattccttttcctcgtcatatcaataactctcttatccctcttcttcacaaactccgccaagcccctcaccgtatcattatactcccgcttcgccttcttcctcagcttcttgttctcctcttccatcactctcctcgatttccgattcggacccgccatagcatcatattggtccacccagcaaaaatccatcaccgtcgaaaaccctagccaatacccataaaaagccgtcacctgagcgtacggggaatccaaattccccatggccggagcctcccgcactaaatctgaactcaaccctagcctagagatgaagctaatctcattggcgtacagcttattgaacacatcggagtaaaccttgtaaaaacccttccctttatcggtatagccggaataaacggtgttggagaaaaaggagaaaaggttggggattaccgagtcagggacggagttggccgagttgggatcagcaaaaagaatctgcgagcggtgagagtcgtaccaggcgcgctctttagagtcggagaggacctcataagcctgaaccagctcctggaacttagccgtggcttcggcttgggataagccggactggacgagcttgtccgggtggagctgcaaagccatcttcctgtaagccgaacggatttcgtcgggcgtgcattcctgctggagcccaagcacctcatagtggcaccgtcttcccgacgccgccattgtttttgggttcacacgctctgtgcctctgttgtgtgccgtatgaaaccgaattaaaggcgaaaaaaaagtagtttatggtatatttataggcttccagccaaaaaaggcaaaaaaaaaaaaataaattgcaatgaaagtacatagatgaaatattaacttataaaataaaaatagatttaagaaaatattataaaataaaaataaagaaaaatattataaaatttaagaaaatagataaatagattttggtgggtattttttcttaattatttaattaactagg

SEQ ID NO: 266177 - DNA, 669 bp, Cannabis indica
gtaatgggttttatttagggcacaaaacccaacaaggccttagcagactttgtagttgagtgcacaggcaaagaagaaaacatttgtttgaagtgcaagaatcccagtagagcaacaatgaagatagacctacctagaaattacatgtggacgggttagctacagatcaactgtctggtgcagggattgtccttgtcacacctggggggaaacacctgcacggggcagtcaaatttggatttaaagcttccaataatgaagcagagtatgaagctctcattgtggtttgaaactttctcgggagctacgtgccgaacacatcgaaatctgtagtgattcacagttggtagtaaatcatgtgtcaggagagtacgaggcccgggggagaaatgatagcctatttaagcaaaatacatgatctgctcgcaaaattctagagctacgctctcaagaaattttaagagaagaaaacacaactgctgatgccttagcttgacttgcgagtagcaacatagctagtaaggctaacttcgtcccactttaattccttgaagaacccaacatcacctgtgtagaagaaattgaaatgattgacacagctccgaactggatgacacgaataacagcctacttcaacactggagaacttccaaatgatagaaatgaagc

SEQ ID NO: 266178 - DNA, 2634 bp, Cannabis indica
tttgaggcaaaaaattggaacgtttgtgcctttcaagctattttattttgtgattatccctaatttactcattttgagccttaaactgattattttatttactcactttttgagctataaattgactcatttattatttttctttgtcctaactatacattaagtttcaaataagtttggaaaaaaaatgtaattgggtattgtgtgttgagaagctcaaaagcttattagaattaaagagaatactttaatgtgttgcaatctttatctccctaattttaatgtgtttcaagctaacatattttgtgattattcctactttacccattttgagccttaaatatattattttatttacatgcttttttagctacaaattgacacatttattattctcgtttgtcctaactataccatcagttttcaaataagtttgaaagaaattgtaattgttattgtgttttatgatgcttaaaagcgtaaaaagaattagagaaaatattttaatgtgttgaaatctttattttttttttttgttaaaaaaatgaatagtaaataattcatggtatggattgaaaagtacataattcttttttgtattgcagaataattttgaaatgaaaattgaggttcttgaaatgtaaaaaatttatggtatatttgagcctaaataacatcttcatctacctttacctaggcctaacatcataacctattaaagtccttttgattttaaagcatttgttgttgatattagtggagaaatttaaataatgcaagtatattaaaaattggtttttgaaattttttggtatgagttgagcattgatggtagagttcaaatattagagtcatttgtgagtcattttatctattttcctaattgaactttaaggttgaactttgaggcggttgagctaaaattctcgttaaaaattacaattgagatttcatgagaaatgtaatgtagcatagatgacaatggttgattattttctgtgtgttttttgtttggtttattttttcgttagtttaactcgatctttattcgaggaagagcaaatgttaaatttggaggaatttgttaagtttatttttatgaattttttagagtccattttactgtgtacttttagtaattttatgctttattgtttggatttatacttggtatttgcttttatttgttttttgggtggaacattacgagtctttcgtttttggtcaattttgatctttcgagtccttttatgatgaaatgggtcaattaatgaagaagagaacttcgggattcaaagtcatgattagttacggttcttggtgcttaaaaatttaaattttgtaattttttagctccaaacgtcgcgacccaaagtcaagagttgaggctttctagaagaaaaaggaagaaaatgaagaaattaggaaacttagggaaagttgtagcaatgacgccaatgccgcaacattcactgtttagtggaaaaaaagtcaattttgggaagcaaaaggagagccgcgacattctagcctatgtcgtggcatttgcgatttcgggaaagtttcccgtttgtggtctatcaaaggttgtggagctagattttcagatcattcaaacttgaagacaaattttgagcataggagaagtgactggagaagaagacacaattggaggactctaatttgtgttctttctcatctatttttatcttttatgttcttaattaagtatttgttgtttagaatgaattttatgagcttaatttaccttttaggattgttatgtgaataatttgaatttctttatggattagtgtggttatttaatttcctcttcttctcttatttcaattccattcaatactaattcaattttacaattattgactgatcacctacaattatatttataaattcaaatcaaaattttaagaagtgagatttgaatatgctttgatcattataatgcaaattgatttaggacgagagtatatagattatttgtatgatttatgagtttctatgcttaatgctttctttgtgaacaagctttgtcatagaaatataggaagttttcacatagaatgagtttgtaagtcttaactagattatgcactactaaattcaacttgtcaattgcatagaaagaagagaaatggggtaattacattatgaagtaaatgaaaagatggttaactgggttgatggaggagttgaagctcaatcaaaaggttattgctattcattgtgataatcagagtggaattcaattaaccaagaattgtgtgcaccatgaatgtactaagcacattgatattaagcttattttatacgtgaggttgtggagaaagaagctgtgaagattgccaaagttccaactgaagataatccttctgatatgataaccaaggtagtgctaagcagtaaatttaagcattgcctaaagctgatcggagtcagctgagcccaaaggggctgaagggacagcaacatttaaattaatgatttatcaagtgactttaacttgaaaataaggtggaaattttttggtaatggttacaagttttgtcatccagggattggaagctgtgaatccaaagagcaaatactggaagcttagtgtggatctaaaaa

SEQ ID NO: 266179 - DNA, 682 bp, Cannabis indica
aatctcatatttgtaaaacaacaataagttttgccgaaaaagtcgacggcaccgaaaaagtcactggaaaaatcactgtcactgaaaaagttaccggaaaagtcactggaaagtcacaagaagtagatgtctcagatataactaaaaatataatcggttctatgaataaaaactaataactcaaatcggttataattgaaatatattgttataatgaataaaaaccaataacacgaaataactcaaaaccggttataactaaaatagaaccggttatataacatagtgaatgcaaacaagtaacacgcaataatacaaaccgattataattaaaaaaaataaaggagaaatcagttcctaaaacactgaaatataaactaatacaaaactagttctacaataaaaaacataacaaaaaatacatcataaaaccgattataatttttttaaaaaaatagagatcaatttcaaaaaatattgatgcataaatatgaaaagaactagttccataacaaaataaataaacacaaataataacacacaataactcaaatataatataaagaaaccagttatatttatcaactacttaaaaatttaagacaaaaaatttgtttcgtaaagcaactaaaataaaaactcacacacaaaaaccagttaaatcaaatagctcaaacaaaaa

SEQ ID NO: 266180 - DNA, 1853 bp, Cannabis indica
acctcaactgccacgcagtggtgcgtttgcggaaaggttcaccacaagtagatataatcctggtctcccaacacagcaagtgtctgtgctctattcccagcacataattaaaaacggcctcatcctatttcatcgtgcttttgtcaccttcatgataattccaatacatcgagaatatttgtggagcagatgtgtcaaaaattacacatttttgagtgtacacttctggatagaggttccatcttcttctcaataagtgcgccatgacatcaatttgctgtgtttcaaatggaaaaagttagccagatatcgcacataaatcgcacaaacatcgcaaaaaaaaatgcaaaaaataattactgtggaattacatcgcataaaattgcacaaatatcgcacataagtcgcaaataatagcaaaaataaaataacatcaaaaaatgtgttgtaatcttaaatatatcgcacaaatgttgcacacaaattgcaaaacaaaataaaataaaaaagagtaaaaaacgcatgaaatcgcacaaaagtcgcataataatcgcattcaattcgcacaaaaatttaaaaaacaataaattagaacagttaagaaataacttacaacatcgtcgaaccattctccatgcaccatgactttgacgaactaagattgattggctgagccatcgtgttatattagtgtgctggaacaattatctattcagtggcgtattaattgtgagaagtatgctatgtgttttatttggatttatttatactttcttattgggtcttggctcacgagtgctctaatgtgtaggcaaggttaaagcagtttcaggccaaacatgagttcgagagcttgacagtggattgtacatgttctggccaagctagactgcgagggttagatcctacatggagcttgttatagaaatctcattttgcgcttaggttagcttatatgtaaacgacttgtaatattttgaaaagattttacgagatcctatatttgtaatattattttggtttaaattaaaagttgttacaagttgttttaatttataagtttttttattttattttaattcacatggcttagtagatcttagttaatgggattatgacattgtaatcatgatatataggtttctttaattatgacgttactataataaactccactatatcaaatatagtttttatagtaaccattccaaattacaatagagaaaaacaatacaatctttaaacttttaccctaaaccaaatcccctgattatatacaagatgcccttatatagatgttgaaatcccttcaacaaatttgaaatctgaaatcccttcggattaactatgctaagtttgaacaaaaatctcttcagctactccacatcttgctctagaacttcatctttgcatctatgaaattcctacaagaacattcaacaaaagatacaaagagagaaagaaggaaattcgatgcaagaaactacaatcaactccaaaaccaatctaaacgattagccataactaaatcaagaagagagtatatatgctcaactgaattaggtaacaacttcaaatataattctatacaactctagacacaactggaccttaatttattattacagaaaatactagttgttacaaaggctatttcctagtgcatgtgtaagcttattgcaaaaagctgaaatctttaatagaaaattttcatttttttccttgtaattttcatcactaatataaaacttgaataaacttagaagatgtagcaaggtgtaaccaaaaccaatatttaatatgatattgaatttatatatgagttgcatcacttttttaaaaagtggtgaaat

SEQ ID NO: 266181 - DNA, 595 bp, Cannabis indica
ataaatgttagattatcttagataatctcttccctgatgaggtttttatttaaaagtaataattaaatgtgccacttgttaggtaccttaataagtgtggtacgagaaaaatattagatacatgttcactggattaagtaggctaggtagcctattagttagccttaactcctgcgttgtggcataaaatgaaaccgttgtaggatttactcctggcaacatgtagatacggacgtcagtgacatatgataagtaccgggcataggtacgggctcgtctgatcaggcaatgcgatatattggtgccaaagtgtggaacatgctcacccgattaagtgatgcaattatatgatatatgggtgcaggtttttagcacaggctcacctgattaggtgatgcagttatgcgatatatgggtgctaggctatggcacgggcttgcctgattaggcaatgcaatataggattatcatatttaagcatcgacttgcttgattaggcaacgtgatgttatgaagatggttactttatgaagtaacatatatataatttatatgattaaataaatatgaattctattattggtgtaatagtttt

SEQ ID NO: 266182 - DNA, 770 bp, Cannabis indica
tagtgataatggtttcttcatttagtgtaattattaatgattacgagtttgttttttcagttacaaaaggtttctattttttattttgttaaatgatcattaaatgggtggtttatagttttgttagagtatctatttttatctaggtggtgagttaagtttaaggcctgtcggtaacctttttgctttctatttttttaaatttcacttaacaaaatcttgtaatttgtttacagtttttgattaattatttaaaaaattgattatataattgttagcaaacaataccttaatttgtgaatgtctcaattaattttgttaatttgtttggtaaacaatattgatgtttaataaaaatttgattttcattaaaagaagtttagtttatcctaaaataaaatttagtggttatattaatattggatgcatagcaaaattgtttaaacaaaatttgcctagggttatttttttttttttttgtgaacaatttgagtagagttagttgataaagaaagttttaagaaaatgaaagttcaaaaattaccatagagtgaatttatataataaataagtagtaaatattattttattttttatattttgtaaaaattattaattagatattttattttatcaaatcacaaaatataacttaattagatagttgagaatccggacaatttgatttattttgattggcgcctcgtcagtgccaactaagcagttacgattatcccacatcggaattaagttatcctttctacggatat

SEQ ID NO: 266183 - DNA, 359 bp, Cannabis indica
ggttacatggcatttcatctttttgaaatctgttgcatgtgcacgtcttctccttcaagtttactattcttgttctgtcttcatctatcacctcaaacaggttttggtttgctggtttcacctgcatgttttttgaagcaactttaaaacaacaaaaaattattgaaaaacaactcttttcagtttactggatgcgaccaataatatcaacttagtgttaattgcaatgactgtacatagttacctatgagttttttctcagatgatggtgtcaaccttgttgtccatttttgtgcctcctttctattattgtatgtccactcttgcatttgtgccctcaagcactccattaatgttgt

SEQ ID NO: 266184 - DNA, 952 bp, Cannabis indica
gtgatttgtcgagagagagagaggaccatgcaatatgcatgggatggttttgaaccttattttctttgtagataagtggccaaattgtatacctttagggtttgtttagtagaccgtataagagtcatattatattaaataataggtaagaataaaacaatatattgcattaattgttatgaaacacacatataaatgattcatattatgtgtattacaatatttagaaagggtttggggttggggattgaggcccagactaggatctcggatccgactccagcactagactcacacctagacacggactcgaaccccgagcctggacgtgactttggaccccgaacctcgacctcgacgccagacatggactcggatacaacagacccagacccaaacttggacttggaccccggaccccgaattcaaactcagactaggaccgggacccaagacccagacctaagcttgaaatcaaccctagacttgaactcccaacctatacgggacctgaacccatgtctatgtccagggtcgcggtccgagttggggttagagtcaaattatggtaaagataatataatttataaataatctagctattcatagaagtcaataccaaacatgtatcaaataatactaatacaatagaatacaatccaacacaatattatacaatataatataatacaacacggtgtaccgaataaaccttaaaaatacataatatactaaatatatatgataataaaaatgcctcctaattattatatattattttaaagaagcaaatcattaagaaactaaggtaataataatcataaccgtgcaccacataaacttgatacagttaaaaatgacttgtcgtatgtgtcaagtttgtgtgcacatttcattaccctaatgacaaatagagagaaggattcaaacgagggactgcatgtgcacacaa

SEQ ID NO: 266185 - DNA, 657 bp, Cannabis indica
aaaaaaattaatgttaattttcatatatggatatatatgtttaatttactataacaaatataaatcagtttactcattcaaattaaagaaaatattaattagtttaattagatgtacattggatgtattggatttttagacactcatccaacatccgatctgatccaattagatattcaaaaataatatccaatctgatccgatcactattagatatcaaatatgtagtagtctattgtaattggattagtcgattattattggattaaaccgatttatacacactcttaattatgatatataaataaactagtaagcatgtggttgagataagtgataaattttattagatgaaaaaaattggtccaccgatctatgaaaaacatactgataacaatccttgattgctcactatgaacaaatagttatggtaattttttagtcacaacataaatcttttgtgattaaatgtaaattttagtcacaacaaaaagttacttgtgattaacatatagtatttagatacaagttatattactaatgtatactttatatagtcacaataagtattgtgagcactgacggacccagaatttttacttgtgggggcttatttatcattaaaaaatatttatacatatattataattactctta

SEQ ID NO: 266186 - DNA, 1450 bp, Cannabis indica
taatatactaagcaacagtttgtataatgattcctcgcataagaccttacagtcagccggttacatatatactctgatacttacgcaattaatgagttatcccataaaaagagattgcatcgatccatatttgtaacaccctaactattataggcgtgttagcgtagtttttaacatactgcgcagctcgttgctaatcaacgagattattggaaatcgtgaataattaaaattttgcttaattatttaaaacttaatatattacttttataaacttcagggatcccgtttacaaaatgcagctacaaaagtttactacatctttacaaaatacttgtcgcctagcgactaaacaacgaaaggcagtgatgtcctgaggatcgtacgctccaggcctaaccgccccgacatgtacaatcttcatctgctcgctctcacggttcctcaactttagccttgcccccttacctacacatagcaatagcactgtgagtcgacagactcagtaagaaaagcataacacaataaacatactaacattcctgattataatcaggctcccatacacctaaccataaccctaactgaatcaggatcgatcttgacaaagaatgactaactgcgaatccagcctatactcagtactctagtcgtaccgatgtggtagcagataactcatactatctgatagcctaccagatatttgttggcatctcggtgcaaccctatgtacacctcactgatgccctgacatgctaatatgatggctatagatttgcctagtttgacggtaaataacatgtacgctaaacatgtataaatatatgcataacattttactaatcttactttgattctgaattcaggtgtgccggccaaccttagtggaacaactgctcggcgaattacaggctcctaaatcatatcaataataacatagataaatgacacgctaaatcactttctagggacttaaacttgaaactaaaagtttccctatcgatgaatagcattgcaataccctaaacatcgcaaaaatgggaaaaactagggttccaaaaattgccccaaccggtagaccggttcccaacccgaattccggttctgcggggtttcctggggaccaacaggaattctggttcctacaggtcccctgaaccggaattcaaatttagtgcaggaaagattcaaataattcatatctcacttaaaacaaccccaaatcataccaaactttccagacctgttccatacatccagtgaacatattcaaggcaataaaacacaactacatgcactgaaaaaaaacttgccattaaagagccaggcttgagttctaaaactcaaatatttctcaaacctaataacagcccacaattcaagcttaattcaacatactctagcataatcaaacctctgaaaaaaaaaatactaaataactacagcaacc

SEQ ID NO: 266187 - DNA, 1210 bp, Cannabis indica
tgtgctttgtttcttcagtttcttatatataattttagtattttatgtactgttatatgattggttacagttgagtttgtgtaaaaccaatctgaacttcgtatttcaactacttgtataaatcaggcaccttagcaattttcatactattaactcctttggtctagtaagctcttacttgggttttcctttgttgattttatatttctaatgtgtaaattgatcagaaagagctttccttggtacagatatgatcaacatggatgtagtaattgtattggagatgcaatttatctgaagctccagtctattcttaggatatacaagaaactgcatgctagaggctggcctttaattttgctgtcaagaaagcccgagagacaaaggaacaccaccgtaaagcaccttatttctgcaggttacagagattggtctctattgataatgaggtacttatgctttgctccttcactttcaacatggtctattgataccctaacgaattagcaggctttataattatgtgctgtgatagactgataacatcgtggaaacattttataaatgatgtgatagactcatattatagctggctaagtcaagaactcttgcagatcagaagaggaattgcgtgtggataattatgaatactttgccagaagaaggatagcattgcagaaggaaggtttccgcatagcaggcactataagcagtcgctacgatgctttaacaggtccatattgtgggcaactcgtttttaagcttccaaacccacttcattgcatttatgagaatcaaaatggaaacacagttacaacaacctaggccatattggaggctattaaaacggcttgcttatgtaccaggagatactatcaaagagatgaagatttcaacattgaaatcataattgagttgagcacagattgaactttttgtcttgcagcttgagtggttgactagtcgctgaaattgcaccttgtgacttattccttcagttgatcgttattgggacgttgatcaaatctatgtcaggccactgtcattgtgtgatttctagttgtctgagtggaatcgaatttaagcgtgtacttgtagtttttgtttcactccacagattgaagataaatttatcaattatttgattttttccccttaatttggcacttagtttagtcatacactgatacaatacaccaccctgttgtat

SEQ ID NO: 266188 - DNA, 630 bp, Cannabis indica
acattcatatctttcattttatccaaaagtgacagtgctttagtttccatcccaattctatggaaagcctccatcaggttattgtagattgcaacacaatataataacctctgactttcaagtcctcaaacacttccattgccagaattcggcaagatcatccatgacaaaagatcccaacttcttcatctgcacaagcaactcataaaactcatccattttttcatctctgcataagacaccacaatgggattaaaactctcagagtttgtgtgccttgtcaactcgattaacattaccctgaatccatcaaattcttcaacaaatcacaagcctatccaactctcccatctactaaaaaagcctgaaccaatgtcccctctccttcatctcctgaaacaattcataacccttctcaacaaaccattgatgatagttatataagctataacatcaggttcaactctgtcactcttcatttccttccaaacctgcaaagaccctttatcaaaatcatgaaagtaacactctcctctcctccaccaaatcatcatccttaaaatcctcataaacagacaaagccaaatcgaaataacccattttaattaaagcatccattatcccattata

SEQ ID NO: 266189 - DNA, 610 bp, Cannabis indica
agggtcttcttgtcgtgcctccataacaagctcaggccgttgtagttccagcagtgctcgcagatcaacctgttgctaggaaccgtatggagccgttatacgagaggtttcgtaagcaagcacctccagtatttttgggaggtccagatgtgatgaaggctgagcagtggctcactgtaatagagcgaattttgaatttcatgagggtagttgaaaatgatcgggtgacctgcgccacattccagttccaggaagacgctctcgtgtggtgggagttagtgtccctcacccgggatgtcactgtgatgacctgggaagagttttgagagttattcaacgccaagtattacaatgaagcagtccgcagtgctaagcagaaagaattcactgagttgatgcagactgagagtatgtcaaaaactgagtgtacaacatagtttgaccgtctggccaagcttgcctcgagtattatgcctacaaatttcagtaagaaggaaaatatttggccggtttgaatttgaaaattagacatgatctggtgatttctacgaaacgaggcaaaatcatatgcggagatggttgaaaaaaacgctctgcgagctgagggtgc

SEQ ID NO: 266190 - DNA, 842 bp, Cannabis indica
tttagtataaattttttataattatacacatacatatgtagaaaaacatgcatgcgtgtagtgtgtaattcatgtctatattagtctttgcacaaaattagacatcaatataaaaaatatatataaataaatatttgagatatatatttatatagttaatatactattaaagtatttttttaataactcggaaaagtgtatattactaaaagagttaattgtggcataaccttcagaactcaaattttgactgtaaaatctcaaaaactactgtattgttagcaaaacatatctgtccccttgaccccgttataatttatctgtgtggctcatccaaccaatgctaggtagactgatacatgctatgtcattaacaattaaatgacgtggcatgttaggaaataaaattaaaaataattgagtttaattttttttttaaaaaaaaaaaaaccaaaactaatggccaattaaattaaagaaataaatgaaaataaaataaaatgaagaataaaaagaaaataaaataggagatgaacaaaacaacaaaattaaaagcataaactcaaaacctccaaacccagatcgacaagttctcagtggcgacgatctgggtttgcaaaggagaaaaaattctcaaacctattttcggtgaaaagtaaaggaaaccctgcggtcgaagtcgaacagaagaaaaagaaaggttgaaccattaggtacttgtatttatgctccattgtggaaggtgaagatcacaaactagccaaaaaatatccacggggcctcactactacaaatgtcgtccccctagagttgcacaaatgacctccatctttagcagctat

SEQ ID NO: 266191 - DNA, 623 bp, Cannabis indica
tccaagtccaagtcctagttccagtcctgatcaacttctggttttggttccaatttttggtcacaaggtaggggtcaggtcaacttttgggtttggtactgggctcatgtccgggtctgggttcgcgtccttgtcagggttcgggtccagggctggtcccaaacccaaacaccgactacaagttttctcaaagccttgggtccagatccagatccaaatctcgggtcccggtctagttcgatttctggtgccgggtaacgagctgggtcctaggttcaagttaaggtccgggtcgggtactaggtccaagtgctagttctgtttcccaggtccctatcatgattcttggtccaggtctcggttattgtgtgggtttgggtcccgttctaagtctggcttcgagtcctagtctcgattcttgtttaggtctctgtctaggttttgatctaggttcgaatttgggatttggtcgtggtcctggtcctagtcctagttcgtttctagttcaatttgcgattctgagttcgagtttgggtttgagtttgggtcggagttcgagccctggtctgagtttgggttcgggtccagatttcagtctaggtccagatcaggctccgggtgtg

SEQ ID NO: 266192 - DNA, 729 bp, Cannabis indica
atagtgatggcttcagaaaaaagtaacttttccatcttattcatttcggagaaaaacttgagccatcacactaaacctagccgccactctctttccttcttcttccttgattgtttcgaatcctcttagtgatagagtagtgcccacacatagcaagtagtacctcaatcatagtgtggaagatcgtgaagaaagcaattcaacaagaaggacattcaggctcaggtcttgataatactctgcgacagaaaggatacaagggttagagatctgagtggaaggagacatattattccgctgcacccaatgtaaggtttctcatactttatatgtgtttatttataatcgttttagaagttcatatttaggatgttaagcaacatacttgtgagtagatctaagatcctgataaaataatttccaaaatggacgatgaagtataatccctggttcagccaactttgttctcttaccactttcttatggttgaaagattgtgttccattttgacttatcctttaggaatatctagctgtgtacatgccaaaaaaatagaattgttatttttcaaatttatacatttcatgtaccttctcaatattaaattcagcggccaatactaaccaaaattctgccaccatgtacaaccataagaacacatcttaacaatatagaaaaactcaaaaaaaaattacaaaattaaaaataaagcaatttacattaaaaaaa

SEQ ID NO: 266193 - DNA, 3063 bp, Cannabis indica
ggattattaggtctatttgcagagatgaggcatgaaggaatacagcctgaccttgtcacttataacactttacttaatgcttgtgctagtagaggtttaggtgatgaggctgagatggtgtttaggactatgaatgaaggtggaatagttcctgacataaccacatatacttgtcttgttgagacttttcgaaatttgggtaagcttgagaaagtttctgagctgctcaaggaaatggagtctgaagggaatttgcctgatataacctcttataatgtgttattacaggcttattcgcaatctgagtccataaaggaggcagtgggtgtttttagacagatgcaagtggctggttgtatgccaaatgctaacacttatagtattttgttgaatttgtatggaaagcaagggaggtatgaggatgttagggaactttttcttgaaatgaaaattagcaatacagagccagatgcagctacttataacattcttattcaggtgtttggtgaaggtgggtactttaaggaggtggtgactttgtttcatgatatggtggaggagaatgtagaaccaaatatggagacgtatgagggactaataactgcttgtggaaaaggggggcttcatgaggacgccaaaataattttaaatcacatgaatgagaaaggaatagtgcctagtaccaaagcttatacgggggtcattgaggcatatgggcaagctgcgttgtatggagaatctattgttgcattcaacacaatgaatgaattaggaagtaagccatcagttgaaacttacaacacactagttcatgcatttgcacgaggtggtctgtacaaggagtctgaagcaatttttatgagaatgggtgaatctggagttgcaaggaatgtcgatacattcaatggcctcattgaatcttttaggcaaggaggtcagtttgaagaagcagtgaaggcatatgttgaaatgggaaagacaagatgtgagcctgatgagcgaactcttgaggcacttttaagtgtttactgctttgcagggcttgttgatgagagtgtggagcactttgaagagataaaaacttcaggaatatttcccagtgttatgtgctattgcatgatgcttgctgtatacgcaaaatgtgacaggttagctttgaaccaattaactcaatatattgtgttatagcttaaatattgtaaaggagaatgtttatcattctaacaaacgaaatttgataaattatacatatagattttggatgaaagatacaagagtgcaatagatttaaccattgtcgaagttgaggaaaataaacaaatataatttaatgtgttagatgctgtctacttgtgtcttgtacatatacttcgagcaattcaataaagggcattgtaacagcttcagatataccttatgtctatccgaaaaagaatattcatcctttttatgatggagtcctgcttaattagattataatcaatatacccaagtggggtagctcaaatggtcattcatgagaggttggagtccctcttgggtacctgcataacgattgctatagtttcagggtccccaaatattgtaggactaagcggggatcctagtttaaagaaaaaaaaaagaattagaaccaaaatgatgcgagaaaagggaaatattatagaaaaatttctgcacgtcttggagacaatttatcctttaagatggtgtatcaatattatattaaaaatagaatggcagacacgattgttttcttaaggtgtagcacttgaaaatgatttttggattattattaatagatgcgatcttcttcttctatttttttttgggtttgtgtgtgtgggggggtgtattttcttctttaaactataataataaacaaatttggtctgtcaacaaaactctgaagctcctctctttcagatgggatgatgcatttaagttactggatgagatgctcaagaatagggaatcaaacattcatcaagtgattggacaaatgattaagggagattatgatgatggttctaactggcagatggtagagtatgtctttgacaaactcaactcagaaggatgtgggcttgggataaggttctataatacacttctagaagctctttggtggatgggtcagaaggaacgagctgcacgagtgctcaatgaagcaacaaaaaggggattgtttcctgaacttttccgtaaaaacaaactagtatggtctattgatgtgcacaggtattaagggaacttctctcttccaagtcatcgtccttccacttgaaacttataaatgttgatgctatataaattgcaggttgtgggaaggcggtgcctgtgcagcactttcagtttggctaaatgatatttatgagatgttcttgaatgggaaggatcttcctcatgttgcaactgtcgttgtggtgtaagtcactttccttctatgaaacttttttattctttgttttttttttctcttaagtcctgttgtatttgcttatgaagttactgcttcttgcccttgattgaccaaggattaataagctgagctgggcttgacaacaacctcgttgggacaataatgcttactttattatttatttagctctttttattgccgacatttatgacttcccctcaaaattaatattaccttgtctattaccatatctaattttaataaagttttggccattattagcatcaatcttttttagctgactggaactcaagtctttgagaaatctacatggaatatgattggactggtcatgtataaccaaagttgatggtatttgttgccacaaacaaaaaaaagaaaggagttgatggcatttgtagctctttatttcattgtgtaatcatgaccctttttggaaaagcccattgcatctcatgcagtatttttgaaattttagatgatttgcttggtgggcttcagcttagagtcaagacatttgaatgtcttcaatatgtaatctacattatgtttttaggtacataaaatatcaaactgattttttattgaatgatttgcacaatcctcatctcacatcctcc

SEQ ID NO: 266194 - DNA, 543 bp, Cannabis indica
ttctatcgaaatttcggcataacagctataattgagtgttgccaaaaagtttaaacataataataacaacaaaacacaattcaaaataatataaaataatcacaacaacatttagcaatgtaaaaatttatcattcatccgactacagtacatgtatccacataacctacttcactacggatgaatatttcagatattcaaactcacctaacatgcatattattccactcatcgttccggcacagtacaatatattgcgaaacctacttcactacggataaatatttaagatattcaaactctactaagaaattataattaatttacaataaaagttagtaaatgtatacctcgagctagctagaaaccgatcaacactaaataaattggatccctgcaaattgacctgacaacctacaacataaagaaatactacaaaattataaatttctttatttagctatttactagttatataaattatgagtaactagctagttactaatgagtaactagttaataataaaaatacatgaatatgaa

SEQ ID NO: 266195 - DNA, 549 bp, Cannabis indica
gtcccaatgtgaaaggagggcagtagtacgagggaatctattggaaccgagtgtggacggtatccatgccctaaacgaagtagtactcgtccacaaaatatcctattttgctaacatcagttaccacagtacctttcaaccatttctcatccaattgagagaagtagaagtaccccgacctgctctgcatgggagttgacttcaggtcgaaagctagttggtgtcgtgcggggacgcctcaccccatccttccttgcgaggtgtaaaggatgaacagggtggataaatatttgatgccctttggagtgaattgggttgggcaaaggtgatagtagtccgcaatccttttgaagtacggaagcaaatgcaacattgtaccctgcttggtatgagcacccaaccaggcacaaaatccttgtcttggactagttgcctggtgatttggagaagggaagaagcattcaacattttccaaatagccgtgcttctccaaattcttcatcttggtcttggttactatggacggaggagaaacccatcgagctccta

SEQ ID NO: 266196 - DNA, 1641 bp, Cannabis indica
tagaaatttaaaattttcttttatttttcaccaacgaatcaaaatttaatagtttaatatttaaaattaatatttatatttaaatttgtttagtatccatcaatgagtaatatatccattaaaaaatggtccatataatatgattaaagtttcgttttattacaaaaattaaaaaaattaaagtctattataattaaaaaagtacttgcatgttttttttcgtcttaaaaaaattaagggaattatctcatatattttttttttcttacggtttgggttgttccaatagtgtatatgtgggttgcgaaggttactctgttagttgttatgtggattttcgtaaaaatatataaaaaaaaaattactttgaaatgtaaaaataaaaaaaaaatcccaaaaaattattcatgcataattacatggttaagtaaaataactcaaccataccattttaaaatttatattatcaaattttataattacctaattatttcttattatatagttcaagttttctaatttttaactcaataatgtaaaaaaaatatataattttttattatagttttcaatattatttttttcataatcaatatttgagattgtactaaatatttatatttttatttcatttaaaaaacaacttaaatattttaatatgtccaacaaccccaattctcaacaatttttggaagaaaattttaagtaagagtattacttttgatcttaccctagctgggtatttttttttaatttattttcaatatacggagaaattacatatcattttttttataggtttcttacctattttaagaaaattttataaaaattttagtgttaaatatatgattcatacaagatggtgatgttttatgttcggctgctactcttatcttaggtttgcttgaacctcatgtggtggaggcttctacacttcttcatgggcttctcctttgtgtgtggttgggatatactcgtatcaatagattctttgattatttgtgcctagtgaactctctttcaaacaagaagaatgattgcaatgagtgtattattcttgatattcttcaggtgtggaagtctttttctcatgtctttatttcttattgtaatcgagctagtaacgttattgcctattctctagcctaattttctctttcattagaaacttttcaagtttggtggtcgagtcttccgcctaattaactttagatggtttatgcttgtattgatatcatgatttctttagtttcgtgctttttttaatgaaattattcctttttcaaaaataaaaatatataattgaaacagtttattacattcatgtgtaaatttttatacgagtaaaattaattattttaaattttatttttgtcatattaaattattatgatgtctattattataactaaaatacacaacatcatataaaagaaaagaaatcgggataagatttttttatagatactgaaaattaaaaattctcctacagtaacaaaaaaaaaaaaaataaggtgcttctacaatgtaccctttaaaaaagaatgcattgatgcatcttttatttattttgacattcagaaaaaaaaaaataaaatacatttttttcctatattcgtatacgttatagttatttaa

SEQ ID NO: 266197 - DNA, 702 bp, Cannabis indica
tataccttttatgtattttaaataccaaaatacctcttacactatcacttacacaattagactatggttgtttcaataagacgaaggttgctgggtggttgggtaaaagttgcatcagacgaatgtttcaatcaaacgaaagttgctgggtggttagccgaaagttgtattagacaaagttttcaaccagacaaaataactgttagccaaatattcaatatgcaactgttataaaacattaaaaatcagaatagtattttcacgtacgtaactctatctacatgtttcttcatgatttaatatgaacaaattcaccattagaaatttagaaaacaacaaaaatacatcaggataaatattttactatagtattgatgtaatttttttggattatacttgagttggattgtttgggaactttagttcaactttttgagatatgcattcatggatttgaaaattgaagtcagaacattagttttatgcaaattaaactagatttctagttaaattttagtttcgtagtagttttctacattttttttcatgaattcgaaacagctcctgtttgattgattctagtcgtcttctcaagtgaagttgccggaattaatggtagttctctttcaggttgaatttttcgtttcggttcttgcgtggttgagtgatgattgcttaggaagcatgaattgaaggtgtgtg

SEQ ID NO: 266198 - DNA, 629 bp, Cannabis indica
ccttgacgtcgcatacacctttaattcctgaaatagacaatctaaaagaaacagattagcaataagtagagagaagtaaccaaagtagaatttaatctaatttttgtaatatcaatttttaaacaattccccagcaacggcgccaaaaacttgttaagaaaattatgaacaatacgcaagtgcaagtaatcaagtagtaaactcatgcatgtgaggtcgaaccacagggaattgaactaaataccactaaattagacttatgattctatttggtagatgattgagactcaaatttgtatattttaagcttttaattgtgtgtataaaattaatttaattaaatacttttatgattttaattgtaaaattattttaattgaaatatttaattaattttaattttatgttatctatcagatttgagtggagtggtataaataaaaagattttagtatcaaagaagcaaaaagaggtcaagaagtatagttattgaagcccaaaatatgtgtgtgttgatgatgtgagcccaatgatcattatatcatcaagttattatgggctgatccaagttcatagcccacgttgaacatggccccttatctttaatgttatttcagcaaaagaaaaaa

SEQ ID NO: 266199 - DNA, 1664 bp, Cannabis indica
cacctatgccgtcggttctttgctaggaaccgacggcatagggtttccccaaaaccctcaaaaattccaaatttctaaccgacgggatagggtttattaatatatatacctacggtttttaccaaaaaaccgcctctaaatgtcaatttcgaatcaggtgggtgttttcacaccctttagcttccctttttataaaatgggttaaaaaaaatgaagctaaaagcccatattgtagtagtgttggcagagctccaatcaaatttattttagcaaaagatgagttcaactaaagatactcgtggtattgttgagaagcgttaacataaacattattacataattatccattataacttttaatcctctttaggtcctttcttttttcaagtgtgagtactgttcatctaacagccagcgcgcgtaaaaagatttaaagcatagaatttttcgatgtgtacactcgtgtgcatgaatttcatttgtggtttcatcattattaacagtacatgtttctaaataataattataataatcatattatagttatacactagctagaagaaccgataaataagtcacaagaaaaaatcattactcctaaccgactttatttttttaagtttggtttgacataatgaatcacgccgacaattttgtgtttggatccaaaattcatgcttttgccattatgttaaaataatatacgtgtaatattagtatctatatatatgtaacatccttttcagatttataacatccttttcatcaattctgttttgaccagaaagacattaattttcctattgatacatattatatattcaatataatataataattaacatcacatacataatcttcttatgatgaattctatctctcccccacatcacacgctcaaatagaaaaagaaactgataaagaaagagtgaacgcatgacttatccattgcatgtatcttctagtttctacacgtacactttgtgactcaaataatctcgttcaagaggtagactaactaacttattccatgtagtgttttagttattactagattattaattagttaagtcgtttttccttttcttttttctgtagaactttaataaagtgaaattaaccctagctagctacctagctatactatatatatacactaatatatataaaaagtatcatgcgtgtcgatctttaggaaatattgactactttgttaaaaaaaagaagatcaaaatacagtagttaattttgctttgttatatatcggttgtttaaacaagcatacggactcttgtaccaaccgcttataaatttcatattaatttgtcttattgaataatatcaacaaaaagtttctgtttgcatagaccaagacatatatatattatgattcaccatgaacttcttaaattatatacataagacactcaaccatatataagaaaatttatattaattcccgatttctttttttcacaatcttagggtaattaatttttacttttagtcacaataaaatttgtgattaaaagtaaaaaaaaaattgtaactaattataaattatatattattcttaagttgttactaaaagatctctggctaaaagtattagtcacaaaaattataatttgttgtgactaaatgtatttttagtcacaatactt

SEQ ID NO: 266200 - DNA, 409 bp, Cannabis indica
ttgacacgctagttaaatattaccgttaaatatcaactcgatgaccactgtacacacctgtgtatatgtaacagtaaaactttaaagtcgatacagtagtaatccagatagtatttaacggtaatatctaactaaaactttaaatttgcaaagaaaagtaaacttaaaggggtttcgccaccaaaataaaagataaagaggttaagtgtataaaaattaaaacataaggggcttttaccaccaaaaaaatgataagagggttaattgtataaaaactaaaacataaaggggtttttccaccaaagaaaaagataagggggctaactgtataaaattgaattacaaggggggtttcgccgcaaattactctaacacttaataattaccactaacaactccaaattactca

SEQ ID NO: 266201 - DNA, 1582 bp, Cannabis indica
ctcccgtttgctttgtactaccatttaaaaaacacttttcacaacgcagagcttgatgtgttggtctccagaattgaaagcatcagcaaggcgcaagagaatggcattggaaaagagacgatcttctccggggaattaggtcgaacatgtggtgtgcagcgagtttgggcggtgatgtctcgtgactccatcgaaggagtctgggtccgaactgtagaatggcttgtgtggagagagctggtgagtttgagcgaagagctttctctaaatctatgctccattccatggcgtgagctgctgaatttctctccattgtcaatcggagagaagacactgaaacccaactgctgctacggcggagaggctcagccggcggcaactaacttgtagtgtggcggcccgcctattttaaactgcgaaaaattagagacagaagcggctgtggagacctttaacattattttttcgaccagttctttcttatatatttcttttgtaatgttcttaattaatttttatcaattgttcacaataattatgagtagttagattttttattaaagtgttaatggagattgatttacactttattttgatttaatgtgattcgaattatgttttatgatatcaatataaaatttaaaaaatgagtattaattatattatagtgaaagagacatagattttgatacaaagagtaaatatatgatttcggtagaatttagaatgtcttagcctgaatataaatttctttagtaaattagctattaaatgaaaattgaattttgagaattaaattatgttaaactaaataaaatagattcaattaaaattaattacattaaattttaattattgttaatttcaacataattaattgtttattttgttttaatttttgcttagattatttggttttaaaattctttcattcgattgtcaaataaaaataataatttaattgtttggtacttagctataatttttgtgagaacgatctcacttactttaatattacttgctaaaacgtatgtatacttgcatgttggaattcataaccgaattcaaacacactacacttcatccgtgacggacccataattttttatctgtagggacttattgttataaaaaatatttattatttactttacattaaaattataattattttgtagagactttttagtattttattgcataattatttaactaaaaacattcaattttttttaacattactggggcacactatcattgcaatatccgtttctgcacttcatggttgttataagcacataaataggtgtaaaatagattaaaaaatgtgatttggtggttacacaagagttagagagctagaacggattccaacgttcaaaatgtttttctcaaaactattgtaccacgcacatgtcgcttggtgtatgatcgagattatgcttttgagtttcagcactcagaccaaatccatcctagatttttttttcatctcatatttaagtagtaatctattttgtaacaactatataatcataattctaaattttgtaaatcaaattgtgtaataattcttttatta

SEQ ID NO: 266202 - DNA, 919 bp, Cannabis indica
atttaacacgccaaaaataaaattaaaagagtttattgtacgtgtgacttttattttatacgtgtatgaaatagacgatttgaacattgaattctatattgtaaattatttcaaatttcttataattttataaaatatcttaaataactataacgtacaatactatgaaaaaaaaatagacgaattttttttctaaaagtcgcaatagttaggagttgtaccaatacacctattttagtggggtgcattgtagaccatctctaatgcaaaatttaaattttgtgtcaaacttgcacaaaaaataaatttgtgcttatatttgaccaactattttaattatgctctaatacacaatacaatacgtaaaataagtaaaatatttaatattttattgagaatataaaagtagcattaatttattccaagctaaatttgactcaatattatattttgggctaaatttaacacacacttttaacatgtgataaatttaacacactttttcttcttctagataagccatggagattgagactgtgaaaccgaaaaaacagctctaaagaggataaaggaagcatagaagagaactaagcgataaagagactgagaaatcagagtgaaaaagagaaacaaaggaggagaaggcccgagacccattttgaggttgataatgacgaatatctacgggattgaacatccttttgtagagtgtcgagatacaactagattcagtaacatacgaagagattcgaatgagatccaccaagatacgaataaattgacttctatttatttagtttggcaaactgagaataaagatttcaaattaaggtttctatttgttctcgtcgttcagtgaatactcgtatcaatgataataggttaattagtaattttttcccttgaactttgacatata

SEQ ID NO: 266203 - DNA, 607 bp, Cannabis indica
ggtctagggcgctctatttatttatttacgttattaaacttatgtcacaattattttagttattaattattatgtcttttgtacaaaaactggccagttgtgaacattttcaagtattaaataaaaatgcgacattttgtttttttccgcgtttaacgcttgtaaataaaactaatatttttataaaagtacgggcgttacacaataaaaatgcaataaaatatgtatatcaatatatgagcaatgcaataaaaatccaatggtgattattttttttatgtgaattgatttgtgactatgagtgaatcaatagtgaaaaaaacattatgttatgtaatatgaatgaatatgaacatacaacaaacattatgtccaattatatatgattaattggacaatctaactatttttttttcttttccagtggtctatttcgagcacttgatcaactctcaacataaggggtaattcaacatttgatacaataatctaagaaaataaaaattcaatattcattttagtttatctctaatatttatacaacatcaacaacaacaataacaatatataaatactaaaatagtaaaatacacaaaacgctatacca

SEQ ID NO: 266204 - DNA, 508 bp, Cannabis indica
ctggcccgtgttgtggcctagtgggaatgtaagtatctgctactatctattgcccaatgacttggtaggctctcctgatcagtacagtgacctgcttgcatcgattatcaatcacttcttatgggctctcataatttccatctctcaatccctctactcttcgaattggcatctatgctcttcaagagaaaaatttatagatgctctagtatcttgttgatcgtaataaagagtattattgtggccttgtattttccctagtgtagttcgtaagttttgtagttcggtgtcatcactgattggcctttgagaatttgtagcagattggattccagtaccgggggaaatttgctcagtctgaataatagtggttccagttttttgcacgcccaaagtgaactcaaccagaggtgtagttattccttgacatacagtttgtgggcctattggttgttgaggattagtcagagcggggtttgtcctagctggatctttagggtttgtaagt

SEQ ID NO: 266205 - DNA, 7060 bp, Cannabis indica
agtgctacatccaaggacattacgcgttttgactgaaagaaaacaagagcaataaaaataaaaaatgtaatgtattacatatagcttcatcacttaagtagaactaactacccacattaaaaaaagtgtaagaacaagaagaataagcatgacagatcatgtatgaaatgactaaccaagagaaaaccaggaacatcttcttctgcaattctagttgccaatccttccacaatggctgtttttcctaccccactttgaccaagaagaatagggttattcttggttctgcgacaaagtatctgaacaactctctgaacttcgacatctcgaccaatgacaggatcaagaagtcccaacttagcacgagcagtcaagtccaaacaaaattgatccaaagcacttttctctgacaagtacggatattgttagattgcacggtcctccaggtgttcaaaaagcaaaaatgaaaaaccagaaactgagaacaaacaaagaggtttctttcttaccttttgttttcccagagaatcttgtgacagtagctttgtcagacgaagatttttcacccaaaccttgggatgctccagacaattctctaccatctttggcaagctccccttgaagtttggacgctgccacagcagccaatttgtttgcttttgcccctaatctgaatgaacaattgtttccgtgatcatgggatagatataaaaggtttctataaatgccttcaaattatatctatattaatatatatatataatacatgcattttcagttaagacggatatgcattttcagttaagacggatattaaggccttttttgtttcatagaatggaaaatttttctaattctatatttttggtaattccgtaatcaaaggaatttccagccgcatgaaccaactaaaattgcttaatgttaggttcatgtcggatatgttatatccataatgtctttgactctcagatgaccaattcccacacacacatgaatattcaaagaactaaaatgaagagtcaaccaaactctaatttatacatttatatgtatatatatgtaatatttacctctggaggactcgagcagcgctgccgtcatcggaggtaaaaaggcctatggcgatatgctcaggagcaatgaaattgtgaccccttgccctggaatagtcaacggcagcctcaagcacacgtttggtgctaatggagaagggaagttgaacagcaggaccggaattgggatccaattctgcaggaatttggtgacgccagatagagcgaacagcatgacgagcctggtccacggtgatacctgatccaagaaacccatttccattatcctcggcgatcaaacccagcaaaagatgctgagtaaagaccatatcgcaaccgaaagctttggcttctctctgggagaatataacagccttgatcgctcgttctgtaaaacgctcaaacactgcagacacacaaagcttcctagtcttcgtcctcttgctgcttcgactggtctctagaaatgaaaaaggtaaatgggtttgcgtttgagagagcagaaaagagaaagaagaagaagaaacggcaaccccaagagaggaaaatcggcggtggtggacatgatcggaggaagaagtaaaagacgatgaagacttgagaagtgagattggtacaagggatgaaacagtgactggtgatgaagagagatgcatgagcgttggaggagatggaggagccattattggagagatagttttgactcagagctgggttttggtgcagttccagaaaattggggtgtcagaaagaaagtacaaactttccatgtacagagaaaaaagagttgtgaagaaaaaggtagttgcttttgattttggttttggtttgcttgggtcgtttatggttgtttgtcttttaacgagaaggaaagaaaggaacaaataagtttggctttagaagaccaagaaaggaaggtattttagtagaattagattactttaagttaagacgacacgccactttcctaacactatcatattatattcatttatttatatgtaattaatatgtctaaacagattctaaattacagatttattagtttcaaattttacagctttgtatctactcaccaaaacaagaattggcatttgtggaatttgaggttttcactgcaagtaccattacacgcacttggttgttggtaattgaagatgacatgagagttgagaccccacaaaagatctccatgtgaatgttctaaaaataaataaataaaacgagggtccagaatccagatattaaagttggaaataaataaggaaaatttatggtttgatatttagaacacaaaaaagatgaaaactatgttaaaattgctctagcggacactagacaaaaagaaaagctcaaataaataaataaaataaagacactatgtagtccaacaatcttttttctaaaagatcacaagttgattcgtatgaaaaattgtaatttgcgttgcttcactttataccaacattcctccaccatcatcaatgaactttatcgactatcagacatcacctatacttgaatagccttatttgcagttctaaatgcaactcattcaacatcgccatcatcatcagcttcttaacacctatattcaatcaataacagcagatgaaacagacatcagctcaaaaattcatacaaccagcccaaaaacaaaagatacatatatttaccaaagaatcaactttaccttggcaaaaatatggcagttgggtttccaggggagggaggattctggtgaatcagtctaacaagtgacccagctttggcaagagcatcaggatcagtgattgacaaaacttgcacatcctcaaggccaatttgtcttttgatcaagtccaagttctcctgaagaacctccatctctccgaatggaagctttagctctaaggcctgggcccctagtgcaattgcctcatccttcttgaacctcatgaagggcatacaaaccttctgggttaatttaaaattgtcatttggacgaacaggactattttggatggcatccaatatcacccatcctcattggaagtaaaagagcgtgtgctgctgtcgaatctgtctcttagcattttcaaacactctgctttccatccatcgtactgttcgttgacatatatcaagccaactagattggtctcttcagttgatgttgttacaggtgcacccttcttattgcctttctttgaacctgaaagttgcttttgaagcagctttctcatcagtactatagaatcttgcaagtacttgttggcagtcttcagggttagatctggaacctctgccacaggccaaccagcagtaattacaaatccttccttctttaaaagttccttccaaacatattcagcatagtgtgggcagattggagtaataaggcgagtttgcaaatccataaaacgccatactagttcccggttcattcctccagcaccacaagaaaatctatactcatccctggcagcttgaagatcataaaacccagtcttaagagcttcacggaacatgtaattgcggtaatgctgttcagtcgtggtcacagcaatattcatctcatttgcaaagacacggtcagcgtaagtagaggggggccctgacctcaaagaagagtcagcagccagaacttcttccatccatgcgatttcttttgtcagccttaggatggcagcatttgcagtctcaaatacaaaatttgcatcatcaacaccatcaccggcatcagccaaagagaatcgtgtagcatcagcagaaaattcctcgattgcctggcggagtgttctaaaatttccagtagacttggacatcttttcagaattcaacattatgtgcccattagctctaaagccacgaggccagtgttgcttctgcataattgctgtgtggttataaatgcagaaagtcaaatgattttggattaaatcctttccagaaactcgaatatcaaatggataccagtactcaaactcctgcttcatcttgttgagaagcggcgaaggtatatcagatgatcttggatatgggccaccacaaaacaaaaagtcccaaacctcatcagtcatttgctcaggttttattggagatctactggttccgtacatgtcatcattatgtagcaggtgagcaatggtgtagtaagccatgtaaatagtcgaatcagataatgattcaactaaaaactgttcatcccaaggaattcgagttccaagcccaaatgaacgtgagcaagcccactggttaagccaacccaaagtatgctcaaatccatgtcgagtctcatcagaatacaaattcatgttggagaggcattcctcagcttgcttcttccattcttcctcaccatatgtgatgtaccattgatctgttaaagcaacaacacattcatccccagaacgcgacatcaccttcttctccggttcactataaataattgcctcacctgtttctaaaagcttactccttaacaagggctttgcctcctggactttccgtcctgcaaattccccaacaagcattgttccctccgtaaatcctctcaagtatgtcaacctcttggcttctgccaacttatctttttcgttctgacttttaatcttaagatccaagcaaactttttctgcagccttatcaccaaaatctggaatattgatgataggtacaatctcaaagggcaagacccattcatccttcacaccatacttcactctcaaagccggttttgatttcaaatcttgcaaagccatataatcatcaggggcatcactaggaacactggtaacaattccggtacctttgtctgtcaagatggtcaacatgggaagagcataaatgacctcattgaatgcaagtggagacttcaacttaaggccaattaagtccaaaccagtcagctcaaccaagcaagtaggcttctcagggaccctggagtatcgttgataagcaagattgagagctgctctttttgtgagaattagtacttctgtatcattaatttcaaaagctccatacttcccatcaggcaatacccatgcatttgtttgcccatacattgtctcgggtcgcaacgttgccgaagccagaaaaacttttttcccctccaacacacccaactgaggaggaaaaggtttcagcacctccatcttgatgacggtgtattcttggggttgaaccccttcaccagatgccctgtcatgatcagcacatggctgcccgtccaatggagaataaattgtgtacctgagatctttcacaatcttgcccatggccttcaatttcctcatctgccacctaacaaagacatcaaagaaggggtttttatctgttgtaacaaaggtacgcctccaatcaacacccatgccaagagccttaaggtcttccattgccaacggaggaaagaactccaaccacttacatggatcctggaattccgctatctgactgtcagggagaccaaagctacgcataatctcccactgataaacttgtccacctgctttcgatacagccttggacttttttcctttaaacttttccggaggtgcaccatcatttgcatcctctgcctccacttcctcggttacttgctcaacagcatttgaaaaatttggaggatttccaaactgttggatctcacgtgcaagtttatcagctgaggccttgatgggcatacccgtgcaatgaaaaccaaaaggaaacaacacattggcacctcttaatctatgaaaagctgaagcaaactctaactttgagagagagaatgcatgtccaatatgcaaaaaaccattcatatatgggaaagggaaatttccaaagaacttctcatcaggcttaggtggcttatcaccagcttcagccctgaaaacctgtgcatcttcccaccaattccgaacctgtgtctcaatgtctaaaagacggtctctcctaacaaaacttttcccaccttcagacgccatatctgaaatctgacagaagctgcaccacagaaatgggggaaactatataaatacaggtcccattgaggcaaaggtaatcctccaaaataaaccagactaaaataagacaattaacacagacaacaagatacaaattactcgacaagtggtggaaccggttgagggaccctgtagatcttctcataagcaaagccatagaaaatatggcaacattttgaaagttttcgggcaattgtgtacgaaattacagataattttccaaaaaaagtatcataattggatttcaaatccgcaaaagtcatcaaccttaaatgtagttgcaactgtaactaagcaaaaccagttaagaaacgaaagaaagcaaaatcatacgattctttcttcatacacacaaaatgacgaaaatggagagagagtgagagagtaccttcgattcaatagagaagagcaaatggcataacccgtagagttgggcagaatgagcttgtgtcgaagcgtatgaaaagccagcggagatagaagaagaagtagagagcagctaattgaaacaagactcgttagggttctgtctgggtttcattcagaatttcggatatggtgcggtgctccccacctttcacttaacctgtgccttctctttcctttttccaattttgaataattagtattttaatttttctcattcagcttttttacactgccaatttatcctctttatagtatactgttcgataataatactctccaaataagtaaaatgcagttattccatcctcttctatttaattttatcatcaaataaataaagtagtagataataattgattaaataaatataaattaaatacatttaacccttttatactataataattaaaaaattaaaaatataaatataaattattataaaaaaaaacttttatactattattaattaatgtaagtgaaactatttacttcactcatttcacgattaaatttagaatgcatttgaaaagccacaggtgtaattgaatttgtggtgtaattagaggtaattatacaatttagcat

SEQ ID NO: 266206 - DNA, 581 bp, Cannabis indica
ttggaaaattgagcatgtaacatttgtgaccatcctattgaaatatggagggtgggctacttttaagaagtacaggttgggtgaaccaagcttgttggaacttcttcaataatcgatccatggaaaattaaaaggtatagaaatttcccactttatttatttatggatgaatcaaattctcttataaaaatatagattaatagatcatggtagtgtacttctcaagcttggttcccaaaaatttacgtttcacagcggaattcactttgtgtatttggttgaccactttcatggatttcttgtaaagaccgcttagctttaatttgaaaattagcaaataattagggtttcattatgaaaattatttattagtgttgaattatatatttatgatgatttatttgaattcaaaaagcatttttatgtcatatatagaaaattcatattttttgcatgttttatgcccgacaacattgaaacgcggtgtttggctattaaaatcacatcctagtatttttagtatagctggacaataaaattagacattggaaatttcgcgaatagtcgagattttagaattt

SEQ ID NO: 266207 - DNA, 411 bp, Cannabis indica
tctcagtgaggcttacaatcctgacaagtcaaaagctaacattcaaatgagcctcaaagaaactctttgttaataagaaccgcgatcgtcacaaatgctgcattaagctttcaaacaaaggagcgacaaggcgtactttgtcgaccttggaaggataagaaaaaaaggctccagctcgctatcacggtcactggaaccaagctcctgtcgagacatcccagaacactacaattaaagacgtgtttaaatacacgatcattttgacccagtaaaagcgggagaatcacagctgtgcgattttcaagtaataactgcaattatattacgtgatatgtaatcaaacccatgatttcagggggaagaatgttgtaacgattatagtcaactttgtaattaactgcctactatgtg

SEQ ID NO: 266208 - DNA, 619 bp, Cannabis indica
aatatgtggataccaattagacaatttctatattgatgaggggccaaatagaaatagtcaaaaatattgccaacaggtttgtctgttggtaatataacgggtaatggtccccatttgcatcgtatctttatactcttgtatccccatcaccaagagaaaaactttcagagaaaggttttgatgcaaattggaagatcatactaataaagatcatttaaaggtcgattctatggactccggtacgcttccgctattccttaatcttattgtttgattctcttgaattaattagggctatattcagagtttacagtattctaacatgtggtatcaagagcatccctaaattaattcttgaggatttatagtaatattgatcttccattattattttttttttttgtatttgatgagtacatgttttattagttataattgttgtatatatgcgcgattgatcgatatgtgattctgcatcttttcaatcgtttatgctatcgcatatatatttatagcagtcgcatatgtatatttaaatatactacttttgttttcaatcgtttaaggatatttaatggcatgggctgtaacgccctaatctatagggacgccacgtgtg

SEQ ID NO: 266209 - DNA, 482 bp, Cannabis indica
caactaggtggggggaccatgggtatgatatttcagcttatgttaaatgagtactccaccatttattttcgtttggtcaagcttacaaattatgttcttgacgacaaagttgagaattctcttgcaggttatggaaactaaaggttcaacctctgtccactctataaagaagtcaacagccaccactgcgtactttgctccttctcgccctgtacggagtgccccaatcaaataaatcccccatattgcaaatgggtaaggcgaggtcatcattcttagttatgtgggtggtacgcgaggtatatgtgaaaacctttgacactgatcacatttcttgacaaattcatgggtgtcctcatttatagttggccagtaatatccttgtcaaattatcttctttgacaagctttgccaacctgcatgatctccacaaaagcccttgtggatttctctgatgatctcgtttgcttctatgggaagaa

SEQ ID NO: 266210 - DNA, 653 bp, Cannabis indica
ttttttaattttttttaatcacaaaaataaaagtaaaatgtgtatttttaaaaaatagaaacgtgttctataatcacttttgttttttaatttgtaaaacagaaaataaaagtgtgttatataatttttatttttattttttgattttatttaagtcgagtctgggtacagggccgtggttcgagtccaggattggggccgggggcggagttcgtcccgaggtcaaggttggggtcgaaatctaaaatattgattaagaaaaaaaaaactctttaaaaaaattgtgaaagtgatttttaaaaaaataaaataaaattttcattcacaattaaaaaaattaaaaattaaaaacagttttataaaacatgtttttgggaaatatattttacttttttaattaaaaataatattatcatatgcactctaagatttacgaagatatttagttatatgaattgttgagaaaaatactaattaatctttctctcgtggaggaaaaaaatactaagagcatgtttggtattgttttctgttttttgttttcaaaaaattatttttagaaatgagaacaaaaaacactttttaaaatttttaaaaacaagtcatgtttggttagtgttttttaaaaacaatattgaccaaaagtgaaatgg

SEQ ID NO: 266211 - DNA, 857 bp, Cannabis indica
atcacctacttcttgccacatttcccacgtgcccacctacttttttttctatttcccacatgcccacctatatcttctcacctatttcttctccattttccacaccctaaaacgaaaatcttaactctccaaaaccccacccacgcctccgcaccatcgccctcctctctcgccgtcttcctccctctctcgatctccatttcttcttgtctctctcgtccatcgatctccacccacccctcctcccgtcggtctccctctactcttcgtcgcatacgtcggaccaccaccacctcccgtcggtgtccctctcatcttcgtctcatacgtcggaccaccaccacctcccgtccgtctccctctctctctttctctctctccaagctcggtataaatacatttatttatttatatacttttttatttattatatatatttattttgttattgtataaatttaatgtgttttaaagttagttgttattgtaacaaaattaattagttattttattttaatttaggtaaaattataaagctaatggaggaaaaaaatggcagaaaaactgtatttttttttacattcccggcggtttaaaactgtcgcctataacagggtataagcgacggttttaaaccgtgccctatactataggcgacggttttaaactgtcgggaaacccacattagcgacggttttgaattgtcgcctattatgcccgttttacgacggttgtataagcgacggttatacaaactgacgagaatactttaaacgactatttaaagttatcccattttaatagagaacatgtctttcctttcatagcttactttttttttatttttatttttttaa

SEQ ID NO: 266212 - DNA, 637 bp, Cannabis indica
tgagccgcttcatctcacggtccacagacaaatgcatccccttcttcaacatactgaagaagtgtcaaaagtttgagtggtcggacgagtgcgaggaggcattcaaaaaactaaaagaacacatggccaagcctcctatcctgtcaaaacccgttctcggagaagacctgtttctatatttggctgtctccgaacacgcggtcagcgctgccctagtccgggaagaagagaaaactcagcatcccgtgtactatgtcagtaagcgcatgataggagccgaaacgaggtaccccatcattgaaaagttggtcttttgcctcctgatggcctcgaggaaattgaggccatacttccaagcacatccgatcaagatactaaccaaccacccgctccggcaagtcctccaaaaacctgaagcatccggaaggctcctcaagtgggcaatggagttaagtcaatttgacttgcactacattccccgaatctctataaaaggccaagccttggcggacttcattactgaatgcaacgaagccgaggcaaccgcgaatatgccggtaccgccaatccccacatggagagtatttgtggacggagcctccaatgaaaatgggtccggagccggagtggcaatgat

SEQ ID NO: 266213 - DNA, 577 bp, Cannabis indica
gtccctcttcatgagttcatggtacatttactttttttcgtcttttatgagaagaaactcaatggggaaaagaataataattaacagtcaagcgcaagcatcagtgtcttgtataatatggtaagcttgccaatggggcagagggcagggggcagggagatatggtggttggatggagatgtgtgcttatccaaaattttagatattttcttattttttacaagaaaaaaacatacttgtttattattttaaataagatattttttcattattattaatttattgttgagagaagcagttaaaatctgaattattgtgtctcaatctctatatcactgttctgttaactttttttttttctttgattaaaacttgccttcattgaaaacgaaaaagaaaactaacgagtcagatgtctcccacaacagggggtgactccctaaaaccagagatgtttggcacaaccgattctctctggcttgtgaggccaggaaatccgccaaactattcaaattacgggaaattaaaaaaaaaaaaacacaacagaactaaacttagaggcaagtaacacaaacac

SEQ ID NO: 266214 - DNA, 565 bp, Cannabis indica
gggcccaagttatttcaatctatacacaatcaattctatacaccttacaaatcataaaccaaactctatcctatcttggatctttcttggtaagtacatgttacacctcatttttacatccattttatttcatcacaaaacctgctactgttcaaagactttccctgccatattttcccatttctcatcttccaacggcataaacaagggctgctattgtagcttgatacaccaattttcgaaacttggagagcttggctctttgcacccatctcagcaacatcggaaggctgttagaagtagcattccagcccaaccaaccctttatttccttcaacctgctataggaaaagcaacactcaaaaaagaggtgttggctggtttcctgctgtgtttcacaaaggcagcagctgccatctatttgcagaccaaatttcagcaacctatccttagtttttagtctattgagcattgctaaccaaagaattatacagtgttttggagtattcaacctaccccaaacttccttgcaccagtttagtttggttggagtaggagagaacac

SEQ ID NO: 266215 - DNA, 507 bp, Cannabis indica
ctatattgatattaactaaaactgtaatataccaacaagcctaatggtaaataattagtgtttataattatattatgggttaattaagtaataagtgggattatgatcctactaatctagtttaacataaattttaaattttgatataagtggataaataagcgtaatttataaattacggtgatttatatggtatagtgaatgtaatatgagttactagtgtaataaaaatattttcaagtttgacaaccttggagactcgatcgggggctagaaatatcataacgggtttaattgatagaactggtgggaatatcgtgataagttgataatataagtatttgggtaatttagagtatgtgggatttgacttaacgccataaaagtatagattttttagtgactaagaaataataagataattataaataataaagtttttattaatattattatattattataaatataatattattatattcttatattattgttattattatt

SEQ ID NO: 266216 - DNA, 474 bp, Cannabis indica
aattggtgttgaaagtgatgtttagtgcaattgtcaagtgagatggtgattttgagttaaatggtgaattgtgaataaatgatgtgttggatatgttatacttggtatattgaactgttctggaaatgcaatttaggtctgaaatggttttggttcgagctcgggaagaaaacccaaaatttttctggtctgagagcaaccggtcgaccggattggttctggtgtatcagaaccggtcgaccagttacagcagggaaaatttcttggtttttttcggaaccctgttttggctcggggttgaacctagtacctgcctttgaatgattttgagttatttgaattattttaaagttggtgaaggctaagtctaatcggttttaaattagggttttaatccggaattttaaattgaggtatttattgtgtttcaattgtcgtgacataggaccgggattgcctagcttgtttttccac

SEQ ID NO: 266217 - DNA, 1000 bp, Cannabis indica
acaatatcatatactgatatactgatatacaatatgtaatagggcttaccaaacagatctctagtgtcattttatcaacaagaacattgttcaagaaaaaacccacaatcatcttaattcaaataccacaatttccacacaaaaatgagccaaaatagaaataatctgctaataagaaaaacctacagcgaagaccataattcaaactttggaatagtcactgtcacactaaccgtccgctaagaaaagaaaatgatagaattgtacctccaaattgacaccaaaccgaaaaccttgtaactctttacgaaacttgagaaacagctccgatggcatcagattaatgttgtacatctcatcccaggatgtgggttcttcgccattagagcccgactccatcttctgcaaaaataaaaaaaataagataagtgtcgtctctagcaatacacaaatatatatatatatatatatataatcgaagcatacaatgaaacccaataccaaaataataattaattaattaattacaaaagttgttcaatttttattttatttcgctctacgagctaaattccaagtggactcagccgaataaacacgcccccttttgagaaccagtgaatattttcattattctttcaactaattaaacaaaagttatttgactcaaatcccaaatttttgacacaaaaaggagaaaaagaactatactcaaatggtgttggagtgagaaaactaacttaccagtagctgtcgtgtgagtgagagtacacagttagctgtcgtgtggtatagaatatgatctcttcgcccacggttaggtactgctgtgctgctgataacgattaactaatgaccaaggatagatgtcatctaatataatttttttaaaaaaaatattaaatgtattagtatagcttaaattaatattaatgatatattgtggtaaaatttaatgaggaatgctactgtcagcctcctgttataatttcttagtcaa

SEQ ID NO: 266218 - DNA, 823 bp, Cannabis indica
gagtgacttttgtcactctcatgcccaagtgaattttgtcgctcttgaggcccagtgactttgtcactcccatggtcgagtgacttttgtcactcttgtggctgagtgacttttgtcactctcatggctgagtgacttttgtcactctcacggtcgagtgacattgtcactttcatggccgagtgactttgtcactcttaaggccgagtgactttgtcactcccatggccgagtgactttatcactctcatggtcgagtggcattgtccacttgtggctgagtgacttttgtcactcttgtggctgagtggcttttgtaactcttgggacagagtgactttgtcagtctcatggccgaatgacttttgttactctcatggctgagtgacttgtcactcttgtggccgagtggctttgtcactgttatggctgagctactttgtcttgacgagtcactcttgtgcatcttttggttggatggttgttttgacatacattttttacaagtgcttctcctctcgttcgttgaaccttgcatcccatcgatccttctttgtcatttatgaagtaagttttcttatccttgttgaaaattcttgttgtttactcattccttatttgtacaagttttgtctttcttataacttagaaaatcgagttgcatgttacccctagagccgttgtatctactttgtttgcttagtgaaattttgtattttaatattcccagtttaattatttaattaagtgattaattaaatgcgaaataatgaaactaggtctgaaaacagtttttcctatagttacagaatacaactctgta

SEQ ID NO: 266219 - DNA, 4665 bp, Cannabis indica
tccatgaacgccctgaggtcacacttgcttcttcacgctctattctccccttgattgtggtttgtcatatttcccccactggggtgtgtacgagtcctctctttatgggtttgggaagaacgctggtgattcctcgcaggtgacctacgttcccccagttgtgtcccagggtcttcctcatttccatgaggaatttcttgttcattactttctggttgcctcccattctcatttctatgagagggtgctactcatttggattttcagggggaatctcatattccccaagttattcttcctgagcattttcctgtctattggttcgtgatccataaggtctgccccatggtcttctcactccaggttcaggttaattttgagtgttattcccctatgtcgccctagctgcgactgcatcacgctctaatttagcgttccgccgttgtgcctccttcaggcggcatctaaggtggcagttttccatttcataagtgccctctcccattggctgagcacctccacgattggatcttcatctcttattccagaattttggccattcccatgatgagttctcctcgaagtcaaaaggagtggtaagaaaagcatgctgagtggcagtgattttcttagaaatcccttgcagggtgaaagccattgcctcaggatccgtaccttgtgaagtaaaaagatcagagtaaaactgaacaaaagagttagttatatcatttaaactggtgacttcggaattgtcatccaaagtaagggacttgatgaaattagtgcgttttctagtggaggccctattgtggaagtatttggtgttcttatcaccagctttgagccggttggctctggaacgttgtttccaataaatttcttccttgagcatgatgttttctagagtacgttgaaggtcattggctttttgaacctcagaaggagaaatagtggggccagccaaaagatgttcaatgtcagattggatacatttaatgtgccgagaaaaattatttttatttctacccgaagacgacattgaagcagtacagttatgttgctttgagagaaaactaaggatagggttattagggttagtcgtgagggtatctgaagtccaattattttttacaagatcggggaaatcaggttcaaggagccaatggttttcacagggaaaagtagagttgcgtcgaaacatcatggaattgccctccagaaccactttaagggccctatggtccgaaccaaaaaaacccagatgatgaagggaggtcgtaggggaaaggttgttccatttttggttaacaatggcccagtctaaatgctccaaagaggtgccatgtttccaagtgaagcggctgccagaaaagggaagaggggagagagagtatttaccaataaaattttgaaaataatgcatagcatgagaggggagtaaacagtgactattacgatcattaaagccaaggtaatcattaaagtcaccaataataagccacggtgccaaaggggcaacatcaaaaaagcgattcaacaaagtccaagaattgtgtttattagaaacataaggggagccatagtagcaagacaagtgaaaattattattatttatagtaacagtacaatcgatatgatggagagagtaggataaaatattcacaatgacatcatctttccaaaacaaaagcaagcctccccctaagcctagtctaggaacctcaaggacgttagcaaaatacaacttggccctagaaacaaaagtagaaaaagcagtgagtttagtctccataacaaaaaaaaaattgaggctgatgctgcttgcagaggagggagaaattatggaatgctcgggaactccctaatccacaagcattctaactgagaagactcatttttctcggtagggttgctgagcaacacccgccgtttcctcattgtcagacatggatggaacaactgcacagtcagaatgagaggcacgagcccgtttcagcatgctgcgaaccgaagaacccacttggcagttctgcctagtaaaataccgcttccttgtggtagtaggggcagatggagtgtcaatgattcgaagggtagacaagggtggattgatggatagtggcctggagggttcggggtacataggtgcctttcctttggatgtggatggagtgattgtggaagtcataatgggacgcgatggaagagggcaatggacagtggagtgtgtggaaagtggttgagtggagatggtagtcatagggacgggtaaagtgggagaatggacaaaagtagtgtgaggtggagggttaacagtagggagggtaggttcagccatagttaggacagtgaaatggtccacgtttccctggaggctagcatggccagtattggagagagagggttgttcctcgaaagggatataagtggaaagttcaaagatgctttttttgtagatggacttggcaggggcacgtagggtgtctttgtagctaaggctaggaggaaagggatgatgatcacagtgatggaggaacttttcacacttattaaaagtgtgatccaacttaccacaatggtagcaataattatgaataccctcgtatagaagtttgagccacttggtgagggatagctttcttaaatggacattcaagcctcggtgtaaaggtttggtagtgtcgagaaggacacgaacacgcatagaaggagtgacaacatcacaaagagaggcaagatgcacctcaataagatcgccaatagtgttagcaacaaattgagccaggccataggagcgagagccaaatgagacataatgaacctggacccagagaggaatatagcaaagttgggtagggatgatagtatcgaaggcatcaggaatggcaaaaatcatgagggatcgatcgaaatgccatggttgaccttccatgactctacgacggtcaccctcacaaccaaattgaactagaaaaaggccagagtggtattcagaaaaggaaaaagggcagcgagcaacccaatcttctttcatggctttctgaatccaatcaactttcaaaggtttggggataaaatcttaacaaccaaacagaaggagtgagattggggttctgggtgaatggacacatggtcaaaatcgtgaacaaggggttcttcgtcagtgagttaaagagagtgggaatcagggagagtagacatggttattaacaaaaatggtgaagaatagagggtaggtgaagagagaaaaaccagtaagggatgatctgaactcaaactacacatccttaaatagaaaaggaaaaaagaaaaatacctggaataaacagagcgtggaagacggggggatgctaagtccatcctagctgatggaggcctagatcctcttctgcccagcatcagagcaatgattcgcctccacttgagaatggcgtttggaattgaatgcatgaagggatgagggggagaaggagagccatgggatttctggagatgcaataaatgagagtctcggtaaggagaaattgggggctgcattaaaaacttgtaatgattaatagaagatattaaaggaaatagcattaattaagaagtgagagttggaggagagagagaaaacgacggttgggagttgcaaggagggaagagaaactggatgaaccagagaagagggccctaaaacgttccagagtagggaaaaaatttcaccaactttttgttgttgtatgtaacaacatttgatatttactttttgctaatgcctttttttatacttggaaattgttgtcagtcagctgttacactcacagcttcattaaattaaatatcataaactaattatgcttgttgttgtacgagaaaggcagcctccacaccaatgtcctcacatcctctaaaaaaaagttaaatgaattatgctactaatataagacatatatacttgattcttctatgttataatatctgtcatttttatagtatagttaattaatctttctcttgagaaaaattaggtcatttttattgaaataatgtgtgttaactaattataaataacatgatataggattcttcctatgattgaaaaagttataagaggtccaaaccaaagtcactttgcagcaagaagtttggtgttgactttctctactaaaacacaagtttgtactttggtaaatagtgttagatagattacaaactaatgagaaattatacatatttaatataactcttgctgatacttatttactatgtggttcagggggacaatataaaatattatttatggttggttcaaactttgatcttttataattacttaagtgtgttttgttgttgatactttaattttgataatatgtataaataattatgtatatatatgtgtgtatgtatatattttaaatttatgattctttttttgtcaaaaaaattataagattaaaaagagacgttcttgttggtatgttaaattattgatgtgatattgtatttattttggtcgaaattatttggtttcagatttttttttatattttattagatgtttttgctttagttcataaccgaagcaaaaaaaaacaattagcgtcgatgcactggtttttgcttcggttatgaacgaagcaaaaatacttttttgtgcttcagttcataactgaagca

SEQ ID NO: 266220 - DNA, 516 bp, Cannabis indica
agtgaagtggttaggtgttgagctagcttaaatacatcctttaccataccctaacccaagcctaacattactagcctagtaaagtcctattgatcaaggagataagtttagactacattagtggagaggagtgcactaatctaacttatggagcttaaatgaaaaaaaaagtttaaggtagttgtaggaaaattcaaagtgttggtgggatatacttgtataaattgttgagtaggtgactttggggaggtgttaatgtgatccaatgagaaaactttaaaagggaagcatataaagttaaggcaaacacattttcctattccatttatttccattttttctgaaagcatcaatgttcgctaggtcaacttgaatttctatgaaatctctcatttgtcttgtgtgttgagtctttgtgtaaaatttgttgttgtgttttattttgtttattttgtgttgtcattgctcgaggacgagcaagattctaagttttggtgttgataactctaagattta

SEQ ID NO: 266221 - DNA, 812 bp, Cannabis indica
ccggtattaatcattaatagcggcggatgtgtcagtccgccgctattaatgattaatagcgacgggctattaccggcggattaataccggcggatgcccgccgctaatgggctttaccggcggatttcagtattattaccagcggactgttccgcccctattaatggtgtttgttgtagtgcttatttgcttcattggatgttgataccataatagaagttcatgctcatatagttaaggtcataataaacggcaaaatatattgtattatgatcactcaattgcagctaatggaaccttcaatggaaccaataagcttcttattggataattttttattttaatttctcaataacataatttaatatatttataatttttagtttactttctaatgactttgagtagtcggtgtatagtttgaatgaagttaacatgtctaccaaaaagaaaattaaaaattaaagtctattgtctttgcttaaatttaattgtctggactatgttctttttagtaacatgaattctttcataattttagtaacatgagtggatcatcgtcaaacatgagaaaacttaattggtatgcaaatatttcagaggagcaacgagaggcaatacgaaaaaaaagacgtgatgcttatgcttccaagaaacttcgtaagattgtcttcaatggttagtttatttttatcttgtttagtgctcctttccatattaattttatatcaatttcttctaggttccagtttcagttctgtgtcctcaaatttaccttcaaatatcatttctccttctgtggtaacattaaa

SEQ ID NO: 266222 - DNA, 571 bp, Cannabis indica
ttttttatgataaataagcccccataaaataaaaatcctaggtccatcactgatgagaattatgggggttctatctcaaaaccaattagtgatgagtagagtagtccatgttcttatatatatggttcaatactttacaatttattccatgtgggacaatattcataatactatggtgttcttgtatgtgtgtgagagagagaggagtgtgtggtcagtgggtgtgtgaaaaaagagtgagtgtgagtgtagtgtaatcagagtaaggaagaagtaaattgagatagtgtatactgagtaaaatttatttatttcacttttttattattttgctgcgcttaaagtttattatttttccgaacaggtgctaacaagtgagatactatcagttggtgcaaatggaagtagaattattgtaactactcgtcatacaaaggttgcagagattactggtaagaaccaactatatcacttagaggagctacatgaaaaggaagcttggttactattccaaaaagtggctgtgagagaagaagaagaactaactgacccggaaatgattgagattgga

SEQ ID NO: 266223 - DNA, 569 bp, Cannabis indica
tcaactacatggcccaaggctttagataaatacttcagcttaagtctccattatgggctttaataaataactattaataatcagaacatttattttagaaacaaatacaaacttgtactattcttataaataccactcttttacatatcaacagaaatatcattttatgtaatcactacttccacttcgagaaaagaggtaacgtagtaataaaaatatttttgcttatttcataccctccttaaaggaatttcgtcctcgaaatttacttacttgagaataactcggagtaccgattctgcatgtccttctccaactcccatgtcgcttctctataagaattatcactgcacaggattttgactaagggtatagtcttatttcataagacctttattgttttttctatcacgcgcacagggcgtgccatataactcatgtccagctgcaagttaaagttctcgtatttaagcacatgtgtcggatcaggtatatacttctgtaacatggaaatgtggaaaacattatgcgttactgctaatgtttgcggtagggccaaacagtaagct

SEQ ID NO: 266224 - DNA, 1350 bp, Cannabis indica
aataaaagaatataataattattctttttttttattttatttcattccatcctccaaccaaacacgaatcttaaaaatgtatatataagttctaaagaatattatttctagcttcccaaatattataaactaaagtattaagaaaaacaacataaatatctatctaaactttgagtgcttataccttttcacccgttttaaatagtgacaaagctcattttgattagtcttcaaaatggcccaagtgatgaatagagaaactttaatctctttgctatacttgcactggaagaataaatgttgaaaattgtctgtacgtagcctcttccaacaagctagccaagcaataaatttacggttgggcgcgctctacctgtcctagatgaaggaaaaccacttccttttcacagtacgtatcttttggccataatcgaaaacacatgttggagatgctaaatcgcattcgagttaattcaaaatcgtttattttttccttgatgagattcttcatcatgactatttttttctagtaccaactagagctctgtagagcctcatatccccaccaatctttatccttgatacactgagtgaatccaacaaattcaaaaattaacttttttggtggctatataccctaaacatataattctgcataaagcctccacatttcaatgctctatatctctgaatccaaatcctccattaattttaagttgataaaccgattttcaattactttaaggctgacaaaccaagccttcactactacaaaattggtcatccatgaccatcaaagttggtcatgaaatacccgttcacattcttatcatgttggaaatgatatcaggattattaaataggtatttttcaagtttaacaattttatgtctaacattgttgaacgtgataatgggaacccactagaatacaataattacgactagttttgttggacatgaaatgtaatatttttatattattatatttcattaaaataaataaaaaataatttaaatattacaaaattttgtttgttttataattgggataattgcggtaaaagttcccaaaaacttagggttaatccagattaatccccaacctcaaaaattggcggcaatagtccctaaggtcacattttttgtaagtctgttggtccctaaattaactgatccgttaaaacacaaataaaatgccacgtgtcagtttttaattgattcaaataataatttaattaaaaaaatttaaaataaaaactaaaaaaaataatttttttgtaatcactaaaagaatattttaaaattatataatattttttttcttacttcgtcttcttcacgcctccca

SEQ ID NO: 266225 - DNA, 2739 bp, Cannabis indica
tttgttatctatatattattttttattgttgctttgatgttattttttggttattttgtataattttcttattgttttcgtagaaaatcgtaaaatatataaaaaaaaaaaaaactcttaaaaggtaaaaatataattttttgtgttttatgtaattatccctacattttatttcaataaaatcagaaagcccaaagaacgaccataggtccataactgcaggtattacatggtagatttcatttgttgctgtctaacctaaaaatgttaccatattcaagatacaaatcatgtatgaaatatataatattttactattattattctaagctatgatattatatactgttactccattacatgttgccattttaaatttacatataaacatgggcttcctctaccataggagcaatgaatcactaattctttctatgaacaaattcatcagatgtggaaagtctgcataagcagtgaaatatctaactacacaacctactttctctttacagataaataaaacctcaacatatcatcagccttccattcccttattttccttttctgactttcttgataaactatttttgctcaaccaatcaacagactgaaatttctgaagaactcttttcatcacacaatcaatcatcagaataaactcttttttattatcaaggaagagacttaactcttcgaagaacccttgggcatttcttcttttcctctgccggaatcacattttccataagctgcaaaagaaaactacattagcaaaggacatttgtatctgcaagaaactcaaccaacaccaaacgcttttaaattttcttaacaaatataactactttcattttttgttttaaccaaacaattgcataaagatgcattcactgcattgctaaggtgttcattaattgcagcacattgtattacttatatgcatgcatacgcaaatgcaaaatgatagttcaacttcaaaatataatagttttagagcaaactcatagttcatggtcccaacctgttgaaacctttgctgcgtccgctcaacctgtattcaatttacactagtgtcaaacttacaaagaagttaaagaattgagactaatataccattgaaaataaatttacactcgtaaggatttgtaaagaacaataatccacagcatacaaacacaacagaacagagcattgctgttttctgataaacataaaacacagaagcaacaacacgaaaacaatatatcccataagagaaatgctatagagcccgagccaggtggccccaattttctcccaatccaagtgtctacctcatatccttatacatagtttataatctgaccaaatttttataatttctacatataaaaaaaaatcaaatggaaattcttcattaaacaatttttcaacaatttcaatatatttgcttttcactttttttttcttctcttttaattatttccacttagaataaagacaattacatgaagcatgattctgtgatattttttcaattttaatatgttttttaattttttttctctaaattgcaatcttagtacatgaagctttatatagtgttgcaaacaaagggacttgaataaaatctctaaatactgtaaccacagagaaggaaaatgggcagtttacaaaaagaaactaaacaatgactgtgccagaaggatacatcagatgtagctctttgaaaattccgttgaatatatatagataaattttaatttcagttgaagagttgattaagtaaaagaaaaaaaaaatctgctgtgttgaaatatcgatttttaaatcctgaagaaaatttaataatatgaaaaaaaataaaaactagaaggaaatggtgaattttttaacccaattttttttactctctataagaaatgagaaatgatgagatccacaatgaatttcttaacttataattttgattcccaatcattttatcactgattaaaagttatcattttacattatatattttttccctactgtatttttccttatttcttattgctgtttataaacacaaatcaacaaaaaaaaagttttaaacacttattttcaagaattatcttaaatctttattttttaactaaatggaaaaaaaaaaaaaatagtagaagaaattattagagatatcatgatagatgacaaaacatatatcaagaacgaaaaagaagaagatgaagaagagaagtgagggcttgaggagagagaaagacataatgaattaataaaaaagaataaatcaatgaggtcaatagcattgaataaaactaaataatgaattaataaaaaaattggttaaatgatacactatatgatggacgcgtgcgagacacttggatcaaaagaaaattcaggccacttggctcgggatctatagcatttctcatcccataaccacaaacccattacagaaaaatctaccataattaatgacaaaattatacaggaaaaccaaaattgcaaatttgggtgcattgtctggcaaatgcatgacttttttcagaaacaaaacagcgacttatattacagagttaataatacaaaagaatattaagcaaaaacacgcccaccgaattatgctaataagctaaatcctaagtggtaattattgttaggaatagaaattctgtataatctttaactagtttctagatgccctgctggcatatttctgttattgtggtgatcattcgtcacgttctctgtact

SEQ ID NO: 266226 - DNA, 974 bp, Cannabis indica
aaacagttagaaagctataacggatagaacttgaaggaatgcatgtgagttttccattctaatctcatcaacttcaattcgattcaattgaatttgaattaaactgttttggggtatacaaaaagagcatctttttgaagaacatattaagtgtttttgctttaccctttttttccgggaaagttgtttatcaagcatcgataattgagagatagtatactatgaaaggtctagggatatgtaaaaaaaatatgagcctagaattggaatcttagcattcttttttattgggatgatgatatggtgagaatggaggaatagttgattgggttatattttatgcatatccaaggctcacttgtcttgccattgtctacgagtgcctgcctgtgccagtggtggtcagcagcaacagcaacagcaggtgcaaactagtacaatacacctttgcaggaaatttcttgtcttctcactctgcacactttttttttggctgaatttacatgtattttaatgtgtgtctcgaacaagaagccaacacagcaaacaaatcaatgtatagataggctgctccctcgttcatgtctgtttccacactcctttggggcaaaggctgttttaatttcatgagtattgaggacacgaccacaaacactttaaatagtcgttggcagcctcaacaaactgatttacccaccaacatttcaaatggcctatcttatctaccatatattcataaaagagggggaattttcattgttatagttttatcctaaaagttgtaaaaatatgtttttctttttgaaaaaaaaaaaaattatgggaaaaatttataaaagaactaaagaatatatggataaaaaaactgattacttaggaaagtaactagctaccctaaactatttttcttttggtctaattaggattttttcttccccgaacttttgtacatgtactaaatcctgtcctctaaa

SEQ ID NO: 266227 - DNA, 636 bp, Cannabis indica
tgtacgcactttaggtaaattattgatcgaaagtatatttgttaccttagtaacttacatcagagctatttgatctaatttgatcctttagcttaacatgaaataaagcaaattgcagacataagaaactagactttaaagtggtcagcccgacctgagtactttgtttctaaaaccttcgtgcgtagtccgcccagaaggccattctcttagaagtgaatgttcatttagtactttataatggtcaacccgacgtgagtactttgtttctgaaacctttgcgcgtagtccgcccagaaggccattcacttagaagcgaatgttcatttagtacttaaaatggtcaacccgacttggtactttattggtagtatttccttaaatgttctccattccagtaccgtggtactagaatgagttgcattttttgtcatacttacctaatttgtatgctccagagtcgagaacttcgaccacttgatatggtccttcccaattaggtcctagtacacctgacgtgctgtctttggtgtttaggaatacccttctcaggaccatatctcccacgaagaattttcgagctttcacttatttattgaaatactgagctactttttgttgatgggctatcaactt

SEQ ID NO: 266228 - DNA, 546 bp, Cannabis indica
gtattgaccaatttgcccttgggggtttttattctttttaatttatcttaagggtaaaaaggtcttttctctagggattatttgtcttgtagtgaatgagggggctgactatacttggttaagttatatttaatttaagagtaaattaattaaaaaaaaagggaaaaaaggaggaaaaacctagaaaataccttagctcttcatctttctctctctctctccttcgaacctcactcattctaacccaaattcagattttcatagctgaattcaggagcaatcaagggagttgaagcttgtatttgaggtattatgatctagtctttctctttttttagtaattcttaagcctaggttaggttttgaagtaaaggttataggatttatggagctgtggatataattgttgttttaatttgaattctggagattgcttgaggttatttagatggatttggattatttttgattgtggttgaaaggttgtagcaaggtttgagtttatgaactcaaaccttgacctctaatggtaatttgaaattttgt

SEQ ID NO: 266229 - DNA, 586 bp, Cannabis indica
tatctatatatataaaggagaaatatgaggcagtgatgtggcactctaaaatcactctaaatacctctatctattatctctttaattctctcaattttttttaattttttaattaagtttatagatataaataataaatattctattttatatatataattaaaaaaaacttaaatatgtaaccttatattttctccaattttaaaaacatatatataatcctaaatatatacggctaccctgctaccttgctaagtgtcatttttcttctataaatttgattaatattttgaagtttttttattctttcagtttcgcaatagtcataaatattgtacttttaactgttaccttgctaccctgctaaatattgtacttttagggcacaaaactcaacaaactcccacttgcactaatataaaacaaaaagtgcatttcaaataatctcaacaccttgatatacaaatcaagtgtagtatgtagtatactctccgtaataggatctgacaggttgtattcaacacaacttttcctccaccattacatttccttaatcacaaaatctttgataatgtgaaattcctct

SEQ ID NO: 266230 - DNA, 779 bp, Cannabis indica
aaaaaaaaacgcaaaaacaacaaaaattataaaaatacagtttatacggaattaacaattattttaaaagttttaaattttaattagtatatttatgtgtttttatggttatttttttattaatttttattgtttatatattatttgttgttgtttttttaatgttttttttaataaataaataatattttaagtaatttttgataaataatattatttataatgactaggagacatattttactttcatgtatataattaagcttctttttaaaaaataataatagtaagtcaacacgtgcaaatgacatcttgttttcactatgggaaagtcttcaattgttttcttggggtcaggaggactcaggtcagaccccccctcgttttctgatatatatgcatttttttaatcaaggcaggtggtaaggtactgctgctcctgttttctcatttcagactcagagtacctcctcatataatttgaattgatgaaagatgccttcttcttctcaataatttcttctattttggtagttgtagtagtacatcctctcatagtaaaataatctactatattcctggctttactctgctcatgggctatactataatgtgataatgtgacattttaatgtcttacttgtgataatgtgacattttatatgtcacattacatgccttaagagatatccaacaaacttctttattaatttgatagaaaactaagtatcccaaatgaacactttaaatttctatttaaaataaactaatagatttgt

SEQ ID NO: 266231 - DNA, 747 bp, Cannabis indica
actactaaaaactaaaattcaactggaaatctaatttaatttgcataaaactaatgtcctcacttcagtttttagatctatgaaagacagatctcaaattgttgaactggagttcccaaacaatccaactcaagtataatcccaaaaaaaattacatcaatattatagtaaaatgtttatcttggtgtatttttgttgttttccaaatttctaatggtgaatttattcatattaaatcattaagagacatgtagatagagttacgtacgtggaaacactgttatgatttttaatgtttcacaacagttgcattacagttgcctaaacattttgctaacagttatttcgtctgattgaaactttcgtctgatgcaaccttcagccaaccacccagcaactacccagaaactttcgtctgattgaaaccttcgtctgatgcaaccttcggccaaccacctagcaaccaccctgcaaccatcgtctgattcgtctgatgcaaccaccgtgcaatcacgcaacaactaccttgcaagcatcgtctgattgtataagtgatgatagtgtaagtggtattttagtaattaaaatcacataaaaggtataaatgttgtctttaccttatggaggtatttttgtaaataaaatgtcaatttatattttttatgtaataattccaataaataatgtatataatatatattttttttttataaaagatgaaactctcttaaaattaaaaaaaaaaaa

SEQ ID NO: 266232 - DNA, 599 bp, Cannabis indica
gactgatgactgaccctacagaccaacacgagtgtttccagcgtgctttgttctcactcacacgcttcctaggcaaacttcccaggaggtcacccatcctaaaattgctccaggtcaagcacgcttaaccgtggagttctttcaattcagatggagccattctatatggtgcgcgggaaactggtgctgtcccgggcgctaattctatcacaaactcaatttctctgtgtggtggtaatccgggtaactcctctggaagcacatcaaggaactcagcaactgcccgcgtttcctccagttttctttctattttcttggtgtcatcaaccacattaactaaataccctaagcacccacgctgcaaaagttgcccagccttcattgccgaaataatattattattattaataataaagaaataataataataattatattatttttttaaactgtatatacgagtatatacggtctggttcagtcgaaatttgtggaatgagaatcgttccacttcggttcaaagcgatcttttgcttgggtttaaacacgatagaaattaggtttgagttctattttcgtgcaccagaaacagagaacga

SEQ ID NO: 266233 - DNA, 850 bp, Cannabis indica
accaataaagttcttggacataatatcacagtaccttaattgagtgggagaattttaaaactctaagcccatctttattaggatgacacttgtgatagctagctatgttatgatcatgatatgaactttagaatatagctgagaaagtaaatctaaccattcatatggatagaaataacttatcagaattttgaggataagataatagaattttgcaaagtctattcgaatgacttagccaaaatacctaatcctcaataaatttgttttatggtatcactaatgattacttactcttaagcaagtattttacattaaagtaaatactagattgctatgttgataacttagtctagaaggaacttataattttagactaagataataagtcacaacaagatgtccctgagaaccaatagtaagaggttaaatgtacttctatgtatgaatttaaccagactcctactgttgagtgggagccatctaagatgtaatcaaacaaggaacattaggagatagtcaaggaaaaatctctaaaagtgacctatacgtaagatgatagggatgtatattagaattcttatatgggtgaaggaattattctagaaggatttaagaacccatctatagtaatttaagctccattagtgaagataaataactttgttgtttcgaaaagaactggaaaagtcattcagctgaagaaagttcttactgtgttatctctattccattttggatagaattagagacatgtcttctgtttattcagatgcacttaataagcagtaaagaattcagtatccctagataaataatgcatatagaatataatgttacataatgtttt

SEQ ID NO: 266234 - DNA, 1313 bp, Cannabis indica
aaatgcgcaacaaaatgggagatcaatagttgaatgatagtttaacagtatatctcaaaaagaatgtattcaatgctattgacaacgagcttattattcatcgttttcaaaacatgaaaagtcgtcgaggacaactctaaagatatgagctcaaaaattgatatatttactaaaattttaggatattgagtatgttatatattttgaacattgttttagatttgctttttttttctattagaagatttttagtgcttgatatttaatatctttttagttgagaattgaaatattgagttgtgtttttttttatatttacttgtttttttggaatatttttatatatgaaaaaaattttacgcccaccctccaattaaattctgggtccgccactgctagtagggatgcacacggggagtggaactgggcagagagtgctctccatcgccatcaaaagattttaatccctatccctgcttatttttcatcaggagtggagcgggaaatctcctaatggagacgaggacggggcggaaaaccccctaatataaaaataaagttttttaataaaaaattaaatatattaaatattaaactacataaaaattaaaatattacacattaattattatttaatatagtaattattatctaaaacccaacttaaaattcataaaaatatactaatatactaaaacaaatataaacataaattataaaatattaaacgagtccccgtcaagtcaaggagtatcatcctcgttcccgactcgtttaacattccctacagggccccatccacatggaagaaatgtgtatccctaactatttgtacctaaaagtaatgctaaattaaaattgtatagtgtgatctttatttattttaaggatatttgcgaagaaactcttttaatatttgcatttgttagctttaataaaaagaatagcgacaatagtcttttccgtatttttgttgaacctgttagttgtttgacgttaagtgatattaacgtgtaaatttaaaaaaaaattaaataagtttatagtgtcaaaaataaagtttaaataattatttatcacaagtgtaagaaaaataatcatgtgtgtaatcaaatatttaactcttattttcggcaccctaaactatttaaaattttctgaatatttgtaagacattccaaataactaacatgtacatgtataatgaaaaaataactacaatgttctcatgaataccaaaataaataaaaaaaaatctacaattgtcccaaaatatagacattaacaacttcaaaacttaaaaaactacaata

SEQ ID NO: 266235 - DNA, 573 bp, Cannabis indica
gtttattttacatttacattttacagtttctatctatttgaaaaatttacaccaaatactaatttttttctagactttacatttatactttcctttgttaattattttcttttttactgttttacttattaaatcttcaaaacaaaaaaaacctttttttttgtctttttgatatttttttaatcaattttagctctctttatttttattttcatttttttttaagtcaattgctaactttttttttctttctttttcttctctctatttttctttttcattttttttttcaattacactctgtgtctctctttttaaagaaaaaattattctcaaactaattttttttttatatttgtatatatataataagtgtgtactacaaaaagctgctacttttactgacaactttttagtcacaacataactattctgtgactaaatgtgacttttagtcacaacaaaaagttacttgtgactaaaacatagtatttagttacaagttgtcactaattataattttagtcacaataagtatggcgactaaaaatacatttagtcacaacaaattgt

SEQ ID NO: 266236 - DNA, 888 bp, Cannabis indica
aaaaatacttccatctggcaaaataaacaaatatacagctcaaataaaaaaattacataaataccacttacacacaacttcaacccatgatccatgctttttgggcaactatcgcgcaaccatgtaacaacccaactcaattgaaacgaaaattcaaccaaaaagagaaccaccattaattccgacgacttcacctgaaaagacgaccagaatcaatcaaaacatggactgtttcgaattcatgaaaaaaaaaatgtagaaaaattactacaaaactaaaattttactggaaatccagtttaatttgcataaaactaatatcccgacttcaatattcagatccatggaagacagatctcaaaaagttgaattggagttcccaaacaatctaactcaagataatacaaaaaaaaaaaaattaacatcaatactatagtaaaatgtttatcttggtgtattttcgttatttttcaaatttctaatggtgaatttattcatattaaatcataaaagagacatgtagatagagttatgtacgtgaaaacaatgttctgatttttaatgtttcataacagttgcataaaaattttgctaacagttattttgtttgattgaaaccttcgtctgatgcaaccttccgccaaccacccaacaaccacactgcaaccatcgtctgattgaaactttcgcctgatgcaaccactgtacaaccacgcagcaaccaccctgcaaccatcatttgattgtgtaagtaatagtgtaagaggtattttgataaatttaattacataaaaggtataaatattgtatatttttttatgtaataatttcttaataaaatgacacgtttttactaaaaaaaaatacaatataaataccatgctaatg

SEQ ID NO: 266237 - DNA, 588 bp, Cannabis indica
agcatgccttagcattagggcgttacatgcaaacacctccacaacagcacgacaaaatcatttcaaactttctaaaactctagattcgcctattttaatgtacccgtcagtagcatctgctggtacaccatatgccaacattcgaaatacagctgttactttttgtaaactcgataatccaagtttaccaataccatcccttcattggtcaaagtagtcgtcatgcattgttattgcatcgaaaatacgaaggaataaaaaatgacccatccgaaatcatcgtcgaaacatcgactctgaaaattgaggattctctgcaaaatagtcactgaagagattgcgatcagcattttccggatcacggttgataactatatgaccaggaattgagcctcgatgtgatccttggttattttgattttcagtgataaaaaaattattcttagcggtgacttgacataccacttgtttttctagttcatcgtaataatcattatctgaagatgacgaagaagatgataaataagatgaactaccaatatcagaattcatttttttatggaaactaatttgtattatatttttttt

SEQ ID NO: 266238 - DNA, 810 bp, Cannabis indica
tttctttgatttccatgatcattaaattttgagtactggttctggtttttgttgcatctcttgtcatcgtagtttgatctgaaaccagactgcgtcttcaattgactgcaaaatcttttaatatggccaatctttccacattgataacattgtcgattgtctttgatatttgacttcgatcttgatggtgactggttgttccttgatgatcctctctttggacttcttcctcttgcaagataggcttcttctttcctagtctccttctcgagttgaaattcaaagtcctttgactttaatgtcgcatgaacaccctctaacttgatcacatccctgccatacttgattgatgctttacttcttaatatgccattggcaatgatttgagcaatatgattgtttgactttttgtctaccttatgattaatgttggctaaaccaataattataaagttatcaatattatcatctaagaaagagaagatttcattctaaacacgtattatctttcaagaagattaatgttgctcgagatagatggtgccatgtatagctgctctagtttgttccacaatcattttacggtcttttcttaggttagctttcttctaactccattggacaggtacatgatgatggtgtagtatgccatctcctccaattctgcaatttcctctagcttcttctcagccaacaacttttcatctctgagtacctttgccaccttttggtgcacaagaatacacttcaaactctctcgccattgtgcaaaatcagatcaaacttttctagttcgaaccttgccatcga

SEQ ID NO: 266239 - DNA, 3983 bp, Cannabis indica
tagtcccacaaatttgaacttttgatgtatacatgatgcacctattttacccacaagttgtcttttttggtggctacaacccatacatacttccctagtgcagcttcattccataacattgtattcctcaatcctaaccctccttcatttttgggtttgcatagccgattccatgccacataacctggggagtttgattttatcgaacctttccataaaaaagatctacaaatagcattgatcttgcataagatcaatttaggtagaatcatgatttgtgcctaatacgaatgaatcgtaatgagcactgcattgatgagtgcaactcggccagcgaaggagatgtttcttgttccccaaatgcaaattttatgcaccatcttctctattatagattcacattttagggacgacaatcttttagcacatataggtatccccaaatatttgaacgaaaggtcactttggacaaaatttgaagcctccaacaccctttgaacttctgtatccttcatgccacaacagtataaagcagatttcgattcatttgggtataaacccgaagtcatagaaaaaagctttaggccttgtaggagataataaatagatttaaaatccccatgacagaacaataaaacatcatcagtaaaacacaaatgattaagctttaaatcagagcatctgtcatggtatttaaaatctatttttgatcccacttttgctaaaattcgagagaggtattccatgcatagaacaaatattaggggggacattggatctccttgtcgaagacccctcttagcttcaaaaaagacatgcattaatccattaaaaaataagctaaatttgggagttttgatgcataccataataatttgtatgaattgtggtggaaactccatggcagccaccatttcttcaatgaatccccattctaaggtgtcataagccttcctcaagtctagctttatcatgcaattaggcctagcagtctttcttccatagtgcttcaccagatcttggcgaaccatgatgttgtaggctatgtatctcccttgaatgaaaccagtctgattctgagcaactaattcagggagcactgttctcaatctcctacaaatcatcttcgtgatcactttataaatgacattacagcatgcaatcggtctgtagtcgctaacactatcagagcattttactttaagtataagagttagcgaagtacaatttaactccttcaaaagcttacctgaatgaagaaatgataagacagctatcacatcattcttaatgagatcccagttgtcttgaaagaaatagctactaaaaccatctggtccgggagcttttcatctaggtatgctaaataaggcttctttggcatcttcaactgtgtatggacttaaattaaaaaatcttgccattgttgtgttagtttcggcccctgcagcattattttcaatcttactggttttctgctagtcatttttgttcccaatagattagtgtagaactttaagaaagcttcactaatctgactaggttcctccacccgattcccttccatagaacaaatagaaaagactttgttctttatccttctagctcgtaagctagcatgaaaaatggttgtattgtcatccccttctttcatccattgaactttagatttctgatgaaggaaagaaaggtaagctttgtgtgtttccccatatttcttcctagctacctcttcttgtgagcataatctctcatttagtggctgttgttggaaagcaatctagcttgtaatcatgtcattatatgcctgtaaatctgcagcaccaatatctcctactctttctttgttccacactttaaggcccttctttagaatcttgagcttgctcactagttgatacatcggtgtcccccctatttgctactcccaacttctttctactagctccagaaatcctcccatattttgccacatccgaaaatatttgaacggttgtctcccaattttgacctcaggataaactgttaaaatagctgggcaatgatcaaaaaggccttccgtcataaaaacaacctcagcattttcaaacttactcaaccatgactgatttgccaaaactctatcaattttcgaatatatccgagaagaaatctcttgtttgttagtccaagtgtagaaggatcccgaaaatttaacatctttcacttgacatgcttccacacactcctggaaagcagtggaggaactcaattttacctttctccctactctctcctctggattcaaaatatcattaaagtcaccaaggatgatccatggatcctttatgcttgctggaagacttttaagatctgcccaaagtagttttcttccttcctcatcattgaaagcataaaaaaaagtcaccaaagaaaattcttctccacccattttccaaacttttaaatgtattagttgactagtacaattcagtatatcaactgaaaacatcgctggattccagcttattattattcttcctcccttatgccatgcattatttcaagagaaacaccaatttgaaaacatagccatgtaaactttccccgaattttgagctttcacccgagtttcaaggagcccaacaacaccaacttgacatttagaaatcaatttcttgacttccatttgtttattatgactgttgatacccctaacattccaactcatcactttatccatgtaaactaggaggttctccccctccttatgtatactctatagtcctttcaaccccctgtttttcctccaaaaattcaatttttgttgctgccagaatctcaaaggcattcgatgtctatgtttgagtgtcttgaatttgtcccctactagccgaggtagtatctaacttcactgcccttttattactctttctccctttgttctgaacttgttggaagccctctgcatccatctttgcttctgtgactttttccttatttttctcaatgttcttaggcacccaaatagctttagtttccttcgttgtcctacatactgacgtgccatgtcccagaccagtacaattaccacaaacaatcggtagccattcgtatttgaccataatatcaatatcttgttgcaattcattgcgaaaagatatcatctcaggaaactcttgaaacaatctaacttcaatcataattctaggaatattcagcctctccttctttttagttatgtcatccaacatgatcggtttccctagttgttccacaatcttgaaaagagccttttctccccaataccttagttccaaaccatggagttgaatccatattggagctgaagcaacatcctcctttttataatctgtatatggctcccacggttttataatgataggctttttatcaaaaaacataaaacccccgttgagaatttcatcccttgtgttaagagcttgaaatctaactatgaacacccctggtttgagtaaacccaccttgtcaactcctttatcctttcacattcttcttgcaaatccttcaaaaggaccaagaggtggattggccccaagtacataacagttgttggaaatattttaccaggatctagatttactaacaagtatgtttcattaacatcctaatatgaattctaaaacaataaaataaacacatataaagtttaagaaaccttacattgggtgcagcggaatataatgactccttccattcagatctctagcccttgattcctttctgtagcagagcattatcaagatctgaatctggatctctttctctccttcctttgatgctgattctccttcttgttgtttggattctcctacagtcttacacactatgattgagataccacttgatgtgtgtgggcactactctatcactcaaggattttgaaaattgaagagaggaaaagagagagagaagggctggctatggctttctctgaaagaaacaatgtgcaaagtcatgag

SEQ ID NO: 266240 - DNA, 1274 bp, Cannabis indica
agttgcacgtgtgcctgttttattttgtacgagtgtaactgccttttgtaaattttatttcggtattttaaattattcaaaatttctcgaaaacatgcagaaaactgcttattataactataatgtacaccgtcaacactgttatggtaaaagcaaaagttagaaagctccctataattttacctactcattgattatattatatatgcaggaaaaggtgtaggaagtatcatctgaaaggagagaaaaaaggaagtgttgagcctttcattgcctacttgccaggttttcctgacaatattcgttatgatggggaaggtctttactggattggattgtcttcggtaacttaaactataaaaacaacatcatcattaatcattatcacaatcatatgttgtgtttatggtctcttataacaacaaataatgttgttgcagggagctagtcaatcttggaatttggcactgagatatcctttcattagaaagcttgtggctctccttgaaaggtacaattgtagaccaaagatggagaagaatggaggtgctttggctgtggatttagaagggagacttatttcacattactatgatcctggcttgtcactcatttcaactggactcaagattggaaatcacctctacttaggctcaattggttatccttatattatcaaactcaatctactaaatcaccctgcacaaccataaacatgtttatgttgtattaaaaagcatatttggtatgtttattatcaataaaaatagcattaaacatagtgacacaaacatatatttgtgcgagttagttcaagaaaggcttcccatggcctttgctcttaacctcagaatgaacttctgtactttcccatttgaatttgtaggcaagtactcatcgaaaacgacagtctttatagccatataatgaggcaaacgatccttacaaaatgtgataagttggtcttcattcacaccttcaaatccttctttgagtgttacaaaagcacaaggcgtctctccccaatggctatcggggcgtccaacgacagcagcctcaaacacggcctcgtgactatacaaaacagtctctaactcaacactgcttatgttcaaaccccctgatatgattatatccttcattctatccttgatttctatataaccatcttcatatttcaccccaagatctccactatgaaaccaacctcccttaaatgcttcttctgttgctttcaagtctttaaagtaaccactcatcacagtgtttcccct

SEQ ID NO: 266241 - DNA, 4147 bp, Cannabis indica
ctagtgtagcattaaccaaacctttccatctccatcactatcaaagcaacgaatcatatcagccaattccttgtctgtccaagtaaaatcatgtgcagtggctactctttctaaatcttttatcgtaatccctcccttccaattatctgtgtcaaatcattcaatagaatttgccactattagtactttggtattaagttcattttcttcaaactccatcatggatggcattcagcattttacagacacaataaagttggtaactttaccatcaaactggtaaaaatggactagcagttcatcctcagtcatctgcagccgactagcaaactgtttcaccagttgaagaaattgagaacgataggataaaaagcaaaatgagaatataatagatgtaaatgtattataagatacttctgcacaagaaaacgaaccgattttttcttcatatttcttcttgaatcttccttattactctgcattttctccttcttttactgatatgggaactctttgaaggttccccagaatcttgtagggaagagcaatggcctgcaaattgattgaataaaaactaaatggttttggctgacattatgttgaaattcattaacatgtcgatatttaccagtttcaatgcctcatcttcatccatgtaatctgaagtgtcgaaaatcttttccacagggaattttcttattagacttttgaaactttctttttcacctaaacgcaaaatcaacaaacatgggctagaacgattaactcaaacaaactactaaacagtttacaacttttgtttcttttttcaaaggaaagatttaagtgtatatgggcacgaaagtacctttcttttatttgacacagaagattttggacccaaataatcctcctcatcatcatctccgttctcttcccgatcggcagaagaagtgggttcctcctctagaggcttataatcatcatcgtccttttcagtaagcttggctttgcccttacccttccgcgatttctgagccgaacccattaaagacgaagccattttggacagacccagagcctccattctagccctgttctccgcaattctcgatagcctctgtttctcgtactctgatgcgccgccttctttcccttttccatcattattggcgggatttctgggttcctctgaactcgacctttgaagggtttcttcttcttcttcctcggattcagaaacaatggaatctagtttgcccatattggactcgtttggtaggttttttgtgtgattactgcaacaaatatctaaccttagaatacaataagatttttggtatcactaaaaagcttacattaacaacaaaatctacagcatattttttctttatttaattaaaattatattgtacggggaagggagttcatcacaaattataggtgtataattataatttaatgtttttttcctttcaaaatgacatataatttaatgtttgaattctatattattttgcagtttttaatgaatgtttttttaagagaaattaaaattaaaattcattaaattataatcttaatttttttttatacaatattcttactattaaatgaaaattttattatttataaaataaaaatatgaaatttggtgatgcatgaagattagatagcattagcaaatagcaatatttgaaaaaaaaataatagagctctattgatttttccaaatagctatatatgtcgtttatcacttcaaagtgtcaatcgcatgtcgttgttacattacttaagataaatttaatttagttaaaataaaaaatgtaataatttaatttattatttatttataaattaaatttattattattattattattagtttttaatggtacaagttcattgacaatgaaatcatcgccatcaaaagctcctaaggccagtttgaacaacatcctcattacacactttcctgtgccacaggaggagcattcgatgtcctaaagattcaactttccaccaatgaagacgcttctgaattcaacctcggagcttcatcctctcacggcgacgacgtctttgcacgtggaaatcgaccgttgcaagcttatccccttctcttgttcatcccttcgcgcctccccatgtcgctcactaccttcaaaacccctcattctttctcgggccacctctaatttcggccaaatgggtctgttcctggacggctcgaaagctaaagggaccttttggtttcgccgaaaaggcgtcgtctcgccccatcaacgattcattattgctgtagctcaagcccagccggatagacttgacgatgataatgaggaacaggtttgttttgaacgaaaccaaaacatttgatctttgagttgtatgggaacatgagttcaaatattaacttcaataaatttgtaggtttggataaatttagagatttctatggagcttggaaagtttaaaatgtatgttgttttctgttcatctgattgatgaagattgaaaagttgtgatatttatgctgattgagattgtaatggaatttagttagattgaagctctttacaacttattttctagtgttttggtggcacacatgtataattgaaaagatatgctgaaatgggtgtgttgtaggaagttgataaaggccaaacaacatcgatgagtatggatacggcttcagagagccaacagaaatcaagtcaattaaaaaagagaattgtttttggacttggaataggacttagtgttggggctgtagtcttggctggaggatggcttttcactgtggcttttgctgctgccatctttgttggttctcgagagtattttgaattggttagaagtcgtggaatgacttcaggaatgactcctcctccacgatatgtttcgcgaacctgctctgtcatttgtgctctcatgcctattctcaccttgtatgatcagtaacagccctttatttatttatgttttttgttttcatattgattttcactgttatttatttttctcttgtaactaatcctatttgaagagattgtaagatgcagaaactgcaattagattctcatgtcaagaacctttattaattattttattatgtgcataggctaaaggaacaacctggtatattattaatgctaattactacaggcttcatctagaggtatgcaaagtaaatttatattggttgctgattagtgtttgtaattttttttctccaggtattttggccatattgatgtttctgtgacattagctgcctttgttgtagctatggcactacttttacagagaggaaatcctcgtttttcacagctcagtagtaccatgtttgggctattttattgtggatatcttccttgtttctgggtcaagcttcgatgcggcctggcagcgccagccctaaacactagtaaggggttgagtctatgcacttaactaaaaatttgtcttttatatcttatacataggcgatgcattttccagcttttatcttgttactttcttgactttgtatgcgttttggattaagcaaagacgaaagattattgataaggaattgtcccattgtattttctgtgtatatgttaacgcatgtatggtctagtgaatactctagtaagggtctgctttccatgatttacttgtattgtataaccaacatttttttatcactttggcagcaatcggagcgtcatggcctattcttcttggtgggccaactcactggacaattggtcttgttgcaaccttaatctctatcagtagcatcattgcagctgacacgtatgcatttgtgggtggcaaggtattcagtcattcaaagtttctgtaaagatatcattatttcatttcatggtctcatataactgcaatcggggctttattattttgatacttgtgaattgtattctttcaatggccctggtaattttgaattctgccatcagagtggctgtggccaagatccatagttttgggaataaatatcttaataaaatttctaattcatggaaactaaatttgatcaagaactagtcaaactcaaaatcatgcatttgtaattgcttcagtcttttatgcattatcagtgggacaatatataagggacttgtcaaaaaaaaaaaggaggataacgctgcattcg

SEQ ID NO: 266242 - DNA, 1096 bp, Cannabis indica
gaaagctgaacaggagtgagcttgagttgggatgagaatgtacatgtcgaggcagcgcgacctggagtgttcagtcttgggacatctggggttatattttgtagtcgctgtgcgacctggatattaattattttggaatattatgtttaaaagttttaaaacgggatcccagaacttgtaaatagtttgtaaattataaagtttaatatttattataaaagttatactttgacacgttttttgagaaaaatctttgattagcaaagatagcactgtaattgaaaaagcactgtaatgtgccataggattagggcgttacaattttggtattagagccgccaggttgtctaccgaagcttgccaagacatgtacaatcttcatcagagaaagctcagttcacggttcagtaagcccgtacatgtttagtattataagtgattattaatgtatgatacgaagcatattagattataattatttattttaagtgtgttgcctttaagtccacaagagcagtattacattttatgatcgctgtctaacctgcttggcttatgggttcacaggctaagtcctataaaatggacgcccagtagaatacaagaagtcagggtaatatggttgagaccgaaggcggtcagggaaatcaaattccccagaatccccgtggtcgcagccctggccgtggcagagctcagggtggtcgtcctgtaaatccaccaccagctcctccagattgggagtagaggtttgcagaaatgcaagaccgaatccgccagcaagatcaagaaattcagagattaaggcagcagggttttcctgctgtgcctccacagcaagctggtcaggtcgttgcagttccagcagtgccagcagaacagcctgttactagcaactgtatggagccgttaaatgaaacgtttcgtaagaaagcacctctagtgtttctgggaggtcctaacgtaatgaaggttgagcagtggctcacagtaattgagcgaattttgaattttatgggggtggttggtaatgatcgggtgacctgcgcctcatttcagttccaagagcatgctctcgtgtggtgggagttgataa

SEQ ID NO: 266243 - DNA, 461 bp, Cannabis indica
cccgagtatgcgtccataaagctcagaagttcatgacctgcagtggcatcaaccaagtgcggtttactatacactatactctagtgtgtgattttgatttggatcacatatgtggatatacatgtagtaaatgtgttgtgtataatttaattatacatgactgggccgatatgtaataacatctttcatgaacgtgttgtttaccatgaaataattattcatatcgcaataatgatcattagtagattagttttaattctatgtatacatgaactcttatttgtgttcattaagattgttgacctcgcttttagccaacgacaatgagtcaaatttgtaagcaaaaagtagtataatacgagtatgatataataaagcaaataaagacacaagaatttatagaggttcagcccgacgcaattcggtaattgcctaatcctcgtagtttgtattgacttaag

SEQ ID NO: 266244 - DNA, 535 bp, Cannabis indica
ctaggttattaattttaagaatttctaatttagtccctcaataaattagatatattgcttagggtatctacacatttagtgcatgacactttaatacctaataacccataattactaaaatgatcactttattttgggccaaacttcaaatagcaagacactaatattcatatgagcctgtattgagaattttaatccaacatgattattttatttagaaatggaaggaaagaccattctaatgcatgatgagaaaaaatttaataatttttttatcaatttttgtacgcattttaaattttactccattcctattctttttttcattcccctttttattcttatattttcattcctctcaaccaaacgtcacttaaatatcaagtcaatagtcatataataattcgtgattgatttagattattaatttttatttaaaaatttattaaaatatattaataaaaaataacacttgaatattaacttgacgcttaattgtaaattaatatttacagaaattttataaatataactt

SEQ ID NO: 266245 - DNA, 897 bp, Cannabis indica
gatctgagtcaggatttagttcagggtgtaagtccttggttctgatccttgtctgggtttgagtttgggtccgggtctagctttgggtctgattctaggtgtgagtttgagttcgggtccgagtccgagtctgtgtccaggtttgaacctcgatcttcgtctaggttcgggtccatgtccaagttggggtcctgagtgcgtgtcaagtttgggtctaggtcaggatctcggtccaaatctacgtccagcatttcgatcccactctgggtcttggtccgagtccaagttcgtatctggatccctatcttggtctaagtctgtgtttgggatcgtgtcccaaatttaggtacatgttcgggtgtcagttccgggaccctgtccaggcccgagtttcagtcccagtttgggtcttaggctaggtctgtgttctgttctcagtccgggtcttgttcacagtcctagtcttgttctagggtcctggttcgacgattcttgttcaagttctaattttgggtccaagctctaagtctgggttcttcttctgggttctggtcctagtttgagtcccagatctaaacaccgcctactggtctgttccaggaccagtgacccgaatcgcgagtcaagatctggatcactgtcacgggtctcggtctggttctggtttaggtgccaggtcccatttctgagtttgggtttgggaacgagagttgggtacggctttaggtccgaccctggttttgtgttcctagtctggttccatgtttgggtttgagttcaggttcgcgatcggctcccgagtctaggtttgggtcgggatccttgtccggctcccactttaggtctaggttgttttggagtccgggtcctggtctggttacggttctggatctacgt

SEQ ID NO: 266246 - DNA, 1218 bp, Cannabis indica
tttggtgtatttattatattatacgtcgtttaccgtagtctgccaacagtggtattttgtcgatttatgatatataatatgatatgttgttaagttagaggtgatattcaatttatgcaagattaattaatttgtgcttttaacatatatatcttccggttgtaaattaatggagtagaattgtaactgcgttcgaattaatatcgatattggaataggatttgtataactatatttctaccttaccaagctctttatctgatcatcctctttctcatttctaatattattattttttacttcatttcaatttctactatattttatttatactaatttttagtactaatttgcctccctgtggatacgacatagcccgtgtactaccgcaaccatattttatttatactaatttttagtactaatttgcctctagaattggtctggtcaccgtgtcttgaggcatggtttcctttcctcttctgttaaggttggtcagcagctttagactttttaggctattttgtggaaggagtgttctttgcttcttcaatagtgattcgtttgcctttgtctttgcaaacccctaaagttccatgatcttttagatctgctttgcgtcagttgttggacgagcttgtatgtcaggagatagtttagttaggagagtgattacagccttcattatggtcatcttactgagtaataactcattgaattgatcttctcgtgttaacctgctttcggccaattgaagttgtcttgccatgatgaccacgtgatctgactcatcaggttggctcttctctccaacgtcatcatcaacaactttgtcctaagggtcatcttactgcatatcctctggtacatctttggtgttaacttcagcctccttagagctattttctccagatttggcatcctcaatgatagtatcatctcgattctgatctttgtcctgcaggcctttcagatgactaattacctcttgggggtcactagagtccccaactttggcaccaggaccagtgaaacaaagaatagacttggttcgggtgagagccatgattacttgaacagaatctgtaagtgctctcactccttttttcagctctcaatcaaagcaccaaaatatttactgagatttttagaaacaaaatataaatgataagaattgaagaacaaataatcaaaagagaaagagtaaaaagagacaaa

SEQ ID NO: 266247 - DNA, 1607 bp, Cannabis indica
aaaatacagggtctattttgttatttaacaaaacaaaaagtataattgataaatttttcaaaacacatggtccaaaatagtatttaccaaattttttatgttattttgatagtgttttactattatttttatgtagtttttttggtctctttataaaataccgtaatagtaacaaaaaaaaaatagaatttttatatatatatatatatatataaaaataaaaaccatttattaatttttccttattttataggaagaatattctatgaagattttaaaaaatttcattctttaacaagctggattaaatataattcaacttcattggcaaacaaagtgaagcttagattagtaagtgacatttcatgattatgacatttctgctctatatgactttcatcaatatatgtgtaattggactaaaataattaaaaaaaaattgacatttcatgaatcttggttttttataaatctcgattgccagattatcccagaatagtcattcattggttttcaattttcaattttcagaatgaaaaaaaacctcaggtctttttcacacttaattggacctcatattaatattacttgtattattaatagttgtatatatcacaatcattttaatttttagactactggaatttctgtattcactgcacacacacacacacatatatatatatattaatttctcaaggttaaagttcattgttgtagaaaataaatgaatgatatctcaaaagatagtaccatatatatacttaaatcataataattttcatcaacaatgaactacaaatgtatttgttaattcgaataatataaataaaattgaaagatatgtatacattacaattaaaaaaagatacatgcttgttatatatattaaagagaatgggtagtagggtatgaaaggagagcagcatatatacctaatctttaggtgtgttgtctgcggctagttgctgagtaatatatgacttagtttcacaagtttctaaaaagtgggaacatatattaccattttcacacaccatgctatatattacttctatatatatatgtttgtgtggattgttttgtatggcacttttgtacttaatttcttgtaacattataagattccaaaatgataaacctttattattattactttgaaaatcatattacaaatccttaggagtgatttcactctcattttattatgtatgatcatatattatattggcatatgatttgtagtgttagcttacggtaactaaataataagttgtttgagtctctatcatatttatttacgtacacaccaatttgaccatgagagcattttactttttataaaggggaaaaaaaaagaaaaaaaaaattgacttataagagccgaaaagctttgggcaaaaagttattaggtttagcttttcataaaatttcaactactactactatgccttcccacaactttttcctcaaattccacacacccaaacagagagaaagcacgtgagtgaggccataggattggaaatattggtaaattaataatattaataataataattttccaaagcccaaggtgagtgtactacaacaatttactgtgtatg

SEQ ID NO: 266248 - DNA, 538 bp, Cannabis indica
aagtcaaacttctttcaaaactacaatactaatctttttcttcagcccttacttatataattacataaatatcctttcacgttgatattgaaaaaatattgtgcacttacaataactttataaccaagtatatcaataggattattcctttgtctttttttttttctaaaaaataataataaaagccaactattacattttagatccataaaaattagcaaaaaatattaaatttgcttatttaaaaagttcaaatctttttcattttttgggagagaagttgcttaaaggtaattattaaaattatatttttaaaaagtaaatatagtgatatacaacctaaaaaaatatggtggataataaaatttggtattactagacttagatatattgttaacttcattcataataaataaataaatattagggaaattactccacatataatttttgaacttttttttaaaaaattcacggttgggttgctttgttagtttttttggtagttacggtgtaagttgctatacgaattttggtt

SEQ ID NO: 266249 - DNA, 715 bp, Cannabis indica
gctataaacttaaaaggataaaacttgatcttctacactcatttacgatcacaaccatatagttcaaatgaccaatcaatgagcccaaaatttcatatcaacacaaccaaatcgatcaagttaaaataaagagggtgtggtgtgtatgatttcatatagcaaaagacatacttataacaagtctcaaatcggatgaataaaaacgaaatcctaacctaataacaccaaacaaatacacaaaagttacaaattttaaaataaatttatgtctgtaacaaaaatattaaaacttcaaacttaaaaccatatgatatataaaattatatgttacatagtacataccctgaggaggcgaccgaccaccaccaatgattctttgtgctctggccggcgccgccgctggttgttgcgagaggaagaagacgatgactgagaagcaggaggaggtggaggaggctacggtgcttgggagaggactgagggagaacgtgaaaaattgatggaagctgagaatggagaacaacccgttggggaggagagagaaaaagggcttagggatttgattttagggttgagttgactcagattctcaatgaagctttattatttgggttttctttttcacctagctaatatagccaaatttaattttaatatatatatatatagtaaaattataaatatattatcttattctatattattattaataatt

SEQ ID NO: 266250 - DNA, 1376 bp, Cannabis indica
ataaaataaaataattaaaattatcacaaaagaaagtaaatgaacaattaaaaaaaagtactaaaaatcaatttaagtcaaatttttgaaaattcggatgcatttataaattataaattcttgccctttttttcaacaaatggccttgtgtttaggctaaagaccttctagaaatattgtttgttactttggaatgttagtgaaaaaaaaaatattctcaaaggccttcactataatcccactcacaacctaatgggaacaaacaaacacactatcaccaattttcaatatcaattaggtttctttaaaacatatctatacatattgatatttatgtaaaatcaattaggtttaatgcgttgtctaaatacaagtagtgagtcaatgatacaatttgcattaaaattcctaagtccttttctctttgttttaattgtaatagttggaatatgaatatgaagttgattaattatcagagcaaacagaattcatattgatgaactgaatgaatcaaaatcatacattacaataatttataagtcaccaatgaatgaattgactaactttccaataataaattataagaaaacaatttatgatttgatcaaatcataccacttatctcatgttggggttggattaattgttttcactatccacactaatctcagaacaaaaatcttatgtaaatcctacttatcatatcctatccaacaaaatatagtagaatcaagtataattatttgatcacaaactatagatgatacaattataattaagggattaaaagaaaattagaacctctagttagtacttatacactaaacaaattagaatatctgcctaacctaaccttcagccagaacagtacttgactttacaataaacaaaaataaataataataagaccattccacaaacaactcaataacacaagagaaatagttcattcaataactcaattcaggttctcaagttttttaaagctataacattaatcatcacaaagtatcaacccaatagcacacaagaccatttcacataataataattacaacaacaacacacacacaatatagttcattcaaaattcattgtgagaattcatggaaaaattgtgaagaaacaaaatatatacatacataatctttattttactttatttttcaataaaaatcagatatgaatcaattctctcattcaatatagcttgagagaataaacccactagcagaatcaattaataattagaacccgattctatttcatatcatagaacaagattgtctaaaaaagacacatcaaaaaaatctgagtattgaaaaaaataaagaagaaataaagcttaacaataacaaacctatggacccaatttt

SEQ ID NO: 266251 - DNA, 570 bp, Cannabis indica
aatagaattcatattcatttaatcatgtaaataatatatatgttatctcatacagcagctatcttcataacatcatgttgcctaatcaggcaagcccgtgccatagcctgacacccatatgtcgcatagctgcatcacctaatcaggtgagcatgtgccaaaaacctgcacccatatatcatataattacatcacctaatcaagtgagctcgtgccacagtctagcaccaatatatcgcatcgtctaattagacgagctcgtacctacgctcgatagttatcatatgtcactaacgcccatacttacgcccactacatcgccaggaaaattacatcacctaatcaggtgagcccatacctacacccggtactcatcatatatcactgacgcctgtacttacgcccagtacgtcaccaggaaaatcacatcacctaatcaggtgagcccgtacctacacttagtactcatatatcaccaatgcccgtacttacgcccagtacgccgccaggaaaatcgcatcacctaataaggtgaacccgtacctacactcggtactcatcatatatcac

SEQ ID NO: 266252 - DNA, 967 bp, Cannabis indica
aatctttatttgaactcaacattatattcaagactgtcaatgggtgctacacatgaaaatttaacacaatgtttgctgggtttaaaatttatacaagaacatatcatgtgataaataatgggacaaggcatttggaccctatataccatagtagagtgttaaacataaaattgtggtttcataataataatctaaaaatttgagtaaatcattccatcaaatttgatacaaaataatctatagaaattgctaaccaaactagggactagtggaagatttaaaggaattggttgagtgtgatagataatgtagattttttttatttatgtttggaacgtatgaaatggggaatataaaatattcaaagactaaccaaattcgtttgtttgttttcatgaagacttgaatatattccaaactaaaggagttgatgatggacaaatattccatcatcaagacttttcttaattaaaaaccaaacaaagataaatgaaagaattgaattatataaacaaattcaaatctcattctcaaatactcatcttttacagctcattattattaataatctcgccaaaaatgaagaatcttttgcccctcttcactactcccatgtttagctttttcatcatgatcatgtgttgttgctatgttacaacacaacatcaacatcatgctgatctaaatgcctctttctctccgatgagaatgagaatgagaatgtagatgccttcctctacataagctctgctttggttgcaactaaagcaagagtttatatatgaaaacactttttacaatgatctgccttcttacccaaagattgaagttttggaaggaaggaaaggattgttgtgagtgggatggcgtcacatgcagcgccaaaacaggacaacttatgggccttgatctcagtcacagttggcttaaagggtctttgagttccaatagcagcctattcagctta

SEQ ID NO: 266253 - DNA, 792 bp, Cannabis indica
aaaattaaaccatatttttttttttattctaaactactcttttctttttttggttattttaattaaaaactaattattttattagaagcagcagaaaaaaagtttaatttcatcaacatcatccttaaaaaaaataatacaaaaaattataatctaaataatacaaactttaaaaatcaatttcatcaacattgaaaaaaactaataatttcatttgaagaataaaaaaaatagtttcatcaaaaagataatgaaaaaaattataatctagaaacgatactaactttaaaaaccagtttcatcaatattaaaagaatctagttattttattaaaagaggcaaaaaatagtttcatcaataacataatgaaaaatacacaatgcttaataaccaaacttttataaacgatactaaatttaaaaaccagtttcgaacttataaattttataacaatacctaataaccaaacttttaacttcattttttattttggcatttatctttttatttagttcctctaaaaccagagttgatttaagcatacaatatgcaacaaatataacaaagaaagagagaaaaaaaaattaaagacaaaatcataaaaatcatagaaaaaaaaaacagtagaatgtgagaaactagttaataaaataaccaaaataaaaataaacaagtaaaaactagttttctgaaataatcaaataaaaaaattaaaacttaaaactcaattatgaataacaataaaaaaaaaaaaatcagttatgaaaactcgttacttaaaataaccagtta

SEQ ID NO: 266254 - DNA, 1524 bp, Cannabis indica
attttttgcctttggaggaagctttaattgccaaaaaaaattctaaaacgccacagcttccccatccacactaccctcacagtttgcctataataatttaaacacactcttaactgtatactcgccagaagattcaaacccccaataccagtaatccttagtaactgaattagaaaggagaataccaagaatattgaccgccactttctcgtcaaacaaatttttgacaacatcaacatcccaagctttctcacacaccataaaaagactactaacattatcattagctaaattaagatccaaactaccttgactcagaatcgaccaattcagaagccaaggagcatcaaataaaagagtctcctctctattgccgattcccttctgcgcccccttacaaatcaaatcctttatcacaacaagatttctccaattataacttggattattaccaagttctatcgaaaggaagttctcattcttaaagtactgatctttgtagactatagaaaccaacaaatcaggcttagttagaaactttcgagcttgtttatccaacatagctaaattgaaattatgaagaaagtgaaaccaatcccccaacctccttactatgtgccatcctctcccaactcatccacaaaattccttgatggaaattcgtaactggcttccaccaaaaattaaccataagttgtcccaaatcatgacacgttcgcgctggcaaaaggaaacggctcatagcgtaagttggaagactttgagccaaagtaagaaccaagacctccttatcagcatgtgacaagagtttaccattctaactttgtatatgctttctcatcttctcattcagaaagcccaatataaaagacttattttgaccaattatactcgggagatccaagtacatattattctcgtcgggtttattaatattcaaaaacaacctcctgaataaaaccactcacattcctactaaagaaagcggtggatttagtcaaattaatcttttgtcatatcatcctctcaaacttgtgaagaatctctatcacttttttagtctttcttgtgttagcttggacaaatatatagctatcatcaacaaacaagatatgagaaattgacggagcaaccctaaccatacgacactccttcattaattgattatgcttataccgacgaagtaatgccaaaaatccttcagcataaatcaaaaatggataaggaggcaaagggtctcctttttgtatcccttaagaaagaatagtaggccccatcctatgaccaccatgaacaacctaatatctcacctaaggtgtgcacaaattgatctaatccaataacaaccgaccgccaaacattggacatctaattgtgatcagatcaaatttgatgttatttttgaatatccaattgaatcagaacgtatattggttggggtgtccaaaaattcaatacatccaacattcaatcgaactaattaatattttcattcaatttgaataagtaattaaattttatatt

SEQ ID NO: 266255 - DNA, 890 bp, Cannabis indica
cagattgggcagattgtaatttttatcggttttttcagttcggtttgggtgggttattcggtttgggcggtttacaattttttttgtacagccctacttacaatcattaaccacttgaccaaacatgtaaatcatgataatggatctacgtatggcttgtaccacagaaagataatcggtttccaagatcgtgtgtagccattgattatctttaatccaactcaaagcttcgcggatcccgattgcctcaacaactttaggtgccacctagccatgaaacatccttgtgcatccctccagtaatagaccgcttgctcctctagccacttacctaacaccatagccctaggtctcgttaaacaatgccgcattaatgttaatcttaatgctattatcttttggtgctacctattgccttgccccatcccccagtataaaaccagtaaacaaaatattacctgaactttgagcaagtagccattgattaagatagtttttagctgatgaaacaatgctatccacatccaccactttgtttcgccaaactttatcattccttgcattccaaatagcctagcacaaggccaccagcaacttgatacagtcaatatcaagcataaaaagctgcctaatgcaccattcaataaaagataaaccaggttgcacatttgtactaatgcccacccgatcccaacataattgagcagttggataagtagcaagcgcatgtggaatggtttcctcctctaatttacaaaccggggatatatatatatacacaagaataattatatataaatctaaaattatcataaaaaaaaaagacaacaactcaactttaatatgcaaataaattagacataatatattaagtcaacaatctaataaat

SEQ ID NO: 266256 - DNA, 552 bp, Cannabis indica
ttaaaataattataacttctctaacacgttatctagataatttaacatttaatatagcactaagatacaaaattacctttaaatttatatcgtagaaacaaaaaaaatttatatataccattcaccaaaatatatatattaataataataaataaaaaaaatatacattactaatatagatatgtgtatactatactaacaaaattatatcctataattgaaatatatatataccatgacaataaaattatataccaccagtctatataataaaatgaaaattaattaaatattatttaaaataaatatgtatcatacaatgaaaatatataaaaataataattaaatatatatagcatgctaataaaattatatatatacattaaaatatttgtattatgctaacaaaattatataccactattatatacatagcaaaataaaaaaaaaatatcatctaagaataataatatactatacaacaaaacagaaatatactgtacaacaaaatctatataccaataacccacaacaatttataaaaaattaaaa

SEQ ID NO: 266257 - DNA, 1175 bp, Cannabis indica
aatggaataaaatttaaaatgtaataaaaaaaattgaataaaaaaattattaaattttactcatcatgcattggaatggtctttcctttcatttcaaaatggaatagtcattctaccaaaatggtggaaagaccattctattggaatgacattccaacactttaatattcaaccaaacaaaggaatagaatgaagattgtttccttttctttccattctatttcattatctctaaccaaacgccacataggttgtgttttgttggaagtaatgaaaagggtaaatattattttggaccttgtgttttgcaaaaattacacattagaccttttgttttgttaaatgacaaaatagaccctactgaactcccattttgttttgctctgtacctctccgtcaaaaaatcacagttaagtaccacggtagactatccacgtgtacacacttgtacacgtggcaaatttttagtggtccacgtaatattaacttttaaaaataatttaaaaattaaaaaaaatcaatttataaaattaaaaaaatcaactttacaattaaagctgctatttatagtagtagcaactatgaacagagaaggaaagagccaaaatagaatataacaacttgcataactaactaacacttaacagaaaaactaccactaactacctaactaatttctattattcaaacagtatactcaacagttatatataattgtacattaatattttgagtatatggggtacaatcttattttactcagatttggtgagaaagcttttaccaaaagtagaacatctgatgaaccaaggcgatgaggagggatgtactcctctgcaccatgctgcaactattcaatattctactggtaaaactattacagagatgttggttgaaaatgatgaaagtagtgcctacatcaaaaataaacatggtatgacacctctccacatggcaattgccaatgacaattggaatgtaatgaatgtaattatgtggagatgtccagatagctgtcaggttgttgataacaagggcagaaatgctctacattatgctgtcacaactcaagatgttgatacagtaaaagtattcttggaacattcttcacttgttggcaatgatcactggtttttgaatggaaaagatatagagggagatactcccttgcttca

SEQ ID NO: 266258 - DNA, 658 bp, Cannabis indica
tcaacatatacctccatggttttttccaatgagatctgcgaacatcatgttcactagcctctgataagtcgcacctgcgtttattaaaccaaaaagcataactttgtaacagtatagtcctcgatcagtaatgaacgaggtgtgttcctggtcgggttcatacatcgggatttgattatatcctgagtatgcgtccataaaactcaggagttcgtgacctgcagtggcatcaacaagctggtcaatgctaggaaggggaaagctgtctttgggacaggctttgtttaggtctgtaaagtcaacgcatgtgcaccatgagccattaggcttacgcacgactacggggttcgctaaccagttggggtaaaacgactacgacctcgcagggtccattttgcggcgcttttgtcggacacctcgcacctcggggtcaatgttcaagcgataacacatgacttgcggcgatatcccgaccatatctcagtgtttccaagcaaaaacatcaagattttgctataaaaaggtcgttaattgttctcgctgctgaaatttttaatttagaaccaatttttaaaactttgttattatctacaggatctataggtacctcaatagtgtcttttgtggcttgggctgcggcggtgtgatcgaggattct

SEQ ID NO: 266259 - DNA, 2830 bp, Cannabis indica
aaaaagaaaagcaaagtcaaaagcaaaaagaaagtcaaaaaaacaccaaatcaccttctctttctccctctacttcgtggtttcttaaccagggccaaaactcagtgttttccacaattttcaagcctcttcctagctagaattcatcaaggagttcaacccctagctcctccaaacttctaaggtaaaacctaacctaaaatttatttatttttagggtttttgttagttttcagtggctgtttatagtagaacatgttgaataagttaggaaggttatggaatgattattaaggtgatttaggactgtttagaagtggtttgaattgttttgggtggttgtagcaaaagttatgcaagtttgagtttaaagaactcaaacttaacttggttgtattgcccattgtctaacctatatgccttatgtattgaccactgtctaacctatatgccttatgggtttgcaagccaagtcctaaattatggacgcccagcgaaacgttagaggtcaaggcgaaatggttgagactggaggtggtcggggaggttgaaaccctcaaaacccccgtggacgtggcagaggtcgtggttgagctcaaaggggtggccaagaaaatccacctcagcctctttttgattgggagtagaggtttgctaagatgtaagctcgaattactcaataagaggaagaaattcaaaggcttaaacagcaggatgctcctatggtgcttccatcgcaaccaccaactgtagtggttcctgtggtgccagtagaacaacctgttgctggcaactatatagagcctatgtatgaacggttttggaaacatgcacctccagtaattttgggggtcctgatgttttgaaagcggaacagtggttgatagtgattgagagacttttgaacttcatgggagttactggaaatgacagggtggcgtgtaccacatttcagttttaagaggacgcccttgtgtggtgggaaatggtgtccctcacttgagatgtcaccaaaatgacttgggaagaattttaggatctatttaacgccaaatactatagtgaggcagtcacagtgcaaaatagaaagagtttgttgatttggttcagggcgagaagatgtcagttactgaatatacaaccaaatttgattgtttggccaagttggcttctaaaatagtaccaacagattttaccaagaaagaaaagtatttggtaggattgaatgccaaaattagcatgatttggttatcgcaaccgatgataccacaacttatgccgaaatggttcacaaggctctcgagcagaaggtgcagtaaaaattctacaagagacccgagaggccccgagtgctggtacctctctatttttggtcctagtaaggagattggtgattctaccattggacagaagaaaaaaaaaaatttcgactactggtagttcaagtcaaagcaagaggtttcatggaaatcagagtaaagggggacgtcagacttactcctatcatgagtgtcaacgttgcaagaagcatcatcctggggagtgtaatcgaagagcttgttatcaatgtgggctagtcgagcacctcaagaaagattgtcctcagctgaagaaatatgaacctaagcaagaagccaagcctactccagcacgggtatttgctatcacccaagttacgctacagccagtcctttagtagttacaggtcagcttcttatcaacaacttaagttatattgttttgtttgactatggggctacacactcacatgtagcatcgagggtacttagtcagttgggtaggcctagtgatatctttgagataggatttggaaccctgctcctaatggagagttgattatctccagaaaatggattagatctgtgctaatcaaaattgacaacaaagaactaagtgctgacttagtggacttacccttggtagagtttgatattatactcggaatggattttctgtctaaatactcagccagtattgattgtaaacaaaaaaatggtgacttttcaactagaggacggggaaccatttatttatgtcgggacagatcaaggttctcgtgtcccaaaaattacagcattgaaggctagagatttattacgcagtggatgtgtaggatttctagcggttgtgattgattctcataggcccgagatacttggacctaaggaggtcagagtggttaaggaattcttggatgtgttttccaaggagttacgaggattaccaccatagcaggggatacactttattattgattttgtacatggggcagaacctgtttcgaaagcaccttatcgaatggctccagcagagcttaaggagctaaagatacaacttcaggggatgctagatctagggtttactggaccattttccctagggagctctaaatttgtttgtgaaaaagaaagatgggaatcttcgaatgtacatcgactattgagagttgaacaagttaaccattaaaaacaagtatcctttacctagaattgatgacctgtttgatcaacttcaaggtaagacggttttctccaagattgatttgcgatcaagctaccatcaattgagaattcgagaggaagatatttcgaagacaacgttctgaaccaagtatgatcactatgagttcctggttatgtcatttggattaacaaatccaatagccttcatggatcttatgaatcgagtattcaaggatttcttcaataattgtgtaatttgtttattgatgacatccttgtatgctcgtagataaaaacagaacatgagcaacatcttcgcatggctttacaacgactcagggatcata

SEQ ID NO: 266260 - DNA, 1572 bp, Cannabis indica
ttatttttcggtagcccatcacgaaagaactccacggttaagcgtgcttggcctagggcaattttaggatgggtgacctcctgggaagttttctcaggaagtgaggacaatacacgctggaaacacttgtgttggtctataaggccagtcatcaatccatgaagcagccagagtgacatactcgtgtataagagccattattctgtgggtgtaaggacccaatagaggcttgaagtagggacgttacaggtttggaaactatatgactggccttctaacctcaatgatttgcttgtctcagtcgagaagaagaatgagataacaactttgttggcttcgaccatcatagcagaaattgtttatgttatatggtataatcgtaattgttgtgtttttgataaagtttgacattctgttcggatgttgactaatcagattaagcattgtcttaaggctagattttactctagcactatgtcgattcgtaactctagaggaaaatacataatggcctttttaaatagtcttcgatttgttgggtcgttgcttggaagtgtgtattattcagtagtgtctggaataaaattcttttcccttgtttcaaaacaaaagtacataataataaattaatatttggtaaaatttaataaattaataataaaaatttaaaaagaggtaacttttaattgaaataatatttgaaataaaataaggagaaaatatcataagatattataaaatagcataaaataaaatttttatcttgacttgatctctttggttataaaccaaagatagaatagaacaattatatttgtattatcacataatgataatttttttacacatgaacgaaatacctttaacctgtttggagaggttgagtcaataaggactcgtaaatacattgctctaaattatccaagactcttttgtctgcatagatagtttgggcttattttatacttataatttgatctattatttatttaattatttaattagtagagattttggtacttcatctcattacacgttcttgtaagtgggcaaacttcctattagtttgcataattatgagaactgtggggaggtgttgccgaaatttttacaaaaataaaacaatcataagagcatagattgtactatatctatattataaacctaaatgggataggttctttaccctttaagtaatagaatgagaatgtagattagaacacttgcacattttttattgtattttaaattttttattaattacttatagaggaagataccgatctatagaagttagatgactcagaatcagcgctcaaccgagttatgaaatggtgttgacgagcttgttgcagataccaagaaccacttaaaccctttcagattatctcgatgcccttgcatccgtgttttaatataaattttcacacacctaaaaatataagggttcatttgtttatcagtgggatcaaacattcgtacaacccttggtttttccaaggggactttttctcagctagctattcaacttgttgaaaaagacaaagaaaaaatggcagatgtgttggcaga

SEQ ID NO: 266261 - DNA, 859 bp, Cannabis indica
aaaaggcatgttataatgaaaccctgggatccaaatgtaaatttaagaaagaagatgtgaaatgtgaaccaatttggatccaactggaagacctagacctcaaatattggggtcaaagatccttgtttaagatcgtttgtcagttgggcaaccgagtcatggtggattcagtcacgagggaacgggaaagactgaattaccctagaatactgatagaggtaatgatggaccaacatttcccagatatgctggaatttaaggatgaacatggtatgaacacacatgttgggattaagtatgagtgaaaacccattgcatgttctcactgttctggactgggacatttggcagcagagtgtaagaagatttctaaagggaatcaggaatgggttatcaaagcagatcataggaagcaaataaagatggatgaagatggcttcatgaaggtgacaaaaggcagtaaagtaatggggaaagaaagagcatctaccatagtaaggtgactcggggtctggggtccgggtccgggtccgggttcgggttcgggtttgggtccaggtccgggtctcgagtccgggtctaggttcgggtcggattggtgtgatcccaaatcctttgtaaatattataatacaaactaatacggattgtttattatgtattaaataatacaacatacattgtattaaaaaatttggtcgtaataattaatacaatacattgttttatctaaacatagtgttatttattatttaatacaatacgaccgttatacggcgtaccaaacaagcccatatagattacttttatatatttcttcaataacagttacataatatcatataaaaataattataatt

SEQ ID NO: 266262 - DNA, 828 bp, Cannabis indica
ttttaaaaggggaagtttctttgagctgatcgtgtagggtttaatagaccctatttttgtggatttatttctcttttttgaaatttaaaaaaaaaaagataatttcttgtttccctttttagttgcaaataaattttttaaaaagggggtaacttctttgctgatcatatgaggtgttgtgttttagttttcttttttggttcaaatagaaaaagaaaactgcttaatggtaattttatttcaaaaaggggaatatcttgtcttataaatatttttcacctactccacacaatttcttcttcttcttcattgtgtttctctcactaaaacgtgtgtgagtgtgttttgagtttcagagaaaaatggtgaaggccggaagagcatatcctttcaaggcccctgccccatctccagtgtgatcatcttcatctcctctgacttcagtttcgacatcactgccacctgcatcagctctgatggccactgttggtcgcaccaccaagaccaaggctcaaaagaaggttttctctatctccaatgagcatccaatggtgtttcatgacattacttctgatcttggagtcgatgcaccaccatctaaagtggtggtgccatctcgagttgaaaatgttggctcttttttaattgaaccttcggtggtggctagggtaaaggctaagtctggttcatctttgtcaaaggctactagtgttgctgctgggtttcctaaattacctacgaagccaagttgatcaaagaaaaaggagttggccccaaaaagaaaattaattttaggcacatcttcatctccatcttcttcttcatctg

SEQ ID NO: 266263 - DNA, 924 bp, Cannabis indica
tatatatatatgtatctatatatataaagcacatataaaaacgtacgtactctttcagaaaggctgtgactactgatcatagtgagctcttcttccattttaagttccctgttgttgttttcatgactagtagtagttgacaatgtagccttacttcttttctcttctgaacttttaccactctgttgaacaggagaggcagggccatattactataaataattaaaaacacccttatcaccaaatgataacataaactcagctaaccttattaaactgtcgatgatctagatcacaaggttgagaaggaaaatttagaagactctgaatctcatcatcataatatccacattcaaagtcaaacccacctaactcaccatcaaaacctttatttctgttcattttaatcttcaagaccaatttgtatggacccaaactttatatagtactgaagaagaaatgtatagttaggttttgtttttggggttggataatgtgaaagtaatttaattggttttgagatgtgtgttatattgatactctagtgtgtatggtaactcaaagcagacaaggtgtttttactttttagcatactttcaaatttttttatttttatctttttttaagtttgatgaagtgtattgtgaagaatcaattaagtagctagttagctttgtcagctttatagagccaagaggagctataccatataatataaaagcaatatagttaaaaggtaacttctctcttaataatcaactgcattacattctatatataagtagtacagtactaaagagtagtatggtataggcacaggcagagaaggtatctactgtgttaatgctcataataattacacgagtaaattaacaatcacccactactttacccaatttgttcgaatcaatcctttttaattaa

SEQ ID NO: 266264 - DNA, 3211 bp, Cannabis indica
aaccaaacgccatctaagttcttttgcatagactactttccctttggattttagtattaaaaaaaacacaagtaagggataagactagttgatattgtttcgaccagatgcttacctttaacttctactcttagaatgcaagaaacaaagcttttgtcagtaaaaaattcacagaaaatgtagaaatatgggaaagactcacaggttctttggaagacatattatgtaaaactttcatcaattgcacaattatcaaaatgatgggggtaaaaaacacagaaatatggaaagactcgtaagttctttcaaaaaaaaaaaataatagaatgtaaattccaccaaatacacttagatcagtgtgaattcaatggaaaagttaaggccctaattcgatttgagtaagaaatccatgaaaacactccacaacgaacaagatacagctctttgaatcttttaagcccctaaaaagctagacaaaagaagagcttaacatatgtaaaatcctcactgctacactgttttcaagtttcaactctttcagtatcatcagctaaagctttaacgcaagacagtgcattaacaattgatcagtgatttcatgaaccattcaaccattgctgcaatggtgtatcacatactagtatggagatagattcataagttgtgtctttaaagcatgcgatacaattaccaagtaatctttctaataccctaagccaatccaatatttgaactacataatcattgtatccataatgaacaaataatgttgatattaaaatcgagttgttacaaccacttgggcatacctcactccttaaggctagcctaagagggagggtgcccaagtagttatatatatactaccaatcaatcccatacttagttgatgtgggatcctaatagtatactcccctttagagccgacgtccacagtggcccactctgggctttttccaaaggttgccttttttgcgacgttggtcccacttgagggtgcatgattcataccatttgttacaaccactcgggtagaacttactcccaaaagctagcctaagaggagggtgctctagtagttatttaccaccaaccaattccatacgcagtcagtgtgggatcctaacatgagattacaactattcaaatgtctaagataagatccactagaggaaacttcaaggacaaatatgttcttgttttaggattatgctaaatttacatatttagatgtttttattttatttattttttattcttgattgagataagaattttggtaaaaataaagtgaatgtctacctcccacaattaacgtggacgtgtaattgtttgaaggttaatatagtgtgacaccatatggagcacaataccatttgagttggcatgtcatgagtggttatttaaactatgttttacacattataatctaaaatattaacacaatttaatttagttacgtatcacatgccacctcaaggtgctgggcatcatatggtgccttatagcagtgcttgatttttggccaattttgatacatattactttgatacagaatcaactgtggtatgaaaattgactgcttattttaacacttcttttttctcttttgttcataaacaattattattttatgtagagatggtgtgtgtgttttaccttcaaagacctgtctgctccatctatttctgatacttgtattattttcctttctgacttttccccttttttcatcttctatacttgagtgtaacatactgatttcagagttacattgattgagtatgttctttacatgattgtaacatactgatttctgtttcttcaaaattttctacaggtaagacctatgaaaaggtctgcgaaatgtgccacattacccttaataagattacaatttctagtgacaatggaacaatttcacctggtggagtaagggtcggtaagtgatatacaacactaattataagttgccaattaagtttttaagattgtcttttttttccctgattcttgtggacatcactacagattcatgtctcctgcaggataaggatttgaatataatattaacgtattgttcaatctcgttaggtacccctgctatgacatcaagagggtgtttggagtctgatttcgagacagtagcagagtttctccttaaagctgcacatatagctagtgtggcacagagagaacacggaaaatttccaagagctttcctgaaagctctggaaaacaacaaggacattatggagcttcggcatcgtgttgaatcatttgcaagtcagtttgcattgccaggatttgatatttgacttgaaagtgcaagtgcagttctgtaggatgaccgttaatgctcctgagagtccgctccacttggttgtccaaatattgtgctgtggcttaccaaacatcatttttgtcttctccctgattttgttggactatcatgcaaatgccaacctcttactgtcatagtaatgctgggagaggtcgggcgatgaaatcaggacaatttttttggtaaccgatgcacatttcattacagaagtggattcaggagtccagtccagtggcggcaatgtggccgtgatggacaaggtaattacagtgtctagtgcaagtatagttagaaaacccttgcaatattttgaatatggcatcaagattttcttggggggtttcttattcaaatttgttacagtagaggcaatgttgggtcaaatatctctttttgaacccattacattcatctctattcttgcttataaaagataattgtttgtgtacagcaggccggtcttgtctgtcctgaaatcttacatgaaattgaaaatgggactcaaaatttgagcaatgcaggtttgacctgtactttattatataatatgtatttaatatatttacggagatctttattattttagtgttacattgttgcctaatttagagcttagggcgatactgtaaaatccaaaatatgagttgatttttcaggtaaagctgcagctgttttttctctcttgctaatcattatctaacgattttaatcgacatgtccattataatattatgagagaaaaaatatatatcaagtagaaaaagtaatttttgctgatatatatgggcttgtgggattaatcttgaaataattacataaggtactattttttgtaaaatatttactacatttttacgttcaaagaat

SEQ ID NO: 266265 - DNA, 553 bp, Cannabis indica
aattttgttacttttaggtatattactaaaaattgcccaaataaaaattatgttaaactctgttttccatatatatatttaatttattcttaattaatgtctaagaacatatacttgcaaaatagtaagctgaaaaagaagaaagaagaaagaaacacgtatatgacatgcaatataaaatggatatattaaaagggttgggtctattaatatatatcaacaattattatttgacaagaacaacttaattcttttttgactttttgttttcccacaaaaatttctattcctattgtaatgttcattttcgtagcttaatttaacaataatgaaaacatataacgtattctaagctcaatcgaggattctttgacatgcaagtaaggttagagatatttctctcaacaaaattcacttatgtggggacatcaattactcataaatttgtttatttgtggcatcctactcacatgacataatttctttcaaactgctacttttagtgacaactagtcataacataatttttttgtgatttttagtcataataaaa

SEQ ID NO: 266266 - DNA, 540 bp, Cannabis indica
aagctcccaacaaatatgatgaacatcaaataaaacaataaaaatattggaactttagttggattaacatgatgagataataatgagaaaatgaataaaatgatgaagaagaaaagagtataaagattgtatacatacctattagatcaaattcaagcctttgttttgcataaaagagagctttttgtttaaattggtttggctaagctgactatatatatatacaattagtacatatacatgaggttagtcacacaatacttcttttttatcattattatcattattattattttattttatttatgatcaagtttatgaatttaaacgtgaaaaatatattattacaaaagctacatcaacacttcacatcaccatatatatctacaatatcttattttcttacactacatgataactctaagatttagagttatttttatatctttaagcttgaattttaatgtaaattgtggagcaattaatgtctatattatgtaattgtgtttagtttgttgtgtctttgtaataaatggaagt

SEQ ID NO: 266267 - DNA, 547 bp, Cannabis indica
gtgtgtatttttcctagtagcaacatatacacgttcttgagtccgttaactccgtgtattgggtatattggggagtgtacccccttttctaccgcttatcctccgtccagttgctgcctttggaggaccttttgctccgagaaccatgagaaggaccgactaaacttgcagccgaagcggagtgcgagggggcttgtccatttatccccgagggattcccaaaatgggaagatgcgggggccaaggcctggccttgactatacccaggagtagcagaaaactgtatgccgctcatcggtggagctgctgctggcacagtacccgagagctgggctcctggcacatatcccgctatcccggtgggatagtatcccccataggccactatttgggcctcttccaggttgatatatttctggactctcttctggaaatcttgaaggttggaaaccccttcttgctgtaactcgttccagaatggagtccctgtacggatgcccgcttgaagaagagcgagttgttgtccgtcgtcaactttcttggtttt

SEQ ID NO: 266268 - DNA, 575 bp, Cannabis indica
agatgatacttacgtataaggcaaaatgttattgtgctaatggggggagaccagttgtctagaagaattcatccttgaatttttttttattaggtagcctcacaatgatcctgcaattgttcatgtgggtattgaggtagtaaaaaccacctgatcttcgcttccttgtgggaacggcctttacagagtaaaaataaatttttttaaggggagtaggacactcccataccataatctgatacaagacctttaaacaggccaggtttctgtaagaacatggaattaactgaaaaggggtaattccaatgtaattatagaaatccttgtagtactctctcagagggaataccgctctagctctgatgtgctcgaggctccaagcgcctattccagatgagccactggtactagcagctccgcactcttcttggattactcttttaaggggaaaacaactaaattccccttgagcgacggacctaactcgacatcgtttctcgcatttgatgccacaagcctttaatatgttaccaacataggcagctatggatctgactttggattcaattagttct

SEQ ID NO: 266269 - DNA, 1715 bp, Cannabis indica
caaaagggaaactttgagcttggtttcttcagtccaggtagttccaaaaatcgttacttgggaatttggtacagaacattccaattcaaacagttgtttgggtggcaaacaggtgcaatccaataaatgacacgtcaggattgctaactctaaatagcactggaaatcttcttctgctgggacacaacaaaacgatcgtttggtcatcatcctcaagctcatcaaaacaaatccaaaagccataccttcaacttttggagtctggaaatctggtcataagagatgagaaaaacaaaagcgaagaagcatatttatggcaaagctttgactatccttctgatacattgttaccgggaatgaaaacagggttcaacgtgcgaacaggccataagtgggttatatcagcatggaaaaatgcagatgacccttgtcctaccgatctaacttgtgggatagagcctcatgcctacccagaactatccattagaaaaggagccaaagagtactatcgacatggcccctggaatggccttcatttcagtggcacacttcatttaaggcctaacccaaattcagaatatgaatttgtgcacaatgatgaagttttcttcaggtatcatctaaagaatccctctgtcatctcaagaatggtcctaaatcctacaactagcactcgcgaacgacttcaatggaacgatgcagagaagacttggagtcttttgtccacagctcccacagactactgcgatagctatgggctgtgcggggtcaatggacagtgtgtaataagctctaaccccgtctgtcaatgtcttaaaggttttaggcctaagtttccggagagatggtattcacttgtttgggttgacgggtgtgtaaggatgctccactgagctgccatgacaaaaacacagatgggtttatcaaatttccaaacataaaagttccagatactaggcatacttgggtcaactggactatggatttgaaggattgtcgggcgaaatgcttgagtaactgttcatgtatggcttattctaacacagatatccgtggagatggtagtggttgtgctatgtggtttggtgacttaattgatattaaacaaatttctgggggtggccaagatgtatacatacgaatgccagcttcagagttaagtaagtatagactttagccttatatattatatacgattaagtgagatatttacatttatttgttgtgtttgtcctacaatttagctttaattttcttctctgtctcgggacaatgacaataaataaaaaaattagaagcaaaaggtgatagtagattgaaagcattgatcgctgcaagtgttattggagcagtttgtgggatgataatagctggatatttcattcggagaagcttatttacaggtaattattgctcaacctgtatatttatatttatactagttttaatagtgtgacaataacactttttacccttttatttttcatgtactaactaagaagatgaaattaatctactttagtataaaacatttacatataaatttaatttacttaatttgctatgtaaatatcaattatcttagattaaaatttgaagtataatttattcaaaaagaaaaattaagtatgatatgtaaataaaaaaattacaaaataatcagagtacgtttatcaattaattgtcaaaattttatgaaattttcttagaaaaaa

SEQ ID NO: 266270 - DNA, 326 bp, Cannabis indica
tttttgagtaaacaccatggctaaggtggtacggaggctagcaaaactttcttcagctctcaatgaaagtaccaaaatatttaccgaaatttttcagaaactaataaagtagagcttaagcaagaaataaaatagcaaataatagacaagtgatttttacgtggttcaagcgttaataatttctaatctacgagtcagttgtattggccttacacgcgagtgtttgaataatacaatatatgttatttgtgtaaaccctagctctgcactccttttgtttatctggaagaagaaaaaagtaaataggaatttttgtagaggttcgg

SEQ ID NO: 266271 - DNA, 540 bp, Cannabis indica
tatataaatcttatttttagtattgtaaattaatttaaattctttaaaaatttaggtgtagtattaaataactataacataccttaaggttaaaaaagaattagactaaaaattattttgaatgtcaaaataaataagggtatgtactaaaaaaaccctttagaaggtacatataaaataagatcattatatatttccacgaatggaatatataaataataattatagattttctcttggcatcatgttattttggaaacggataacttagtagtagttcaagtcatacgcagttcagtgagtatgatttttttttatttagtttggttattaaagattgtaagaatttgcttgctactatgagaaatgtttctatttattttattaagtgatcaacgaactcagtagctcatgcgttcgccagggcctctagttcatatactgattgtgtttttcagtttagggaagtcccaactaatttggtgcctagcttggtagctgaaattcgaatttgataaagatgaatttcattcaaaaaaa

SEQ ID NO: 266272 - DNA, 1124 bp, Cannabis indica
aaatgcatatatatttttttccgtttttttttaaggtgggcgtctggcccacctcgcctctatgttggtccgtccttgcctgcagtcactaattaacaatttttttaactacctcaactgacaattcaacttacaactaactaatactctaccttaattaactgatcttaataagtaaattacttataatttgaaagtattttgagtttcatctataaactacaattaaataatttatttataattcataaatattttattattttgtatatatattataaaaaaacatttttttatataatttaatttgtattaatgatgcatatagggatcgatgttgggtgttgttgatgtgatatatattggtggtgtggtatatatccacagaaaattacataagtatgaaaattcttaagactggtggtattaataagtgaatcgtgattgatctcataatagtaatacaaaggtacacgccacagtattacttgctatacacaatatagtgttataattttactactgatcattatgaaagaaaagagaaaaaggacaacataactaatattggtatacattttgtcaccgtacgtacattatatgtaggcagcaattattttaggaaattctgtggagggactcaacttccatcctcaccaaattaatggcttatataaataacctcgtagaatggcagatagcggctagactaagaatagtcgctgagtaaacgtgcacaataatatttaatagctttaattatgatttttgtccaataaattttagtatgtatcaaattatatctttcaaatttttttaattgttaaatttaaagacttttgtctaatttcattcaattttactaactgtaattgtttatgtactaaatcatgctccacaaatttttgatatctaccaaatcatgtcattcgaactttgatatgtatcaaatcatacctcttgaactttcatctatgttaaaattttcttactaaaattagacaaaaatatttaaatccaacaatctcaataattcaagtgaatttttaaccgacttaaaagttcaaagtaatttttaaccgctttaaaaattcagagaatataatttaatacatgtgaaagtt

SEQ ID NO: 266273 - DNA, 696 bp, Cannabis indica
ttggtttaccgcctagtttaggaagttaaagttttttacgtaccttaagttttttttttatgatcgagtacgttagcaattatatatttttaaataatttacagtaccgaaaataagattcaaatattttgttacatatgtgactgttttgtcttatacgtgtggtaatcaactgtttaaactttatttttagcactgtaaactattcagaactttttaaaaatttacaggtgattctaaataactataacatacacgatacatttaaaaaaaaaactaaaaatctcttccaaatgttaaaacagataggaggtctaccaaaataactctttaggagggtgtactacaaatgttttaaaaaaatttacataaaagttttaagtgtaataaagttagggtaagtctacagtacaccccataaaggggtatttcggtatccctatttgttttggcatacataagatctttttagtcaatttttttcataatcattttcgttataattatttaggactacttgtaaaattttaaaattttttgagtagtttacaatgccaaaaataatattacatattttgagtagtttacattacaaaattttttgaatagtttacccgtaactgttttttcttatacgtatggtaagtaaccatttaaatctaatttttaacactgtaaattttttaaaattatttt

SEQ ID NO: 266274 - DNA, 631 bp, Cannabis indica
gaccctttggcttatatttcatccaactggttcggccttcggatagctatctcggagacgatgctcccagcgttaagattcagaacattgctagggccgaattagagagtcagggtaggactagcttgattgttatatctgagtgtttgttgtttcccatggatgttctaacacttgccttttttcttttgttgtagcaggtacttccatggatgccattttggccgaacttgccggggttcacactcctgaagctccccctcctttaacttcttcccagatggccacccctttaaaggcttcttccagtgcccctccagacactattgacttagtggatgaggaggtgcttccgggagaaggtcaagaaaagcaatggggcttttctgaggaagttgaagaaggtcaagaagagcaacgggctcttcctgaggaagttgaagaaagtgaagaagagcaagaagttgctctgattcgcaagcgcaagggcaaaatggttgcccaggaggagcccaaacggcaacggagagctgatactccggcccatggtcttgatggcgggatctctcccgagatggaggaacacacagcccctcccaacattgtgctgactccggttcctggagatgag

SEQ ID NO: 266275 - DNA, 599 bp, Cannabis indica
acatgggaagttctgcttatggttgctacctcattcatgaaatcttccccatctttacctttggattggttcaacaccttcactgcaataagagagccatcatccaagtttcctttgtagacatcaccaaagcctcctttgcctaatttttgagtgaatgagtttgtcattttcttaatttttgaataactataccctttaacttgaaggtgtccatggattttcaggaagttgtcagcattttcataagtttgactctgtttttcccaaaaagtactacaattccaattccaccaagtgcaccccctgcaagaattttgtaaggataatctcacataagtatatatatatggtcatattaactgtatcatctatcaaaattgaaatgaatgtaagaacaatttgagatgatgtatcttacctactcctactcctatctttattagctttctcatcttcttttgtcctgaaacaatattcatgtagaaaacatgtgttaactagttaaagaaataaataagaataattagaatgtatgagtagtgaggaactaactccccaagattattagtgccttgtgctccaataccaaatacctt

SEQ ID NO: 266276 - DNA, 880 bp, Cannabis indica
ctggtgaacgtaggtaccttggacctgaggctgtccaaagaacgagtgaggctattgaaaagattcgagctcgtatgcttgcttcacaaagtagacagaaaagctacgcagatccaaagcgtagagatgttgaattccagattggggattttgttttccttcgggtatccccaatgaaaggaattcgaaggtttggaaagaaaggaaagttgagtcccagatttattggtccgtttgagattcttgagaaagtaggttagggagcttatcggttggctctacctcctgctttgtttggggttcataacatgttccatgtctcgatgcttcggaaatatgtagcagatgcaactcatgtcttaaattatgaagacattgagcttcaaaccgacctgtcatatgaagaacaaccagtgcagattttagacaagaaagaaaaggtgttgcggaacaagactattccgctagttaaagtgatgtggcggaacagcaaagttgaagaggcgacttgggagttagagtcgcagatgcgagagttgtatccagagcttttcaggtaaatttcgaggacgaaattcctataaggggggatagttgtaatatctcggaaaataaataatatttaaataggaatattttattaaatatgtaagtatgttggtaatgaagtaagattatgatcttacttagggtaactattgagaatttattgaatgaaataaaatattttcgggcccgacaattgtgaaaatttagcgatgtggttagaaatgtcacgacgttaatggaagaattattttgagaatattctggattagtttagaaattttagaatgtcggtttaatggaattagtgaaattaccaaaatgcccctaggtt

SEQ ID NO: 266277 - DNA, 679 bp, Cannabis indica
tttttaattgaatatccaattacacacctagatttaaatattaacttaaaaatatgaaaaaaaatatgcataaactaaatatcaccatttatttaagtttaatactctattaaacatgcaattgttacaagtgtaatgcaactaaaaattaaaataatcaaaacaacaatattactaagtaataatataaaacaaaacatcatgaaaataaatacacagaataaccaagtattacaaattcaacacacaaaaaatctaataaaaatataattaatatatatattatattttttaaatattttttgatataaattattttttaacatatataaatgtaattggattaaaattagtttttaattgaattttgagattgacattcaataaccaatttaatccaactagaatccttaattcaattgtaattgaatatctaatttttataattagatcagattagatcggttcgattcaattgaattagattaaatgttggccctatccattgctaataaatctgctcatgacttagaaaatatatttaaaattagatgaaatctctattggttggaggatttcacgtctcttatattatttgttgttataaatgaatagatttagtttgaggaaattacattctataccttttttatattgtcctcttttatttttaccctct

SEQ ID NO: 266278 - DNA, 734 bp, Cannabis indica
atatggatcctgcttttttgatggtatattgtgtaataatatatatatataagaattaagaaagaatcgtgactatcggagcctgatagtataagattctaaattaaagtaaaattttatgaatgaaaattttctaagcaattgtaattataagagaaatattaaaagtaacggtgtctaataccacttaacgttgttatattgatattattggtgcttaagtattattttatacaatttaacttaataactatgataaatatacttatataaccattattgcaaagcactatatttaaatattgtgctaattaaacaccactacctaaataaaaaagctcttgttataatacaatttatacatatatgtatatataacaagattaataactcatccacaaaataaataaatatatatttaggaaaattcatttaaattaatttaatcatgtctactcaaaacccaggtaaacggtaaaccaattcattaatgattttaacttcaagttgcgaccaactacaagagagaactagcaatttgaaaaatagacaaaaaaaattgatttcgcacgtacatgaaaaaacacccaaataaatatatgcaatcgattaattattaaagcctaattaattattagttaattatatatgtctcaagtacgatgcatgaccatatactcgaaagaccagaaatcacataaatgactttataataaaaatatatggctcactat

SEQ ID NO: 266279 - DNA, 831 bp, Cannabis indica
aaataaataataggtttgttaaaaataagtttttgaataaacaattaaatatataacatacaatgtccatgtaacaaatataaaataaaatattaatataattaaattattattttatctaaccaaatattttgaaaatttagggttgttaaaaacaaccttaaaatatcttttcaaaatttaaatatctaggtttatttaaattattttatcaaattaaattaaatatctaataagataaatgatttaaaaataaccaaatagatattttcaatatcattttctatcttataatttaataaaatttaaataataaaacaaaccaattttacaatagatatggttagacaattattattttaagaataaagtaataaacaaataataattatcctaattatatgtcaaaatatctcaaattaagcattactcaaatttctacaaaaaaaaatctaggttatttaaatatttaaaatattatttataaatttcgaataagtaaaatgatataaaatatcatttttctaacttataatttataaacaattaaatatttaacaaaataaccaattttgaatttgaaaatattatggttagaatatctataaaaatatctaggttaatttcaaattggatctaaattacattttcactagtgaattaacggtactaaaagatacataagtaattagaagggtaaaacgttaatcttaccaaaactaattacgaaccgacacaaagaggactaattactggaattgattatatcgatagacactgcagtaaaacttagtaaatataattctataattactaagagttcaattctat

SEQ ID NO: 266280 - DNA, 985 bp, Cannabis indica
aaaaatgaaacttttaaatttgcttcctattatagaatattaaaatcacaactagaatcattcttacaaaaaaaaaaaactccattaacgaacaaaaaagcttcgttcataaacaacataacatcaatcatcaatcaatcattcataaccaaaatcgtttctcaaactaccgacaagatctacaaaattgttttactgtgattatatataagattaaagtcactaattgaaatcattctcaccaacaaaaactccattaacaaacaaaaaatcttcggttacaatcgccacaagatcgatcatgagttcagtaccgaaatcgttcctcaaactaccaaaaatacctaaaaattaaagacaaaatcgttgctagataaaggaacaactcagtcgacactttaaaaaagttgatccaaaaattgctttgttctgctgtatgatttttattttttttattttccctgcgtttcaaaagttaacttttggttacctatgatatttataataaaccaattagttacttttgcataaaaagaatattgttgtatttctgtttcatctttctaacaatatactataaataacatcaatcaactaacatttataacataatcagcttcttcatcgtgaattctatttttttttttttattttcttgcattttcaaaagtaacaatttggttacttatagtgccgataaaaaactaattagttacttttaaaaaattttttttatatcatataattttaaatacaatttgattacctttaaagcttatttgtaaacatcttataatcaaatagttatttttaagttatattattgtatatcatttaaaatatatttgggtaaccttaaagtttatttttgaaactaatgaattgtcatgtattataataagttaccacttttatttaccaattgttttatatataatttttgttactttaaaaccaatgtatttattttttacattatattaca

SEQ ID NO: 266281 - DNA, 849 bp, Cannabis indica
ataatattatataaaattaaatcaaataataaaaataaattaccataaaaggaaaattaccaattttaagatttacatattttcctttaaaaaaaaacaaattaaatttataactttctaattttatttattttgataatgttaataaatttatactaatatttattcatagtaaataatataataatttaagttttaaaataaattatttttctttcaatatgaatggcttaagtatgaagaatatttttctttatatatgcttctatcaatctctataagtcttacgcattttatttaacttttagcgatccactatatagatttttcactccaatcctacatcaatatataacattatgaataacaatttaatcaaatataaaaaaaaaaaatagaaataaaatgagttaagtgtataaaataaaagaactttaaagtgagttttatcaatttaccatctaaaacacttggcctatatttcaatgtgagtgtgaaccttacatcaacatataaacacttatcttagtattccattaatcaatgataagtgttaattcttgagtactttcatgacaaaaaaaaaattaaattgtgataatcaaggttaaaagaaagaaaattaaaaatgaaaaataagatattagtacaaagaaaagagaggtatgatgataataagaaatgaaaaagaatctatttatatgaagcacctaaattataaaaataaataagacctcatagcaaaggtcacacagttaaattggaagagattgacaagtttatatagttagttaattaattattaaaaaatgaataaagtaaccatagcaaatgccatatataaattgg

SEQ ID NO: 266282 - DNA, 1219 bp, Cannabis indica
tggaccacattgaatcgaaaaagttaaaaaaagtgcaacggtaacaaaataagatggaattagaatataaaagacgcacactaactgaatgattaaacataaaacggagaattaagtacagaaaccatatggggaatcaatcaggcagacaaagctggaagctgattaaattccttgtttggggttttttgttcctaaattctaacctaaaaaagtagtagctatttatcatcagaagagaaaaatcttaaatgaagaagagtcatcatcatcataatcatgatcgtcattcattataatattttttggggctgggttctaagcaatgctacacaacttcatcttgtgttatggctcaaaactcagtaccaagtctcctccaaatctctactcgtcatcatcatcatcctatgaaacaaaaataaacacaaagtcaaaacataaagagtcaaaaatgcagtcaaacagacgaggtaatagagtattatcatcaactgctcttacatctccactctcgtcctcctcatcctcatcatcattcacttctgactttgacttgtcagactcttcttcgtctgctccagtatctccatcagcctatgaaaacaatccaatcatacttttattattaatattttgagattattacaactaatgtaaagaagctaaagatcagtagttaaaacgtaccagcttcttgttgtaagctaccatgtttttgttgtactcaactttcctcttctcagctcttgaaacaaatggagctttctcctgtagatttattttcatcgatcgaacaaatgaataaaacaaaattcaggaatatgaaaaagaataaagaatatatttgctgaataaagaaaaggaatctgatactcacagcttcagtcaatgatttccatttctcaccaccagctttaccgacctgatgtaattttgaaaaagaaaattaacatattgtagaaattacgcgcgcgaatgaagaagacatgaaaaatcggatcggatctgattctcttacagcggaaacggatttgttgttaggatgttccttcttgtatttttctctaaattcctccctatttcatttcaataacagcaacgcaatccgcaatcagtctaaacacaaatcgagtataattttattacgaatttctagatttaacagcaaacaacaaaaacaagatctagtctagacaagaaaaataataaaataaaa

SEQ ID NO: 266283 - DNA, 1030 bp, Cannabis indica
tattttataattaattaaaataatgtatacaaaattgtaaaataccctaaattaaactagtagggaggcacgtgtgttgcacgtgctcccacataattacttaataaatagataaaaaacatttaaagttagtagagtacacatgtacaactttttaatctttaatttttttctcccaagaaacaatacttgagaagctataaagctcaaggttagtggaaaagatcagctatattaaataaatttaaaatcaaacaaaaatcaaaatagaagcatatcttaagagttttaaagtatattttttttccactaaaatttttgatggttgcagcttagtcaccttcaatataaaatatgtctacattttctcatgataacaataagagcataaacttgtggagtatcgccaaccagagagtagagacttcacaaggcaacaaagtacaccccccacaagtattaagagtcacaaccacccctagcactcaataatttgatccacaaaaactacatcaaaattcatttttatcccatcaatatcaagagaaaagaaccatttatataaggagaggattttcttataaattcaagatggcatgcagaaagagataagatataataaaagtacaataggaagaaaatttggaaaacatagaacctaaaagatacaaacttgttcaaacaattaattagcatgccaaaaaaaaaaaaggcaacggtaaagcataatataatacagtaaataaacctaatataataaagtactaatacctaaacggctaaacatacaacaataccctttttagtcaatagcaattactttcacatctatgaacaaaagcaactgctatattatagaacaaaatgtatggtgcaaaaacttaaggatacaaaaatatacaatactatacaagcatacattacagcatcaagttttgatacctcccaatgtcttattttaatacgtattaagcatacaaaaatacctagatgaacaaagttgtatgtatacataaaaagaaaaattaag

SEQ ID NO: 266284 - DNA, 795 bp, Cannabis indica
tttatggagagtgacgcgagatgggtccatcacccgcattccgacgcactagtcattgtcgccaatattggcggagacaatgtccaccgaatactcgtggacaacggaagttcagtaatctttgaacttccaagcctttaaacaaatggggttgcatgagaaggatctgcgacctgtaacgtcgagtatatacggttttaccggcgacgccatcgcactgaaagggatgattaaactctcgattaccttgggaaccgcccctgtaacagccaagtcaatggctgacttcgcagtaattcaccagtattcggcatacaatgccgtgattggtcgaccaatcttgaaggagatgaagatcgtaacatcaatctatcatctcacgatgaaattccctactcccgctggagtaggctctctgcgaagaatccagtcagactcgcgagaatgctacaatgcagcagtcaagctcgcggaaaagaagtcaataaatgtcatctatttattggaggcaccacctccttgccaggaggttcttaggatcgaagaggtgccgcacacggatggaccagatctggatccaaggatcctcgatcatgccacagcggcccaagccgcggaagacactattgaggtacatatagaccccatagataatagtaaagttttgaaaattgactctaaattgaattttcaacagcgagaacaactaacgacttttctcaaaaaaatcttgatgtttttgcttggaaacatttagatatggtcggaatatctccgcaggtcatgtgtcatcgc

SEQ ID NO: 266285 - DNA, 562 bp, Cannabis indica
aatactctattgaagcattatccaataatttttgagttaataaaatattaaaggggcatggaaattaaatactcaattactataaaaagaatataagtaaatccaaaatcctttcatatatattgtgttagaataggattagttagttatttccaactgtcttggaatctttatttttctgttacttcttgccaagttgcctaaatcagttacataatgccattgtaataaagcctatatataggtctgtaattttagctccagaataataagaaattattctcttatttctctctgtttttagccttaaacctctcatatggtatcagaagttaccctgcccaattccatggcaaggccttccaaaagatctcaggatggaattcttcctcatcctcctgagaactacattagatcctccaactgatgtcacttctgctcctacagtagctccaatggcggcatctcgatgtacagccaacaggacacgatctcagaaccctactgatgttcacgaagatcagtctccaagaaccgaagatcaccagattcctcaaaggcg

SEQ ID NO: 266286 - DNA, 906 bp, Cannabis indica
gattctcctccctatcatctcaccttgcttaaaattcaattgtgttataagttttctgaattactttaattcttttaaatcataattgttttcgattgccaaatagaattgtaggtatagtttagtagtagttaatccaattccctgtggttcgacctcacctgtgtgagtttactacttgattgcgtatacttgcgtagtgtttaattaataatttttgcaacactgactagttgatcccgtgggtagcattatgcccgtgtgtgtagcagccaaacaatggggatcactctgtactacttggacacgtgtcacgcaaatgtttaacctttaaaagtgaaggacatgtgtcactcaaagctcactccatatggatggaacgctgaattgttcgcctgataagaagatggtggcgatgcgtgcactatcagcgtggctgtagaggacaagatctaattttatcaagaaaatcataactgtcacttgatcacttgtgacatggaaaaagtcgacattcgccacgccaattgaaggttgacatccgctttagacctttctgggttcgagaaggatacttcccatcctccttttagggagttcctatcgacgcacacaacctctcacccacccccttattcttaacgactcttagttcaggaagacctcctaactgttccatagttacagggagacgagcatgaatttcttcccttcatgccacatgtcccactttgtaaaaaggccggtaatagaaggttaaaatggtaatttgaccaaaactaattacgagcaaacacatggagggctaatcattagaattgattatgtcaatggacactatagcgaaactcagtaaatataattgtataattactaagagtgtaattctatattaatagtggagta

SEQ ID NO: 266287 - DNA, 504 bp, Cannabis indica
agaacaaattaccccatttaaactcggtaccaactagaggccccttacctcagggaggagcagggggtatgcccgaagggcaagtaccccccgaggggcagtccctcagcaggtgcccagattaccaacacggccaaatgggagagtggccatcatctccggtgggcctcatattggagggaccactaggaacgagttaaagcattacactggggccttaaaacacgatgaagtatgggaagttacttaactcctagaacaaaggcccaggctcatggaccaacccatcactttcacggaggatgaagtggaaccggtgcgcttccctcaccacgtccctctagttatagacactcccatcgccaacaaggtcgtggaaagaatactggtagataacaggagcttcgtgaatctattgttcaaagaagccttcatggccatagggctcacggatagggttctgtcgcttagcggctcccagctcacaagatttaatggaacaac

SEQ ID NO: 266288 - DNA, 501 bp, Cannabis indica
tgaaggtatttttccaggtcacttaaatatatcaaatccctaggtacttacgaatttcgatcatgagatgcagtaacaattctgtttgaccttgcactccagtctatcccagaaacaatttgatcatgctgtgacaaatcaagggaaaaactagctaacattatttctcagtgttttttttttttaacgtttatccttgccacatgatatgttcagaataaaattcgtttgggctatgaaagtaaaaactatcagaatactggttgcacacaaacaaaatacgaagtaccttccattgagattaagtgcatcttagttttactatgttttaagagaaaaaaaaaagttttatcatcataattatgaaggtttcgctggctaaaaagtttcaaaattatcatttggttattagatggaaggcctgattccagctaatcttcttttgtttattctttgttagcttttgtttacagaatccggaggatacattatcctctcgtt

SEQ ID NO: 266289 - DNA, 567 bp, Cannabis indica
tccgacaaattttctaaagtttattgtcaatactagaaaagtcctcggagtagctgccgatgtcggaaaagtcatcggagttgctgccgacgccataaaagttgtcaaaattggcattatcgtcggaaaaattaccaagaaattggttttttcatctggttttttcatcaagaaactagtttcttggtaatttttccggggaatatgctaattctaatgacttttccgaagtttgctgttggtgttggaaaagtcgtcaaagtagctgccagtgtcagaaaagtcgtcacaattggcattgtcactggaaaaataccaagaaagtgatttatttatcaagaaaccagtttgttcatcaagaaactaatttcttcatcaagaaaccaatttcttggtgatttttttagtgattttttcagcgacaatgccaattctgatgaattttttggcatcggcagcaactacaatgacttttccagcaccgacaactactccaatgatttttccggcactgacagcaaattccggcgattttttcggtacgagtgacaaataaaactacctaaa

SEQ ID NO: 266290 - DNA, 621 bp, Cannabis indica
gttgagagtggattttgttgattgtttgtaacatgcacaatacaaaagacagctacttttagtaacagctttttagtcataatataaattttttgtgactaaatggatgtgacttttagtcacaacaaaaaattacttgtgactaaacaatagtatttagacacaagttatcattaatttagttttagtgatcacaacaagtattgtgactaaaaacacatttagtcacaacaatttgtaatttttgtgactaatacttttaaccacatattttttagtcacaacatagaaatagtaatttgtaattaattagtcacaattattttacttttagtcacaaattttattgtgactaaatgtaaaatttattttataatggcagttttaattaaactaatacagatgaccaaaaaaaaccctcccccaaccgtgccatataaatgttaaccatttctaaggaatttttattattaattctactaagtatacatggaatgaaagatgatgctatttttttaaaaaaaaaataatgacactaactttgtgctttatatattaaactttccatctgtttaatttgtatgaaatatattcacttgcaacatttttggacgtgatagc

SEQ ID NO: 266291 - DNA, 687 bp, Cannabis indica
ttcttccatcgtatgggtgtctgagacaaaggaatcaggtgtcgatagaaaggaatcctcttatctagagactggagtgagggatcatggacctaaatagttggacaaatgttgactcattgtctagctcatagaagatgtcatgctctagtttggtagtcaactctcttttcttgcaaagcttgtactaatttagtaagcgcgatggcctattgagacgttgtcataaagtggctagctacattttttttcgccccataaagttgcctctaatacctaaaagtcgcccctactgtgagcgggaaatttctcgcctaacacgtacaataggttttcaacttattaggggcgacatttgttgcgcctaattagtttctgtcgcctctaatagttttaggggcgacatgtgtgacctctaaagctgaacagatttaaaaaaaataaaaaactttttctttaactctaatactcttattattagaggtgactttttgtcgcctcaaatgttatcggccctaaaagttatatttgttgtagtattttccgatctgatgcaccgcacacaccaaaaaaagatatcatatttattgatttgttgatataaagcgaaaagtagttcaattatatgacattaataaatacatttcaaaagatcatataaaaacaaatgagttggtcctactaatg

SEQ ID NO: 266292 - DNA, 503 bp, Cannabis indica
ggggacccccattccctccttttatgttaggggtttgtttgggggctaactgctggatttctctttttcaaaatcttactaatctcaaggcatgtctgtccctacgaccggagtgaaatcctcaagcaaaggatctaacactatggccaccctggaggaggtgatgaagggacctgtggtccaggagaagtacacttgctgatccaccggctgggaggcggacgagttgcactcaactctaacttccgcccatcaactagagaagattgtcacagtagctgggatcaagccttctgcttctggagtctttcaccgtctttcctgagataaagagatgcccaactgtaactacagtggttttggagtgtagagtcagccgcaccgcatgtccggggaaatgctaccgctctaggactatttcataaatttcttagtttttgttggcctcgcgccttaccaacttatcccccaagcttatcccctgctctcaggcttgtttattt

SEQ ID NO: 266293 - DNA, 528 bp, Cannabis indica
cttattgaattttggatcagatccatttcgcctcatctaatcttttttcgaatcgaattcgatccgatccgatttcaatatattaaaaaaaatattaattcaagacttggaccacaaacccgcctgagattcgaattcggacccgaacctgggacccagactcaggacctcggaacccaaagtccgggaccccgggcctgaacctagacccaatccgggccagcacccagacccaactaggactcggactcgggcctaggactggacccgaactcgaactcggacttgggacctaacccgagacccagaccgggactcgggacccagattgggatctaagacccaaacagactcagaccacagacctgggacccaaactcagactcgtgacccagacttgtacccagaactcggacgggacacgggacccaaacatggacttggatccaaacccaaacaagggacccggatcatgacctagacccgtacccgaacttaggaacgggaccgggacccggacccagaccc

SEQ ID NO: 266294 - DNA, 581 bp, Cannabis indica
caagagtgacaacccttcctcttattcaaatatttcaatacctgggaggatttagagttgaaactttttactttcaagatttttttcgatattatctgtattatgaattaaagtaaataatatgatttgaagcacacacacaaaatctagaattatatctattgtaaatttttatatagtattttctagagtttacaccaatactttattttgtttcaattaggcggaatttgttttgattggttcatactggtaatattttgttattcgcttgaattactagggactagtaataagctacttgggggttgtgttaagtagtaaaaaatacatatttattattgtaaaaatataaaagaaaattaattctatgtaatattttcatgaaattattgtaatatatttttattttaaaatattgtagtattgagttaattttgtaagaaaaataacatttaacgactcaaattaaaaaaagaaattaagaaaatgcatgtttttatttaatgaaattcaaattaattagattttaaataaatatatttatttaaattattgtgatatattttgtgttgaaaata

SEQ ID NO: 266295 - DNA, 657 bp, Cannabis indica
agaactttcttagccagacaagctctttagcagcttctgctgaagtaattttgcaggtcactgatgttctgctttaatttgttgacaggttaaacacttagtgacagaatctaccacatctttcttcatcccataccaccagaaatagggcttcaaatcttcatacatcttggtggttcctggatggaatgagtaaggggtagtatgagcctcatccaaaatttctttcttacgcttagtattatcagagacacacactcgtgctttaaacaacagcattccactgtcagagatcgagaagttcttagcttatcctgctaagaaatcctcttgaatcttaaacagttcaggatcttctaattgtgccactttaattctttttaacaagtctaactgaagtgtcagattatacaatccctcaatcaaaaattcaatatttgccctagacatctctgaagctaactgaggagaaatcattaccatattggaaatctaatctgccccttttcgacttaagacatctgccacgacgtttgcctttccaggatgatacaggatttcacagtcatagtccttcactagctctaaccacctcctttgtctcatgttcagatcattctgagtgaaaaagtatttgagacttttgtggtcagtata

SEQ ID NO: 266296 - DNA, 2082 bp, Cannabis indica
gcattttatttgtcagattgagacttccatcttggtctagtactactcaataggcttctttagcacttcgtgagtttggtccgcaagcttctttaggaggaaacatcaaccaacaaatgacatgtgctccatatgaccctgaccatgaccatcaccttattagaagatgaactactagattgttttttatgagccaaaataattgttttattcaaaaaaacttttatttgggcctcattaaaataggaggtctatgagtattgttgtaaagaagaacctcaaaacgcccaagaacactcctaaataggggtaaccacgcgtgtagcggtatgttatgggctaatagaatggcccagccggccaagcccaccagccgccccaatagtatcaatgaactgcgttgttgtcaaactatgtactaattttaagcacattatgtcaaacataacgtaactttccacgacaataatgtgtatattgattagtagcctataaaaagatggataaagagagcgttaatttgaagctctcaaataattataagataatattaatatgggtgaccaagagcagaagggaattgtgtgcgtaacaggaggaacgggatatattggctcatggctaataatgaggctacttcaacatggttacactgtaagaacaactattcgacctgatcatgacccaactgcatctggtacatatatgatatatttccaattatatagttttttcaatataattattaattaattaataatttatgtaagaattgaataatttgttggacttaagaggggataaaaaagaagagagacattagtttcttgacaaacctaccaagagcctcagagaagctggagatctaccatgcagatttgaaccaaccagaaagcttcagtgcagccattgaagggtgtagtggggtgttccatgtggctcatccagtcactatagtcgatgaagagtccgaggaagtactaaccaaaagatgcctcgacgcagccttaggcatactaaaagcatgcatagcttcaaaaactgtgaagagggttgtctacacctctagctcagctgctatttctgttttaaatgatgaaactggacaacaagtggcggacgagagttcatggagtgatgttgactggtataggtctcaaaaacgcatgggaatttcctatgtggctgcaaagaccaagacagaaaaggcaatgtttgaatttggggagaagtttggacttgatattatcaccttaaatccttctttggttttaggcccatttatttgtcccactctacctggatctgtggctatgggactcaccatgattttaggtacacctttttctttcagtgatatcatgcattaaataattaataatgtgttatattcttatcaattgttttgattatgcaggtgacacatataatatatataagtatcttttaagaacgaatatggtacatatagaagatgtggttagtgcacacatttttctttatgaaaatactagtgctaaagggaggtacatttgttcatcggatgaactttcactgattggaatgtctgaatttctttctgaaagatacccgaactttcaaattccaaaaaaagagtgagattcagcttctcatcattattatttgtagtattattttatagaataattcgtttgaagctgagggtgtatgttgattttgtgatacagatcacttgagggtattgaaggttacaaaataattgccctctcatctaagaagctattggattctggattcaagttcaagtttggccttgcccatatgttcgatggagcaattcaatcatgcaaagagaggaatattctttaatttgtctttggatgcataaatttagaccttttttctatgtaaggatttgtgtttcagtttttaaccaagaaaaataaaataaaaaatgaacacatatttgcggcctttaagtttacgtcacttccgatatcataaattacaaaaattgtctcaaggcacatgtcgctataaacgtatatctcaattccaacagcaaaaggccataccacaaactgattgattcttatgtca

SEQ ID NO: 266297 - DNA, 583 bp, Cannabis indica
tgagtgtagaccgactcaagcggattgaatagggttgaacatcagacagattgattgtattttagattcgtgaatttcgagttcaaaaaattatactcgggcccgacccgtgaaatagttcgggttcacaagtttcgagcttgcaggtttgcgggctcgggttggccaggtcaacgcacaatccttgacgtgtgagcgtaacacgtgggtctatgccacataaacatatgtaggcatgtgagcgtaacacgcagatttatatcaaatagacacaaatagtgcggtggcaccattaattatgtgttatttatatggagattaagggttgtgcgttcaaggcataacagattggactcggtaactataaccgagataaaccctactaaggccttattgtatctagacgtgtgagcgtaacacgtgggtctacgccacgtagacataattgggcgtgtgagcgtaacacgcggagcgagtctatgttaaatagacaaatatgaatggcattattatatatgtgatatgttaattataattgctaatagtatttactctcttgctgggcttggctcacgggtgctct

SEQ ID NO: 266298 - DNA, 556 bp, Cannabis indica
gttgtgagatacaaagcaagacttgtagcacaaggtcttactcaaagactgggtattgattatgaagagacatattcacctgtggtggatgcaataacttttagatagttggttagcctggttgtgagtgaaaaacttgatatgcgattaatggatgtagtcacagcttatttatatggatcactatatagtgatatttacatgaagatccttgaaggatttaagatgcctgatgcatataatttaagcaatcgtgaaatgtgctcaattaaattacaaagatcattgtatggattaaaataatcaggaggcatgtggtacaatcaacttagtgaatatttattaaaggaaggatatacaaatgattctatttgcccatatatttttataaaaagttcaagttctgagtttgttatcattgttgtttatattgatgatttgaatactattgaaactcctgaaaaacttttagaagctgtggaatatttaaagaaagagttcgaaatgaaagatttaggaaaaacaaaattttgtcttggtttacaaattgagcatt

SEQ ID NO: 266299 - DNA, 784 bp, Cannabis indica
aacattaaatgttatttctgatctatattaataagtaaatttgattatattgaaatgagttttatttagggcataaaacccaacacgcgcttattttactagtaatcttgtttaggggattagggtttcttaatcatcttgggtaacatgcctaatagttaggatgttacaattatgctcaataaagggggataaattctttatttggctgtttaaagtgtttgtttttctgttggtttagactctgttatattttgatggttgcactttttttttgcactagtattgttgacattgaccatattttgtcaagggggagattgtaagaaccactattttctgtaatgacaaattatgtccagttgtatctgagattcgtagtgttttgtttaaaatttgtactgttagtgttagtccacatcagcaaagatattttgggttttcattgttcagatggtaacagctgtctacttcaagattcttggtttaactggtataaatacaactccttagtattatgttgatgaacctttgtgatcggagattagggattatgtttctttcttcttgtttcctctttatgttacatggcaggtgatctttgagcttggtggtattcatccaaagttgctgatcagagctttaagatgatgagtacagactgaagggatttgagtatcatcttcatcaccagatctgaagggagttcagattgaagaaaagtgttgaagaaagctcatcattcacacaaggggatcttgtgtctccaatcaagggtcttggt

SEQ ID NO: 266300 - DNA, 1057 bp, Cannabis indica
gtccaaaaacaaaaaaaaatattttaagagtagaaatactctacgagtaaacaagacacaaaaaatgaaatctctcgaaaaaaattgtttcaaatcaagcgttcgggaggcttgtctctcctatttccaaccattcgagagtattgaactctccacaagagtctactcttttctaattccaataatctagactattcgaacgagacttaactcattttttgtcgagtttcctataacaattcaatgtcaatatttggattaaaatgattagatttttttgaagtcttttatgatatcttctaaccccttcatatttttttgcttgtaggcaaactcacaaggcatactttgaaaaatcggatctgttgtttatgtgcatgctgcgacccgtgtctttcgatatacagaaacaagatctagaaattgaggctgcacaggtgctccttgacttagaatgttatatgcataatacaagaatttggaaaactcttttttgagtacaaatctaagcacacacaaaaatgaaacatagctaaatgaagtgactcccaaatttcatttctttttgacttgttaagccaattcattttagcaatattatggcctccatcattgatataatgggaagaatttccacttaaaattcatttttcaaaagtagatacttagagaatgtgattgcttctacataataattagggatatttttggaataactactacaaagttcggcataaattcaatgaaaatgtaaattttgttcaatgtttttagatacagactccgttagtatcttaaacaggacacatgtaatacatgactcaaaattattgagtccaaacgaaaacatgtagtataagtttcttcaaaatcttctttcaacacattcaaaaactaatgaaatttgtaatgattgaattggacgaaaattacagtgttagtaacattggttattgagtatctatgctgctaagaaaaatcattcaatctacactgacaaactttaaattttgggttacttatgccgaaaattctcctactaactaatagtgtttat

SEQ ID NO: 266301 - DNA, 1291 bp, Cannabis indica
gtgtttgccacgtggattacagcaactgcatgatatcagcatgaagtgtgatgatggcccatataataaatattccatttattggttttaaggaagaaataaaaaaaatagagaaatagtaatgggtaccagtggtgcctagcatcttcttatatgttaatattgctattagtttaattaagtatcgggtcccatatagtttagtataatagcttttagggagtatcgctagcaaatcgcaatgcaacatgtcgagaaggtgctaaacaccccactgatgtcttataacaatgctaaaaaaaataatatatatatatttatttatcatgaataaaagcttaaagccctttatttatagagatgttttattatattctttttgacttatatgaggacggtgggagagaatagaattagaactattacaaaattaaagtttgtattaattattactttaagtaataataatctttcaatttataatactttgatacgtaatcagtatgttttcacctatatatatactaattaatgtacaattacgagttaattattattattgtatatatagtagtagtgtagtagagcaagggatcaaatttgatattttactataagctagcacgtacatgaaattcttacgttaataaatagccttatataaattacgtacactaatttgattccaatttttagctggtgatatatataatcaacaacaccattcatcgcattggatttggattcatataatttattttattgcctatattatatagaggccggggagtcactacttaggtagataatcatcgaattgttgcctaaatgggttatagtgtacaatctaattgaaatccattatcatttttaaacactatatatacgattacgaatatatatctattctatataaagtgtgcctatataactgaattcttgcgtttatgagaaattcatggataacttttttttaaaataattttctattcaaaaataatatattttttttattaagatgtattttaatattaatttttaaataaattaatattacttttaaattttaatcgggtttatgagaaatttatgggtaactttttttaaaataattttctattcaaaaataataatttttttttatgaagatgtattttaatattaatttttaaatacattaatattacttttaaattttaatcgtataaacctaaccggaaacacaatctctgaaaattctcaataaaataactaaccccaaaaggatgagcaaccaatcgtgattatttag

SEQ ID NO: 266302 - DNA, 2493 bp, Cannabis indica
tatatataatttttgttagcatgatatatatattttttgagtaatttatgattactaactattttataaagttcatattgctagtaaaatattaataaaacctcacataaaattgtcaactacaatattaatattgccaaatagaaataatattgtacgttaatatcgtatattaatgttgtaatattctaaaaaaataattggcaatattaatattcaaaacctttatacaatactaacattttagtaatattaatatatattttcaaatagaaaattaatagtgttaatattttattcgatattgtatattaatattggcagtcttatatgcaacatagtttttaaattgtatattttatgtgtgatcattaatattgcgattactaattaaaacctttcatttaatatattaactattaatttttttttttttgtaattactaattatttttttcaaataaaaccataaaaattcacttataatcacatccaaacacccaattattttaataaatagtaattacagctgtactaattatacattacgtactctcaaattaacacacaaatattttagttatatgtatatattacactaaattgatcaaaagaaatagttcacataattacaatagcaataaaaaaaaagtactcaaaacaatattaaaccaatatcaacattctgtttaggacaaataaacaactattataaagattgattccaaatacattttaaaaaattatgcataaaactataattgaatcagagaatcatgaatggcctagattgaccatattattgaaactagattcatttagtgcaaattagctgaaatttggaatcacaaatttcgaatttatgaataagctcgcataatacacaaagaatctcgacagggactgatcatttacatcaaataaattataaatataaatatatatagcagcatatattataacataataaatataaatatctatggaacactagtattacctattgatggttactaaatatatatttatatatggattgaattttatcctgtgagggaatcatttcatctctatatcttgacttcgaattatgatgggtaacagtttgttaatcatcaaaaatcaaatacatcaaaccgtgcccatagtacatgtaactctaatcaaagcatataataaaacttattatttatagcaaaatgcattctatttttagaaaaaatttatatattgtttgatagttgtcaataatattatttaggttttaggttaagagttgcatgaataaaagataataccaagcgagtaacttctctaacaatcccccatcctcttttattatttacttctcatactttaaactttaaaggctataattaattaacagacaactttatgaatatttggagctcgttcaaagacatatctcacgtccaaaaaaagaaaaaactacgtcgtttgaagacttccggaattaagatgaccataatatgttttgctaagcataacaaccttctctatacaagcctaaactaacgatatgcttattaattgttagtgatcataatatttaataacaattgaattcaaaaacacatgtttaaacacaaataaatttggaagatctaattcgtttttattcaaataatacaacaatcatattatagatataattgatcaatatagagtagtttagagtaaagcaaaataattcctatatacttagatgatagcacatccattaattaagaagtttacaagaaatatattttcatcttgttcaacattcttgatggctccacagattagaagaaattacttattagagtttattagaagttgctacacatttttacaatagtaattactctaaaaatttctacacatttgtaaaaaaaataaataaattagagaaacctaaaatatttaaaagaatttagaagtaattgatcaagaaaagtctagagtaattatgagtcatatagaacttgaataatctagataaattattctagccacaaatataggaagcatacaactataaatacctcatcaaggttctatattataatcaagcttgaaactaaatcaagtctcctactacttccaaaaatactacctactcttctatttgcccatatacaactattttctaacttatttcaatcaagtatcaagtatcaacattaacatataacacccaaaagccaaaagctacaaacttatatgcattctctcttgtaagcaaaattatcctcatctactaaaccaacaactaatcatcactatactactttactattttacctcaacatcctttaaatacttaatgctacatattcatctattattaactaaatcaatacaaatttattctcaaaccattattggtatcagagctcagttcgatcatcaatgggcgtaatcctttcgctcatcagcatgagtttggagttcaacttctacctcttccaatttttcataaaaaaacta

SEQ ID NO: 266303 - DNA, 944 bp, Cannabis indica
tcccattgcatttagaagacctgatcgaaatgaagcaaaggcaaggagaacctctccaagcttacatcagcagattcatgacggaggcaacgaaagttgcacggttaaccgaagaagggaaattaaccgcaatactggggggcattgaagttctcggagaactttggaaagacatcaagagagacggaccactagattctatgagtgatttcctcgatcgcacaaatggtttcatcaagcttgaggaggccattcagtgagcaaaagtcgagcttaagcctggccagccacaagctccctctattggaacatccgttcagctccctcagtatccaagcaatacaagctctggcagtaaacggtctaacaacaacaacatgtaaggaaatgggaaaaagggaaagttcactggcaaaatcgaacaggcccctagagaaaattcttctaagttcactgctttctctgtcttgactgaagatttggagactatctacatggtcactcagttactagctccgtacaagaaacctgttcctatgaaaaaggaggtaagtaagagagacatgtccaagttttgccgttttcatggagattatggccacgatacaattgaatgcaacaatttgaagtgggaaattgaatttctaattagaaagaataacccgcacgtgcaaaaatatgtcaagactgatcaaaatcagagggctacccaggcagacaataatcaagatttactgccaccaccagtagaagggcatttacaagtaattattggaggcccgcacatagctagagattcaggcaaagcccgcaaaaggtatgttcgaacaatgtagcacgagcaagaagaggtaatcctggtccttgaagaaaggaagccaaaaattgttggaaatttattttacaaggatcttagatctactcacaagtatgttgtttaaaca

SEQ ID NO: 266304 - DNA, 505 bp, Cannabis indica
aaaatactttttatttaattcttaaattttttaaatgaatttttaattaaaaaatacaaattagtgatgtggaccaataagagaatgacagttggacgcttatttggtacttaacggggaggtacctacggaagttccaaaaccttaacagaaggtatttttaccgccaaaaacttttgttaggtatttatctgcaactccgagttaaacttgggtatttttactgcaaattactgaagatctttgtgaacactgaagatcagaatatgttcaaccattaaaaaccaaaaaaatagtagtagtagtagtagtagtatagtgaataaagtagtgtagtagtagtctacatgataaaagttagttaggcaatacaagattccattaaaattccattctaaatataaaaggttccaaaacagttggtactttttgtgttttttaggattagacattagttcatgtctaaaagaacacaagaatatcacctttcttgtaaatttatcgt

SEQ ID NO: 266305 - DNA, 1037 bp, Cannabis indica
ggggcaataaataatggcaatattaatactcaaattttttgtgggatattctttgaggaagtaagtgtgaggtctcattttggtcttaggaaaattaaggtgcttttaggtgatttgagccaaaaatgacttctcttaaccaccttcacctaagccttacattacaagcttgaaaaagtccttttgatctttggttttgtgtttgtctacattagtggagagagagatgaaaaacaaacctatgagactttgtcactttagagattttgtgcttaattcatatttacataaattgatctaaattgcaagtaatattttgataaaaggcatttcacacacacacttggagtaatcaaaattggaatgaaacttgtgcttgaatttttcacaatcattggacaatctttttatttttctctaagctatgttcactaatcaatctttaagggaaatttggagatcaccaactttagtgtcatattgcctattgttttactttgattatgattttttttctttttgcttgaggacaagcaaagttttaagtttggggtgtgataactctatgaaaatagagttatttatatctttttgggcattaaattagctttgttctcaagtatttttagtttattttagtaacttttatttggttttatttagttttgcaataaatattaattttagtattttagattaatttttaattaattttgtaatattttatcaattttatttagtttcccattttataagtgttaatctcaatgttgtgtatttttgtaaaaagatcaattgtaaaatttggacttattaagtgtcaaaatggtcaaaatagagaacaatttgaattatgtggttgatgtagttgattaatttaccaaagtccaattaagacccaaatatctttttttcaaaagttcattgtatttattaataggctgatatatttttagtgtgataaagttttaaaaaaatatacaaagaaaagaaaaaaacaagtcaaaaaaaaaagaaaaatgggcttgatatttttt

SEQ ID NO: 266306 - DNA, 2277 bp, Cannabis indica
ttatataagagtacaacaaacactaacaaccataacaaaccaatgacagctgtctaacaaccaaactgaaataactatcagaaaactaactatccctaacaaaagatatcaagactttcaactagtgtaatggatagaaagaaataagttttgtcatggaaaaatatattagacataatttttgctaatatggagtggattgatctctttcctctagtgagattatcctatttggatttgtggtgctctgatcacaaagctatgctctttgagtgtttgactgaggagggtgacaaagaaaaaaggaaaggattgagatttcactttgagaaaacctggtgtaatgatgaggagtgcaaattcattcttgaaaacaacgggatagatggttagatttgtgataatcctagtatgctgaaggctaaagctatgagatgtggcagtgaaagattggattaaaaaaaggaaacaactcaagagagtcatgtctaaagctacccataacgctctggtggagaaaaaagaagtttattggagatagagaagcagagctctttgactgaagtgtggtgataaaataaataccaaatttttccatcataagacttcagcaggaagaaaaaattattagtctcgaggatcaggatggaatcttacaaaaagactcggaaaatgttgaaagaattgtgggaaggtactttttccatcttttctaatttgataaaccaagtggagagtgtatccaggaggttactatccattccgaggaaagtaactgaggagatgaatgattttctctgctgtgatttttgcgagaaagacattgacgtgatagttaaaaatatgaaatcctctgaaagcccctaacaatgatgggtttcctgctcttttctttcaaagattctgggttcttactaggaggagtgtgattaactcgtgcttgaaagtcttgaatgagaatgtcccattaaaccaaatgaatgacacccttattgccttaattccaaaagtagagaaggccaccaagattgagcaattcagatcgataagcctttgtaatgtcacttacataattgccttgaagtgcttggcagatagaatgaagacttccctggataaaatcatctccagctctcagagtatttttgtgagtggaagattgattcaggataatgaaatcattggttttaaaagaactgtatgagaaagatatgcactacagagttcttgattgctttgttttttttttttcctttattatagagagtggtgtcgaagttgttgttaattctgcttcatttttttttttctgagagtgtctccagaatgagattgttttatagatttattaggtcattgttatctgtctttctaggtgtatatcttctacatgcaacgcgaaatagtaatatcgcagcacatgggttagtaagatatgcactacagataaataaaagaatatgttatgttaataatataaactattagatactgtccaaaataaataaaactgcctaaaaaaatactaatatgctataaaaattcataaaaaaataatttaaaatattataaaagaaataaggagagggatggtggtactcgtggtcatggttccttgcacgacaaacaaggagaagccagcaacagtgatgatttttaaaagtcgtcgtcgatgggaggtcaaggtttttagggcttcgtggtctacagcggatgaggtccgaaggtgacaccgatgggcctccaacaatgtcagccgctttttcttggccgatttttgcatttttggcccttttcctttccttttgaagctcggggacgggctaagatagaggggcggtcgggttctgctttccctccggcacccaaagcttgttggtgacgagttgtctcttcctctcccgttggtgtgggttctatggtcttgtttttatttatagatgttaattatttaagatctacttttagatctactgctttatatgttgtctttttagtttaagtttttggtatagtaatggatcttcttttgttaaagatttaagggtttgtattcttgttttagttctttaccttccatctatggcggtatggtacttgaaaatgactatgactttgattggtcggtctattgaccttgttgccgttcgctcgcccttgttggtattcatttgcttttgcttatcgttgagttttgtaatgaattttgtccattttttctttgttgaatgaaaacttaaatcttttcctaaaaaaatgtccatataatatatgaat

SEQ ID NO: 266307 - DNA, 668 bp, Cannabis indica
aattttctcgatgtagaggcaatcaagaaagtcacataagtgaatatataacctacagaaaagtgggctaacccaaccaatcttgcttgaacaatggaaagagccaccatcgaatcaaattagccaaaggtgttcgttcatgagcccatgctaaagtttcaatcaattcctgccaatatccacgccaggagattaagaacataaatccagtagcccaaacaagatgtccaaataagaacatccacgcccagaccgataaactattcatcccgaaggggttatatccgttgataagttgtgaagagtttaaccatagataatctcttaaccatcccatcaaataagtggaagactcattaaactgtgaaacgttaccctgccataatgtgatgtgcttccaatgccaataaaaagtaacccatccaatggtatttaacatccagaaaaccgccaaataaaaagcatcccaagccgaaatatcacaagtaccgcctcgtcccggaccatcacaaggaaaactgtaaccaaaatcctttttatctggcattaacttggaaccacgtgcatctaaagccccttttactagatcaatgtagttgtatgtaaacctagagcaatagatgatgaaccaagaagtctccaggtcctattgttaagaatagtgagtt

SEQ ID NO: 266308 - DNA, 564 bp, Cannabis indica
tcttgggttaattgttaatttatctaacaaaaattattttgtgatttttgtgcaacatgacattacttaatatctctttaagccatagttagttatcacttttggaacgccataaataagtttttaccatcaacagacaaaggaggatccattttctagaaacaatagactaaaaagaaattgtctatgaaaaaaagtgatacaaatcaaagatataagaaactaatgttaccaagattgaaaaaaaagtggaaggcagcccagctattattaagaacgacccaactcgaaatagttagccccaatgtcagtggcaaaaaattatctcaatatggaaaggttagcccagtccaactacttctgtaatctgtagtttggtttgtgaagcacaacttttctcaagcttaaatggaattttgtgacaataattttgttgggtcaaaatatggaattatggtgtcaaacttaagattcaaaatgtatatttcatgtgtaattgattgttttaattaagtagaaattataaaaattatggaaaaatttatatttgggtaaatggcggca

SEQ ID NO: 266309 - DNA, 943 bp, Cannabis indica
gttgatgcattttaattaatcttgacttttaacaaaattttcaattctcatattattgtaataattttttttattatattttaaaatagaatagtcattctattaaaataataataaaaaatatttcaatattttaaaatacaacaaaataaataaataaaataaaaaataatttttttccatttcatttcattattatctccaaccaaaagttaattatttatatcttaacatctcctattaatatataaactctctactttatttctctatttttttttgttctaccaaataaccatgaaagtaactaagtaatgtgtgattttctttacgacaaaatattacataggcataagttacaaccttttttttcctttttagaaatattgcataataaagataatcaaaatatatatgaatgaatttaatttgtctttatattttggttgggagacaaacacatgtatatggacagtggtatatgtttatcattttcattttcttgttgccaacaatcagtacggatactcacccaatcttttctttttatatatatatatatattctgtcatttataacatactagttgggtctaacgtgcttcgcacgtgagcccatagttcaaatattttttcaataaatttgtaatatatatgttgattttttttttttaccatctccaatggaagatgtaaaaattaatttatatttggtacaaataatggttttgtgacatttttgcatcaatttttactattatggtccaatgtattattataaattttaatgcaaaatataatatatcattaaatgttcatctaacaatttattaaaaatataaaataataatgcaaacatgttaattaaacttttataataaaatattaaaaatagcataatagtaattataaaatcatagcatttattgtaatgcaaattttac

SEQ ID NO: 266310 - DNA, 1022 bp, Cannabis indica
atccctacacgaagatatcaaaaagctaatagggctgaaggtgatatgcacatcggactcccactattaatgacagaaacaacatcatccaaaccttatttgaaacttgattcaatttaaaatactctccttgttgtcgcataccacttgatgaggaaatatatatatatataatatatatatatatataatagacctattattattaatataatatatatatatatatatataaacagacctattattgttgaatatatatttatagatactttcggccaatttatggatctgataatgatattggatatatttagtcttatggatctctctctcacacacattttctcacgttacctatgtcgataatgtttggatctctgataaagttctttgcatagaaaacgttaagcaaacgccaacagtctgcatagatagatgcttgcaaaaattgagttattatatatatgatttccttagtacaattctttttaacagcaaaaacggttctgtccagctgaaataaaataattatttcagagttcagagttgagagtacttgagattcgttttggacaattacgaacaattgcttataaaaggcacaaaagaaagactccttttaaattcttaactttcattgaagctgccatgtgccttttcaagttcgtacatgctagtcttttaaaatcttcaaatttcaaaataggagattttgttattatattaattaaagtaaaagtttcgtaaatagttggtctttgaaaagataaggttttaagaacacttacatcatatactttaaaatagaaattctccaaaatatttaaaagaagtaaaccaaaaacatattacatcacataacttctttattttaaaacttatttaaaatttattatttatactctttatttataaaataatatttagtgattctacaatttacttcttaaaaggaatgtactggtccaccctctacttgtttcggcatcttgaaaattttttgtctatttttttttttc

SEQ ID NO: 266311 - DNA, 765 bp, Cannabis indica
aaaagttttaggcatatacttcacattaaagctaaaacgccacattcatgcaattagatatcatatcaacaaagttttaaaaagcttaattgggaactgaagcgtttggctttagcttagcgtcaacattaagaacaaaaacttcataaaacatcatcaaatgcatataattgatagaaatacacatgccatttttcctcgtaaaacatgaggaagtaaagcatttatcctttaatggtcctgcacttaattaaaaattaaaccatagactttggtaagacatatagcaaagaataaagaaataaagtgccccaagtctcacataaatcttgataatttaacccaaagacaggatagaaagcaaaaaggacgaatacctgtccagaaaacaatgattcttccatttgatatgccagcttcaaacacatgttcatggagaagcccgataacagtgacattggcagtggacttacttcccgcataaccattaacctgtcatttgcctgtaggcttgatcctggtaatagttctgtaactccagccgaagacagccaattcattactgtttcacaagctggttgcgccatggtgtaagtcacaacccagaacattccaatagacctatcatccatattcatataatccatcatacggtctcctgaattgaaaaagaaacataaaagaggagaagaggccatgaataaatattctaacgcaaagttcctttaagacaaacactgcagttcaaaatgaatgttacaattg

SEQ ID NO: 266312 - DNA, 695 bp, Cannabis indica
aaattatatgatgagttttttttatagatttattgcctttccttctaatttagatctctattttgtgtaagaattgttcaatttttaattttcttcactataatgtacatttcaaaaaattgcgtcattttatatttatataaaaaaaattgtatgataatttttttttgaattatttagtgttttttgtatagatttattattttttaataaatatatatttttctttttaaaaatatacataaaaataaatttaaaattatttgataccgattttgttgttcaattaatatttatttaataatttaaccatcgcacgcgaagcgcaacctgtttactagttgttaataaaattattaaaatcctaaaactaatcattgttcaaaactgtaaagtcattttttggcaatctagatgccaaaatatttttattttatggtgagatttatttgcattcataaccgatattcttatcttgatttttcggtttttattgccttttctatgttaggtaaagattgtattttcagtctggtacttttcttgtataggaaacttcttgtaagagaagcaattctcttatgaaaagttggtttttaaaggaatttttgactattgcctttttcctttattaaattcgattgtgtcttgatacaatcagattatacacactgttcatggcaggtatcaagacc

SEQ ID NO: 266313 - DNA, 793 bp, Cannabis indica
attgagacatggtattggaatccatctacaaaatttatgagaagtaactggtaatattattgtgagggagagtttattcaactgtactctttttcccttactatggtctttttctcattaagtttaacatagtaaggtttttttaatttgacagtattaattataaacaaattatagagtatactagggggtaaaaatttaaattagcctaataattaatataaggtggacttataaaaatttgtcacgtgtaattttcgtacactatggcagtcttctttggtacttaaaataccaaagtagacggaaggagtgtcgaccaaaaagattgtgaaaatttaggactttaaccataatttttctagtttgagaggttgatcgtaccagacctaaaaattttaaaagtttggacacaaattactcttcctcaaaataaacgaaggtattacataatttacctttacgtatttaattagaagatactttgaaaatagattttttcaaatttagttaattagaggactcttatgagtttcatgctaattcactcattcatgtaactcttgcttataaatagagtcatatttccaatataaaagggaggccagtagatttcagtcctaagttaatatgctattgaaatcttgagaaaccttcatagttgaacgcaataacaatgtgacagtcagtagtcccgtgatccgtaagggaaaataccgggttgttaggttatttttagtattaattttagactaagtttagtatatttttaattgagttttaatcgtgtttg

SEQ ID NO: 266314 - DNA, 1271 bp, Cannabis indica
ctatagtacccgattctcacgcgcccattcgcgtaagccctacacgcgcccagaaaaaccttggctctctctcgataatgcgcggcgacgaattcctcgaaatgcttcggcggatttcgaatcgaatgaatcgtagttttgcagcacaaaagaaaaacatctctgttgtaatcccttgaatacttctcccacctagcttgaccgaacaatccagttcctggttcgttgaaatacggtctctcgttcagtaccagagcttgaatcgaaaccagaacctgtaaaaccgtcgattccgccggattccaccgctccgtcgtcttccctgaccaagtgttaagcaaactcaagcagaccgtaccgttcgcgtacaaattgggattaagcctcaaaccgtaagaacgatagtgtaccttgggaggtcgagcaggataatcagaaggaaaagcgagatcgaaaaagtagagtccatcgtgatacggtgtaccagcggcgccgacgatcacagctctgagtagatcgattctgttctcgtaaaccctcacatagatagaatcgggaagattcctctctaagattctccactctttcataatctttttatgtacctgactcactgtagccgaagcacagtcgttcatggatgagctatcatcatcgtgattatcttctccggtggccaccacggcggcaccgccaccaccagccgaaacgacgtcgttcttctttgccttattttttcgttttgcgtagtaatgatcagagtcgttcgaaacgacgtcgaatcgtttaaacggtaaaatatcgttctccaactcagtgccattttgtgccataatcactttactactaagaactgatcttcttattttttttttttttccacagagaaaaaaagaaacagagcttcgttgctttataaataatgaatgacgtcagcaagagtgggtcccgaatagtaaaatcaattgatatgattagtctacgtggatttgaatcaacggtgataaaaaaagggttatatacgatttcaacgtattgttttaccttagcgatgagtacgtactaatttgttacctttttttttatttagagagtaaataaataattttgttgagatatttaggtgttgttgttaggttgttcacaggaaaaagtaaaagtcatttcaagtaaatgattaatgagaatttccccacaagaaaaatattaattaattttaattaatgagagagaataatgattgagatttattagtgataaaatggtcaagt

SEQ ID NO: 266315 - DNA, 734 bp, Cannabis indica
tttttttttatcccttatttaatcaagctatcccttttctaattttaataatgcaagttaacaaatataaagaaataattaccttaccgttgatgttaaaaatattttcactacaaccacaacacaaaaattacacttataattttttttattataaaatcactacaattattatatttaactaataatttaaataaatttactaattaatttaaagataataatactataaaatcagtgaaagtcgataaattaaaatatcatattacaataacctacagtacttttataatccatttgatagtgcatgagtggcatgagtgtgtcaggcacgtactccagtgttgggtattgacaaattggtgttgcctaaaggattgttgacttggtttgcttggttatgggtaccttgatggcaggctagagtgccatggtcatcttcatgtaatggtgcacgggttgtatatgcatgtcttgtacatactctaatgtttggcaaagcttggtgctgtgccatggtggcatgctcttttgatgggcgacctctccttttcctagggggagaaggctctcttggtggaggaggttagtccccacgcctttaaacttgctcttgaagttctttgttatggcgtaagctttctaccaattggacacgcaagacctcattttcttggagcacatcatgcatagtcatggatctgattggtgggcgctccctagatggtgatgga

SEQ ID NO: 266316 - DNA, 1025 bp, Cannabis indica
cgttatttcaagactttttggtcatctctctatagattgactactgactagtacatttttattttatttattttagttttaaaaaaaaaaactaataaactatatcactacaaaaaattataattatgtttagtgataatttttagttacaaaataaattttttgtgactaaaatttttaatcacaataaaaaattacttgtgactaaaatataatatttagatacaagttgttacaataatttaattgtagtcattacaattattgcgactaaaaatacatttagttacaataaattataatttgttgtaaataacactttttaactataaaacttttttagtcaatataaaaaataataatttataactttttttaaaaacttgtgattaatataaatttgatcaatgtagatggggaatctaaataacaattagtacgtatagtcaatattattacttgttccatgtgtttgattttaaaaaataatttcgtgtctaacaaaatatttacaagtgatcttaaataattataaggtacataatcataaaaaaatatttgaaaagttttttagtatgccaaaacatatagaaaatttactgaaacacttttaaaaggtatacctataactttacatttgaaatttactgtacagtaaacttacctataactgtttactattttaaatttttaataactattttgtttacgtgtaaaagacgatgaagggtaaaagtagaaattcaggacatagagaactttttttattcttcataaatctacgtggataaaaattttagcaacatgatttagtacatgttaaaatttgagggtacaatttggaatcgtatcatattagtaattgaatgaaattgaataaaaaccattgaattcaatgtaatttcattatataattagagaattttttttttaacgacttgaaaagttagaggcaaaaaataagtaaaagtatatttaaaataaaataaaataaaaaaaaattaattaaaataatataaaaggta

SEQ ID NO: 266317 - DNA, 714 bp, Cannabis indica
gtttttgcttggaaacttcaggcacgagtggaatattgatgtgacagcttttaagtcatacaaggctggtcggcctagcattacgttaaaggctgaaggaacatccaatatcaggaattgtgccatgatagttatgctcgtcggagcttgtccaactgtgaggggtagccggatttgtcctagaggcgcaactccttggccggagaaaccatagacgggctgaaggcatggagttaaatccttgagctggagccccatcttctcgtaagcagttttaaacaaaatgtttgaagaagccccattatcgatcatggtcctggacaccattttgtttgctatctggacttccacgactagcgggtcgttgtgcggaaatcttatctggacagcatcttcgtcgttgaatgttatggttggctctcctgcgcgtggaactttgggcttcctctcttccacggccaggatgacttcttcttgctcgtattgagctgttcgggcatatctttctcgagctttgcccgtgtctccagcgatgtgcgggcctccaatgatgacttgcaagtgtccatctattggcggaggcatcagatcctggttattctgaccttggttggccttgacgtacttctgtaagtgcgggttgttttttcttgatcagaagttctatttcccgcttcaagttgtagcattcgttggtgtcgtggccgtagtctc

SEQ ID NO: 266318 - DNA, 740 bp, Cannabis indica
ttgcacgaccgaatcagggcttttaactctagaactgaagaggtctgccctaaccctctacagttccatgctacacctctcatggctcctgtggaggagataatacattctcctccacaggggtttgagagtggacagatgagccagagtcgaattcttcaatcaccaacgaatcaataagcgggttcttcacaataccgtcagagagagacaaggaatctgaaaaaacttcagaagggtcttcaaaatcaattttggatgctctatctagttcctgttcctttgtgacccaagggaagtctcgggtaacagtctggtgtctctgaaatagcttatggcacatcatattcaaatgactagaacaaattgatgtcgagccttcaacaagcttcctcctcatgagcggagaattgcaatcaaatcgccgaagaaccaaaacggcagcaaaaatcccgcaaaacgtacgaattttaaggaggccaagctcaccaaattttccaagaactctaacatctatcacatgaggtttgaaaatttttgcccaaaaactaccctccttaacaaggtaaatactaacattacccatcaatgagccaaccaatgagcccacaacgtggctcattcgaagaagggtattgatcacccacacggccaagggcctctgaccactactaccaaaagaaccaaatttaggagccaaccccatgtgttgaaaaactatcttgaaaaagaaagtgttg

SEQ ID NO: 266319 - DNA, 892 bp, Cannabis indica
tgtataaaataaaaaagtcacgaatgcaacagattctttgaatactgttttcgatgtattaaatttttccaaatttctcaaaattttatcagataccttaaataactataatggatacaactaaaaaaaattagactctaataaatacaatcggagtgcacttattttcttttctctctcttttcttttgtctcttttaagttcaaaccccacttaataaatatttattatgtgtattgtccataaaataattacacatcataattataattataaatacagattagaaaaaagatattattaataaatttattttctcacaaatagcattacagtagaagtggagtacatgagaatgaaattatacaatatataagatttcacttatatatatatgtacatacatatatatatatatatcaatacaacatatattctacaacctataatataatgattcttcttgtacacttaataataataagtcactgcataaacacacgactgtaaacgtttgttaccatcctcttatttcttctcaatttcttcatagtagctggaaacaaaaaaaaaaattaattaattagagcatatatatatatatacacacacacctgtataggaatactttaaacaatatattccaatatgagaatcaatatatgcaagaaaatactagactcaagagagattttaggggaaaaaaagcaaatatttttttggtagatagtggtaaaaatttaaaatatggtaattttgaaagtatgattagatatattttttaggaataattacataagacaccattttttgtaaaatatttatatttttacgttcaaagaatgtttttttttacatttttatggttttccaaaaaataacatgaaaacac

SEQ ID NO: 266320 - DNA, 1035 bp, Cannabis indica
atgtgtccgtatcgctattggtccagctaagtatcgggtctcatataatttaatataataacttttaaaaagtattgctagccaatcacaacgcgacatgtcgataaagtgctaacaatgtccttattatatatatatatatatatatatattactcaaataataatgattttcctaatcaaccaactgattactttggacacaatcaaccccaaaatagtatgtttctaatctctagaaaagaaaaaaaaaaaaaagacatattccaatactttgtgccatgaacttcaaaagaaaaaacaataagtggcggcgtacctgaaagtttaacaagggaacattgaagccgcggctcagccgaaatagcaagccaagccagtcgtgaagccgaagcccacctcctcacagcttcttcgggaaacccacacgccaccatcttttccgtcaaccaaaccagctcagctgccagcttctcagccgatctcccactccgactccctccctccctggctctcccgccaccaaccttggtccaagccaagtccccaacagatcgaaccactcgcaaaaccttgtacaacggataatcaactgggccaggctcattcccactctcggcccaaacttcaggcccaacaacacctttctccaccacatccaactcaagctgcccaagagtcctggaaaacgccgccgataaaaccgtccggttaacttcacgcaaagcaggggaaacttctctccggttatcctcaataatcttctcagccaaagaccgaaccacttcgtacttccgtgaactcaccggaatctcgctcatgatcgagagcaactgcgaaagcgctcgaccgattccggacttctccccaccgtcgacggcgccgtcgagggatggcggagagtgagcgaacgcgccgccgtccttggtgtgcttaagcgagtggaaagggaagtaatttggtgttagagaagggattaaacgaaggagaaagaggacaaaagcgattaggaaagagcgaatgagttcgaggagtc

SEQ ID NO: 266321 - DNA, 939 bp, Cannabis indica
agcatctggttttgatagaatggttcaatccctgacatactcgccaaattgttccaatatctagggtcataccctgtcatatcccagggttccaggtaaactactccttgttttatcagtttgtctttaaatgcttctggttgacgaccatagcgagtcgatatttacttacttcgcaataattttatgtaattgctttgccgaattaactgccccttgtcttctggtgagacgtttgccctcaagataatcgaggtatgccttcctccttcagaggaaggttatgatcctttgtcacttgagttactgggcatataaggctgatcatgggcattgtcctgcccctttgcatattgttggaagtgtcctcgcgctatgagaccttctatctcatctttcaactgacgacactcttctgtggtatgtgcgaggtagatattttcccaagtttcattaagctttatatattcaacataaaggggtatatatttgttgtgtttcttctgtttcttatacttgggtagccttttggaatcgtctttcctctttgatcatgaggcttctgactcgaattcatcaacggaatcataccacgactgtcttctgggttccctggctttgtgccttctgcacttattctccaactcgtccattcgcaaacagagaaaatttctttgttttggcccaagtcgttgatgaacattaggctttctcaagttcaaatgttctcgtaggtcacagcggtcgtgacacctgtaggaccttgctcttcctatatggttcattaggccttttttatcatcgctacgatgagggttctctcctcctcacattgatcgattatgagatactatatgcctcctaatattcctcacctcctctcgttaattctgtgatttttcttaaggtttgattcacctcgttctccctataggggtt

SEQ ID NO: 266322 - DNA, 2626 bp, Cannabis indica
aaaaaaatcataaaaatatttaaaattccgtaaaaccgtatttttgtaattttttttattacttttgtatatttgtgtaataattcctaattaaaaataagaataattatataaaggataattatataatacattattttgcgtacatattttacaattttacgttcaattttttttttatctaattagagattttaaaatttttaatcccaaatgtcaattccctgcaaaatctgaccagccatctccggtcagccgcccccaccacttacatcggttttccccaaatctgaaaccaccaagacgtttgttcgtgtcctctctccgtacatctaacctccatgaccatgcttcccgtagaagaagaagaagaattaagctgacgtagaaggaagaagatcgaagttgtcgtagatgaagaagaagaaagaagaagagtaaggagaagaagacagatagttttcgtagaagaagaaagagagatagaaattaggttttgtgttttttattttaggttaagtatttaagtggtggtaatagtggtgggtggtggcaaaaatagtggtgttcgtgggtatggtgtggaatgataaactaacagagattgtggaacgacaccttcaaaatacaaaccgaatataagtttagtaggttttctcaccaaaatttaagtttaaaaaattaaatacaagttaaatgaaagtttggaagatttaactgctaattactctatatattataaaatgaaacatataattaattaattgacggtgtataattttaaactaataatattacatatatgcaacttaatagctacttaataattaattataatgtatttatttccaataatttcaagtcttaacacacaacagaatatattgacatttgtattctcttgattgcaccaaaagtcctaatgcaaatgtatcacactagaatttaagataatatatatacacaccataaacacatgcaaaatactattaacagaaaaagtaaaaaatggttgagctactaaactataataataataataataataacatgttaattaagaagctaggaaattaataaggtaaatttaagtagttagtagcgactactcatttctcctttattatttgtcactaaaaatatatctgtgaactatctattgtccttaatattgtctttggaattatctatagtttaccaaaatgagatggtgatatcttttctaatataaaagttttatattgtttaacgttttggggcggacccgcgtagaagcgaggtagaatagtcattttctctaaaaaaaaaaaattgagaaaaaaatatatattcattggactacttatcacacagggatcttctcatattcgttatctttaatgtttattttagaattgtctaactttttaggagtatcgaatcgtacttaaaactatacccttaagataaagagtaagtttgattagataaaaataataatccttgtacgtaccttttaggtgatgagatttatttgatgtaattaataatgtggtcaatgcatgagagtgagagacttgtgtagtgaaacttcttggaaacttctcatatatatatgtgttgatataatttacagtcatcatccaaacaaaacaatatccttccacaactttattggttttttctctatatcatcgatttatatatataaatagtgacatgaacacatgctgcctcgacctatatatatgtatatatatgtacaacatgacttattatcatgtagttgacattttatcgtaaccacactttgacaaaccattcttattatattatcattaattaatttctttctttcttttcttttttttttaacttttttatattcatgttcacaatggcggagttagaccgaaatttagcggaaatataaaaaaaaatatatatatatatttaatttatttctttaattattttttaattttttaaaaaattaggggactgtaagaattaataataataataataataataatcaaaatccaacaaaaagaaaaaaaaataatcaataataatatgtatatcagccacagagagtattggtcaaataaactgctcgaattgaccaaaatatataaatattattattacacaccaaattatattattttttttattatttttgagagagaaattaataattgaattagttaacaataatgttgaagagtatatttagtgtgttccaacctattccttggtactatctagtatatagttagctaaagtacttatattagtgatataattatattgtacaacacaaaattaattagcactaaaaatttcaaattgatcccttaattttcactaattagataagcttaattagctatttttaatcatgacattttaaaaatgaaaatttggctgatacctccaattctggatatataatatatataatatctctttctcttaatatttaattagtctactactaattggtatatttaatatattaattaaaaaaaaaataacatcatgattacgtatatatgtacgtagtatgtataagtaagaatattccaaatctacacatgaatatactatgtactagtaaaaagttacgtgcgaggcacgtata

SEQ ID NO: 266323 - DNA, 1981 bp, Cannabis indica
gtcagacaaacatgccaaattgtgtaattacctccaattacatacgaattcaattacattgtagctttccaaacacaccctaatatattaaaatgtgtagaatctaatattaaaatacatcgataacattatactacgttttgtattgtttggtagcttgagattgtcttagcatttctcttttttctaatttttaccatcaaacatttgtgttatgttagcaactatgaaaggtatactttgctcaatattatcaaaagaaaactattttagagaattcctaatagcttctcactactctatacattttcaaaataaatcatcaaaattcttctctatattaagataggagtgataaactaataaaaaatattcaaataaatagtttgctttagatatggagacgtagtatttgtatatgtaaaatgaagcttcatttggggcatcaattttgtgggtgattcatcaaaatatggagatttctctaaaataaagtaattgttgtaagtgttcactgttggtcattgtcataaattagagacattttctcttaaatatcttaagaggatgaaggtcattttgcaaagaacattcaaaacaaaaccaaagtacaaaacaacctttaaaatgtccatttccataagggggaaaactagtacaaaatattctaaggcaaagtattgttgttgtctattgtagaataggtactacgatatggtgttatcaacaaagctagcagggtttggccatggagccttcatgtttatgacaacagcaagagacagagttagctacacctacccggatgttaatgccgccggagcttcattgtttctctccaaaacattcaaagcagacactttgaatctctctgatggagggtaccacatgtatgtaaaaatgaaaagagtaagtgatttgtgtaaacaaactcaatcactcatattggtgtgtttgattataatgtgtaggtatcataagatggctgattggttgggaacaccatttagaaatgtgccaagggaacaagttctcccacttagagtttcactttcaaggaagctgaaagaggttgtggaagagaaatataagaaaacaggtgcacagagagggaaatatgtagtgattcatggcattaaatcagattcaaaggcctcaatgcaatctatgggtgatactgatagtttgctacctatcaatgtgtgggcagaaataacaagtggtttaaggtgtgttgtgttgaatctctttatgattatagttagttagttcttctcatcttatgtctaattctatgtttgattcattagttttcatcattatttcaacacagggaatttagaccagtttttgttattccacatgagaaagaaagggaagatgttgagtatgttgttggagatgatgctagcattatattaatcacaacccctggacaggtttgtaatgatacgtgtacctaaaatatgcacaaaaacataacatatagtaatgtgccaagttttttaaccaattgcatttatctaaattagaatccactgtttaaaaaaaacagtgtctgagtgtaatattttgagtgcacatatcattactcgtaactgcgcgtataaattgttagttattttagtatttttagtacatagataaactatacatgagcgtataatgttagattagaatcacgattcaaacaccatgttcgttaaatacttgtttaaacatcttaaattatctgaattttttttcaaaagtttgtgaagaattgtttacaagacaaatatattgagcttgattggctatgtcctttttagttggctgctcttatcaatgattcagctggagtaatagccacaaacacagcagcaatccaattagcaaatgcaagagataaaccaaggtactaacaataacaataatacatctgatcaattgtctagtttattgaaatcctaactcaaaaccttttattttttaatttttc

SEQ ID NO: 266324 - DNA, 679 bp, Cannabis indica
attttgaaataaatatttttatttttatttaaagcatggagaataatcctgaaattagataaagtagtgaaaaaaaaaataaaacaaatattgataaaaaaaaaactatatattgaatataattaaaaataatttatttttgttttgaaaatgttaatttttttttttttaggaaacggttcacaatgttaattattattagggtaaattacgacataaatacttaatgtttcagatttatacacttaaatacctaatttttatttttggagataaaaatacctaatgttacaattctcttatatcgttactactatttccgttaactcataaatatagacacgtggacgattcagatgcattacatttatttttattttattttaaaacttaatattcttaatatcagaaactaaatagttacttgtttctaaaaaaaaaaattagttctcataacaaatttcacatgatattggtactttaattcaataatccttttccataaactgcactggttcacccagctatagtaatttatcttctcttttttttttttttaaactaagttagtatttaagtttttgtactatattagtaggtacgtagtagtaatataagatatatatttggatgtcatggtacagtattgcaagcaatggattgtacaagagtgttctgc

SEQ ID NO: 266325 - DNA, 607 bp, Cannabis indica
gaaaagagtgccaagctttaagaaaagtacatgagatccaccacataaaatcttcaaaagccctaaacgcaattatattatcaacctgaatcatattttttccctgaaagtatgaggaaattaatgtgaaattaaatacaaaacatagataataacactttagttattgtcaaagaaggatgatatttagttggaaaaataaggtattttaatccttgcaaataataacatgtattatatatatatatatatatgtaataaaaataacagttaataatggtatagaaagaaaatagagaatttatatagtaataaattaccttaatgaataggaattatatatatgattaatctgaatattggcgatgtaccaagcgaactccacattgttttattcttcctttgctaatgtcaaactcaaatatgccactctctaccccatcatcatcatgttagacttttatttgggcttacattatattttattggttttattaaaacttgggttgattggatagttctttgctgtgttagcccatgttgttggtgatcaattgttaatgggcttagcatctgtgagtaaagtctaggtgaagcagaagtgtgg

SEQ ID NO: 266326 - DNA, 709 bp, Cannabis indica
catttccatccatctaatcttttggcacacttgttcggtactggttcccagaaactccattttctaggtgaaccccccagaggcaatcctaaatattgaagtggccatcttcctacttcacatccaattctacatgccagacttgaaacgatactctcatccgtacatattcccaacagttgactttttcccaagttaatctttagtccggatatagtacaaaatgcttctactaaccgcaacaacttgtatagcgactgctcgtcatcaacaaagaataacgcatcatctgtgaattgaaggtgactaacttggactttctcctttcctaccagaaatccagtatagttgcctgaactgactgccttattcatcattctccctagcacatccgccaccagagtaaataggaaaggagataatgggtcaccttgtctgagtcctcgtgacccagtaaactttccgcttggggtgccattgatgaagactgagaatgaagtagaggagatacaacctttaatccattttctccatgtttccccaaaacccttcttccacaagaccaggtctaagaagtcccattccactcggtcgtaagctttttcaaaatcaattttgaaaatcaaaccgctcttgcctctacctctgtagtcttccactgtctcgttagcgatgagaattgaatacagtatttgtcttccttcaacaa

SEQ ID NO: 266327 - DNA, 788 bp, Cannabis indica
caagtgaagtaattaaggatataaatataaaattggtcattaattttgcccaatatacaatacaaaaatacaaatgtggtgaggttgttgaacctttattgttttaaaccgtatacgcaagattttgtttatcattaaggaaagggaataatttaaccaaaagtaatatatataaactatatatgttgcagattaatagaatgttaagttgatgagtatataactttggaagaaagtaggccaaaaaaaaaagttgttataaaaaatagatgagaaagaagccaagaatagaatgatcacatgaaactttcatgaaaatcttttatagatatgggaagtattttcatgactcatactacggcttttttttcaaaagaaaaaaaaaataaaggaaatgaaaattgagcaattaatacacgaaaatgttatgagacacattcaaagataccaaaattatttttagtgtgagtatacatgtcaaattaatgatattatgaagctttttatttccattaatttgaacaccacacatattttattcttgacttgactttcaaagactttaaaagctaagagtatgtcaaattaatttttttttttgactcaatgtgtattgtggacaatcccacatggaataaatggtagaaaattcagccatatataagaatatagggctatccactcattgtcaattagttttgtagatggaactcatttactaacatggtatcagagcctatatcccttgcgggggcgaagtgatcatatccgattcgtacctatacaga

SEQ ID NO: 266328 - DNA, 1219 bp, Cannabis indica
ggcaaatgttattgaagattttgcaagaatttttcaagcatctatcacactggtgacattgctctctaagccacactcaattcgattcctcttatggttacacttgaaatgaatggtgaacttctaaagcctttttgtaggagctgaagtggagatggctttgcattcaatgggaccagataagtgcccccgtgatagatggaatgtcggctatgttctactaagaaaattggcacattgttggtcaagtggttactaaagtagttttgagtgtacttaatgagggagccaatccaactgttctgaacagcatcctgattacccttattccaaagttaaaaaaccacaacaaatgagagattattgacctataagcctatgcaatgtcatttccaagttggttttaaaagttttagttacaagattcaagcatgtgcttctgtttgttatatttgaaactcaaagtgcttttctacccaatcgacttatacaagataatatcttagtgacttttaaacttgttcatgccattaaacatagggataagggtcgaaatggtgtagtgactttaaagttagatatgagcaaacttttgatcgtgtggaatggaatttttagacagcaattatgagaaaaatgtgatttgctgaacgttggatctctctcatcatgagttgtttaacaacaatagtttctctttcgtttctctttcttttgaatggagacgtcactggtttttacttccaacgaggggtctttgtcaaggatgcccactatctccctacttgttcttgattgcctctgaaggtttctcccaaattcttcaacatgagaaattgattggtaaccataatggattctcactcactagaagggctgatctgatttcacattttttttattgctgatgacatcctccttttctgcaaagcgaatgaaagctcatgtttggcaattaaaagagtgctagatatatatcaccgtgcttctagtcatcttctcaatcatgataactttgtcatgtctttctccccaaacacaaccttggttgcctagctttttttccacagacaacttgctatgccatttcaagagtatcttgaaaagtatcatacacaggcagagataaaaaaaaaaaactagcttttctagtggaagtaaaagaaaaagaatttggtcggtctcatgcatacttggagtgagaaactttttactagca

SEQ ID NO: 266329 - DNA, 499 bp, Cannabis indica
agaatatagcgagatataacactatcaaaattaattgtgctcggattggaatgattttccaaaaatttgttatattcgctgaaaatcaactgatcaaacacacaatcggttgttgttatcctttggttcaaagattgatcttgtttaactttctttctcagataatagaaagcaacattcatatgctacacagggaaaaaaaaacaacacaagaaactagttattaaacaaataaactaaaactcgttattcaaaaataaaacacagaataaaactagttttatacaaacattaaaacaacaaacacaaaaaatataatgtataagaaaacaattaaaaaaaacttacagaatctgaaaggaacttcccacaagtttggagtgtgtaaaaccacattttctcatcaatttgaataaaactgaagtccatagggggatcaatcttattatcaatgtcggagtatttcttcttagtgctacatataaaaaaaataaagaaa

SEQ ID NO: 266330 - DNA, 339 bp, Cannabis indica
gtgattcaaggaaatgggatattgaagaaatatatatattacgtttttttttttttaatgaaaatcataaattttttaaatataataaccagcaactaagatcatctcctagagtgctgatctaatattatattttgatattttagttaaaaatacttcaccaataatagtgtgctaaaacgagggcgaccctgaaaatatatgggctagtgttatgggatttgaaccacgaccttagatattatgccatccacctcaatcaactaagctatgaatatttgtagcttataatacacttaaattttacttaaataaaagcctagtaattttttttattat

SEQ ID NO: 266331 - DNA, 545 bp, Cannabis indica
tttttagatgttgaaacaggtgcagcagagcagttaaactattctctttcaacttgaaaaaaaaaaaaaaacaaaaaaagtggttccataaaattttatttaataaataatataaaattgggtaataatcaattataaagtatcacattaattagtagttaaaaatttaaaagtaaagatgccatgtaacaatatttggtgaaaaaaaaaattatttagagaaacattgcgtatagtggaaaatacaaaaagataacatttaaaatgttaaaataacaacaacctgtattttattaaaaccttattataaaactaaaataataataacgcaaccttccaaaaaaaaaaaaaaattataataatgctcaatagtaataattaatcctgtattattgtattataggcttatttccttctataaaagaagccaaaatcattgcaattatacaaacaacactcaagatcatcatcatcatcatcatcatcatcatcatgagctcttcactaatcttctctttttccattctatgagttttcctatctct

SEQ ID NO: 266332 - DNA, 1395 bp, Cannabis indica
ttctaggaaggaggtttgaagacatgttgatccccagtgacccttcacgcacgaaaacttatgtgcatgcgggagtcatgtcaattttttatgtggcagactggcttccgtaagggaaggttgtagttgaattaaaattcaagcaatgactttgctttaaaagacaaagggtaaaacatcactgggcatgtgacagactacaagtagtccttcctttccagaaaggagagttagagacgtgtcgtatcccttgtcatccttcacactcaaaaaactacgtgcaagcgagagtcatgtcgaatttttaaaaggcagactttggcttccacgagggaaggctaaagttgcataaaaattcaagctatgacttcgctttaaaagaccaaagggtgaaacatcactatgtggatgacaaacttcaatcaatccttctcttccaggaaggagggttgaaggcgtgtcataccctcagtgatacttcacacacgaaaaacaacttgcttccgagtgtcttggcaaatttttatgaggcaaacttcagcatccgtgagagaaggctaaagttgcatacaaatttaagcgatgactttgctttaacataacaaagggtgaaacttcactaggagggtgatagacttcaagtagtccttctattccaggaaggagggttgaagacatatcgtacccctagtgatctttcacacagaaaaaaagctaagtgcatgcaagagacatatcgaatgtttatgagccatacttcggcttccgccagggaaggctatagttgcttcaaaattcaaacgatgacttcactttaaaaggccaaaggctaaaacaccacgatgtgtgtgacagactacaagtaaccactgggtgtgtgacaaactacaagtagtccttctcttccaggaaggagggttaaaggcgtgtggtacccctagtgatctttcacgcacagaaaactacgtgcatgcaagagtcaggtcaaatttttatgaggcagacttcagcttctatgagggaagactaaagttgcataaaaattcaagcgatgatttcactttaaaagactaaagggtgcaacatcactgggcatgtgaaaaacttcaagcagtccttctcttccagtgtggaaggttgaagatgtgtcgtacccccgagtgatatttcacgcacgaaaaactacaggcatgcgagagtcacgtcaaatttttatgaggcggacttcagcttcgcgaggaggtaaagtgcataaaattcaagcgatgacttgcttaaaagacaaaggtgaaacttcactggcggtgaaagacttcgaagcagtcctctcgttttggaggagggttgagacgtgtgtaccccccagtgatctgtcacgtaaaaaaaactatgtgc

SEQ ID NO: 266333 - DNA, 536 bp, Cannabis indica
tgtaacctttaaagaagaagcaaccgtctatcaaaaaccttttaaggcgtcatatgtaaatttaaatacataatcgtaattatataacctttaaagacgaggcaaccgtctatcaagtaaacttttatggcgtcacatgtaaatttcaatacataatcaaattatgtaacctttaaagaagaggcaaccgtctatcaagtaaattattaaggcgtcacattattaagataacacatttgaatgtaaatttcacttttaaagatgaggcaaccgtctatcaagtaaatattttagacaacaaaagctaattttattatttgaaaagacaaccagcaactaattccataatcgtaattatgtaacattgaaagaagaggcaatcgtctatcaaaaaatcttttaaggcgtcaaatgtaaatttcaatacataatcgtaattatgtaacctttaaagacgaggcaaccgtctatcaagtaaatttttatggcgtcacatgttaatttaaatacataatcacaattatgtaacctttaaa

SEQ ID NO: 266334 - DNA, 971 bp, Cannabis indica
gtattgtttactgaatttcttcagttaagtataaaaaaaaatgaatatgcaaagtttctcatctaaatcaacaataatatagttattgatcaaaaatacacttttaggtaagtgttttttttttaaataaaaaatatgaaaatttttaaaatttttaaattcctttttaagaggaggcatgctttagaagtagataatgtctcgagagaaaaaaaaatattaattaacaatgcgatataaaattttaaaatgtataaaaaaatgataaactaacaaaatattatatctttagacattgcgaaattttttcaacatgatgtacattttaaatgatacaattgtataatattgtaagttcaaggaacaaaatattaattatttcttaaaatagctatatctaaatagttttaggagccactcacgtgcgattatattaaattgtataattttatcattttaaaatattagtggcagtagcagcgattgaacccaccgctaatgatgtatgacaattttgtagcgattgactaaaaatattagcagtgggctcaccattaatatacctgctgctactaattactattagcggttgattggaaatcaacatatctaataatcgttaatagcaaccagttattagtggcggaactctgtgactaataatttttagccacagataagaagattattaacggtgactctttccgcggctaataacctttttattttatttttgtatacaatatagtttgcttatattgataattctactttttgagcaatatattatcatgttgcctaatatctaatttgttttatgaatgaaaatttcacttttctttcgaaaaattgaaaagaagaatagatagaaggaacaccccttactaaatcatcgatttggctatgaacaagaattcaagatttatatataaggctaattagtaatttttctccttgaactttgacatgta

SEQ ID NO: 266335 - DNA, 1076 bp, Cannabis indica
aagaatcgccaagatagcttgtttcacatcatcacagttaaaaaattcaacaatagctgcctatgagcccagttataatcagacctacttcaatcaaactcgaaacaacctttcccttccaaccatttgagatctcagcaaatgcttataatagttaagaaaagcatctcttaccttttctggttgatcatgccatctcccttccatgtcaaccaccgtatagatctgattagtagctcgcctagctcgaatacttgcatgaaagattgcagtattttcatgtccttccttgagccatgttacttttgcttttttatgaagaaaagacaagagagctttgtgagtcattgtatacttctttcgagccttactctcttgttccaacaaggacaaacaaagtgggttcctctgcaacaattcttgacactctatgatctcttgataatcttgatgatctcgactttgaataccactaaaccttgcttggtttatctcttttaatatcaccttcaatctttttagtttataaactaagtaatacattctcattcctttaattggcatctcctaacttccagtaaccttttctcaaaaattaggaacttctttctacattctaaaatacttgaatggaactcttatgaattctttattattaatagttttattatatttttcaaagtaattaaaaattaagaattagttcataacttgaatactttgaaaaaaaaatagttaaatatttgataattatagattttaatgtactttgagttgaaaaaaagttgtattaatttaaatattaaacattaaagaataaaaacatttattaaaacaaactaacaaatactaaacatacacaacaattgacaaaattatgaattactgtacatttgataaattataatcaaaagactataatatgtaaaaaaaatattataatgtataataaattatatactagtgtcatttgttaatataaaattattaaaataagaaaatgatttaaatattatttattttattaactttattatatatattagtagtatatataataaataagtaaatatatt

SEQ ID NO: 266336 - DNA, 7803 bp, Cannabis indica
gacacacatctatattttcgagtgaaaaaaagacacgtgttttaatatgttttttcttttgctaaaaagattttagttttatgttagtattaatatttttactctaaaatttatatttccataaaacatattcatcaacatcaccaatcaaataaatttaaataaacatacgattttggaagaattatattatgaaaagttgtattatattgtataatattatttaatattatatttatattgatttatataaaaaattatattatttttactataaactcaattccgaccttagctccaactttggtcccaaacccgacctcaacttgcaaccctagattttggtcctaactctgactccaatcttagaaggattccacttccaaactccaaacccaagacctcatactatttcaaaatattataagacaaactaatgtaaattatttttcatatattaaataataatattttgtattaaaatttatcatcataataataattacaatataaaattttatctagatataatatattttttttcttatttaatacacctactaaatgagcaatgaaattgtgatattaataaatagtttcattagaaagaaaatgaaaaggggttttgtcggaaaccatgagtttaagcccactgataatgttgacaaacaaacaaacaaacaataataaacaactatatgttaaatgaagttttttactttttgacttactcttttgtatggtaatggtaatagattatcttctcatcactcaaaacttcatatgttattaattcagtaggagattatattctttttttggtcataagacagaaaattagagacaatcactcttttacccgtatagttagtagtagtagcatagtcatttgttttgttagataaaaatgagctgacgtgtcacctaaagatttctctcctaggacactcttgtctccagtctcaacctctcattcctacttttttggtgccattattgatcaagaaaggagaagaatattcatcatgaaaaactctatagaacttttattattcaaagtaggaaggaacaagaaagagggaagaaaaaaaaaaggggggaggggggcaatttatgtttgccttttatgctatatatattagtatctagaagaacaagaaaaaaagactatactcctaatatgaatatggaactaaaattgactcagcatattaaagcagaaactttgaaatagacgaaccatgttttggtttacaactgtggtttttgtattgacatctagttgtaaggaactactactactactacctgtgcaaaaggtgaactctctaccatgaaagtagtaatggttttcaagggccacttaacttgaactaccatagctagcaaaggtggtttacatattccacttgtttgtgagccacgcaaagtgagttcctattaaccagttttaaaacatatgtcatttccaagatagttgaaaacctcagaagcagcagcattactgtttttcatagcatttccaggattgttgaaaacttcagcagcagcagcaacagtattactgttttttatagcatttccattttggttcacagtgaaatccacagtgaaggaattcagactctctgactctgaaggtgtcacactacaggtgcgagctctttttggggttctcagcaacctcaagttctccccaccaaatgcattattctttgtttttctcttctgttttgtgtctaaatatccacaagcaaaagcttccaggactttagtggtcaatggacgatttcttgtactgtgtcttcgggagctcacctttgtttcctgctcagaattagttccacattcaggggatttcactgcctgaggtttatcaacttcgttagtcttgtaatccgtcatgaaaatatcggtttcagcatcttgagagaaaggtatgtttaagtcaaagagtgcgcgaaatggaggtttctcaagaggatgttcagctgctaaaagattactattagggatgcctggtaacttggtatgagtgacaatgctttcactaaaatcacaactgtttatacagctcttggcttcttgttggaatgtcaaatcaaccctgctgttggctgtgctgaggcttgttgcctcctttcgtcttgggggtgatcttcggcgcctttttgcaactgggacaaaagggtgtatatctgcagaaaccatttccttaacaaatttggattttgtagccttgtcttgttgtatgtgtctgagtgtatcagcctcctcatcttcaaaattatttgcaggcaaagtagtaaaactggcgccattaaccaaataactctgtttgtaaccataataaggtaatgttttacatgaattggtgattgtggctctgagatcattagtctcatccttgttcaaaccaaaggtatcagaagaactatatttatcatcaaattcatcatcatgaatctctccatcatcttcttcttcagagtcacttagagaagaggtatgagagttcatactttcacctggcaagcatctaacttccctcactgaacatgattttccatttaacaaacttgtatccacaacagtaaacttagtgacattagcaccctgaatgggagtgcgtggcttgagataacaatggctttctttatttagaatgtcttcttgttccacttttgtttcgtcagtccatccattttcttccttgcttctgtcacactcaatctctataagttcaggatttgaggcaacttttctcaggacatcactaacagaatcaaaatagtgatctcccttcactagtttccttctcgagaacttcttgatgccgggtattagaaagaccaaagaattcctggaaccagtggggaagccatgattataaggctcctcagagtgccaccctctatcaagcaagcgaggccaaactgcttcccaaaatagatcacttgaccgagctttactaagccggaaatcaccagttaaaaatttgatgatctctggggtggtaagtgctgaacatgccttgcccatcggtatttctggacgcacaggagcatgttgattggctttaggagtatccatgacgattcctgtgagatcttgcttcccttttccaactcccactgcttccacaagagcaggcaacccaaatgtagccttcaaagtgagcacatattgttctagtgaaatttttccctccccatatgtcttagagatctgccaaattgttttaagtaaattagtacaaaatcatatcgaaaaatgttaatgatcatatctgcaaaatccctccccaaaaaaaccatccttggacagaaattcaaagcaaactctcaacttagataaccatatgcatacattgggatgtgaagggtacagggtacctaaagaaaagaaagttctatagctgcaaatattacagaaatcatactcatatcagtttatatctttattaaagaaaaatggtacagaaatgcaaatgccctccatgttaacatggtagattggtcaactatgtcaaatagatcccagttaattctggcagaaagcttagtgatttagttaagttcatactcaaaagatacattttggcaatcaatttaagtaagatttagttacctgctgaacagtgatctgacattcttctgatacatggggaagcaaacgagacagcaattcttgatgccttaatccagtgaagattctctgtccaaatatagaccttctgcttttgatttttcgacactctgaccatctacggtatcttttagacccgtaaaatcttccatagtagtatgacaacatttcccccatttgcttactctcaatgaatctcttcaccacaacaaggttcttcccaaatatatacaaaccaagaagaaaaccagcctcctctatcctactccatatgtcacccaagcagccaggtactagaaactggccttgtccttcatcttcaggctgcaatacttcaacctttgcacagtttttcgaaaagaagtcttctgattcacctaagttaagtgaagtgacatctaatagctcaagtttaagtttagatgtaatatctacacattcagattgtaaaagctcattcttgttgttcacatcaacaccctttaaagcttcctgttcttcaagatcttgttctcattagttttctcacttatccacactactggtataggcattccagtgagaacattttgagggacctctaaaacttatttctgcctcagcaagctatttgaaagccttaaatactcatgtactgtaattaaagagggaaagctcaacttggtattcacttccaactctaggaagtatctctggttctccaaagtatatcaaatacatcagaaaacttctgtagaagttgagtttccaccagatacacgtacaccctttttggaatccataacattcatttcaacataatccatctgccaagaaaaaaacacatttgcttttcataattttctcgaatataaattatgaaatttgaactttcacagatgttaatattaaaattatactgcccactagtaagtataatatatgaaataatacactaagcaaaaacagaaaaataactgtgctttgttgatcaaagttattagaaacttgaagcttttcagactcaatgattaattattctcaaatataatcaaaatccaaaaagctaataatcataacaatcttgttcttcctcattgtgtagtttatttaagaatggtgtgtgtgtcaaaaagtttttgaaacgtgagcccattttgctgagaccaaaaataaaaattctcaatgaactcaagaaaataaaatagtagagttgaagtcaatcactactcaattttgtatagtccaactacacctttttcattttcttttcttttctttttttataaaaaaatactattaagatttacataaatttgatttttttttctttaaaaaataaacttgattgatataatacataatatgtttaatgtgtatataagagtagccaaaattagggaagaaaaatattatccaaaaactcaaatatctatacattttttgcattgaaactgattttccttcccctggatattatgcaattttcctttgttcatacactaaaatcacaaaaatagcgagtttattatataaagctagtgtgaaagagcacaaatatttatttatttatttaaaaataataatagagaaaaaaaaaaaatcaatacccagaacagagaactcgatcccagatttagtttcgaaacccaaactagaatagaatgaaagattattattagctcgaaaaaccaaaacctttaaaacaaaaatatgaaaaccctcttaagtacatttaatttgtatctcattaatcaaacaaagtatgaatttttaccataaaccaatacattgtataatagctttgaaacactaaaacaaaataaaataccaccaaaagaaaacaaaaaccaccgtttacagtgataattccaatatgatccttaaaaattaacttatttagtgttcatggaaccgttaaagcacacaagcaagaaaagtacaaagaatcgtacaataatcagagaaaacagcaaccccagaaaagaaaaagaagaagatatttataataataataataataataataataatactgtacctcttcagatgaaaaacaaacaagaaaactagccaaaacccacgtgaaagatggaacctgagaaaatgggtcttcagagtttgacactgattaacaagtttttatagattaaaaccaagacaaaacgtgaagaaatatataatacacgcaccaaaaaaaaaaaatttacagagagaaaacagttatataaatatattaatatatataataaggttttaatattaaaaagagaaaaaacaaaaataagaacaaaatacataaaaacgttaatgattcatatcacagccgtacctgggtttttacggagcctgagttttcatggctacgaaggctgaattggaggactgagagagcagaaaaagaatagataaattaaaataaatgaaagtgaaagagcaaagtcgttctgttgttgttctttgtttttgtttagagagagaaaataaaaaaaaaaataataataatgtacgtcttagagactacaatgggctcttctcctaattttttttcttttaatatatataaacaggatagtcgaaaccccacgcgctgttgcggagcgtgattcaacgcgccgccgctgcattcgtctagggttttgattatgatggttttacgtagctgccttggcttttcaacatgttaaaatatcaaatatgaaaaaccttttgcttttcgccacgtatgaaaaccaaaggtagaaattttttctttgtcgtttgctttggtaattaggtcaatacgacaagtttttagttggttttttttttttttttcttttgggtcgatgataatgaatgatatgattgtaaaagaggttaggtgaatatatattttgagggtttttttttgggggggagtgatgttgttgaacgtgtagtcacgcgcggatggatgattggtatggttttgggatgggattttgatttgttttttaagtgaccaaactaacccttttggatttggttctttgttttttttctatatatattgtttttattacttaaaatatgtcgattgaagaaagaattttttctatttttttttacataaaaattttgtaattaagaaaactaaggttgacacccaaatgaagatatggttctaaaagaactaaggctcaattcaaactcttgagtcttcttgactatggaattttgtaaggttaataacttaatcataataataataataataataataataataggaattttgttgatattttagtttcttgggggatatggatttcaatagtaattactcttttagattttgttcttcttatatgtatttattataccattttggtctaatatatggggaatggaatcaaagctttatttatttttttttttttaattttgaaatgaacatattttactttaatttttttcattgacaaccttttaacttgtcattagatatttggatgacggtttcaaatttcactgtcaatgcaatttggcaaatcataacattatacctttcttatatatatacaaaaatcataacacatacatattcttttcgattgaagagaaaagagtgaattatatttttattttaaaaaagaaaaaagggtgaaagaaaacaaaacaacccaaatggataagtatatatatatagttgatgatgatttagatagattgtcattttaggtttgtttattatgctctatttaaaaaggtagtgtatcattgtttcctcaatattttaaaattatcaaataatgaataatcaaccaacaaattaatttaaatttacatttattattatcacttaaacattataatctaccaacatttataaattatgaacgaaattatagtgctcattaagataatatcgcataatttgcatactaataactaacaggtttgtataaaaaaaattataagccgttgataattagaacgaattagagagagtcacctcaataaagaattatattagttgcatttatttgtaacatgtccaagactagcctttttttcttcttcctatctaatattcacactcttttctcatgcaatttcatatttttacataccaaattacttgtaaaattattaaaatttaaacattaattaattgattgatttgactataaattagtaatttacaaaaaaaaa

SEQ ID NO: 266337 - DNA, 871 bp, Cannabis indica
acttttacaaattattatagcgtgaagttaaattttaagtttagacgtgctatttttctttttctttttttttttttcctgtaagaaaatgactaattaaatttaattttaattttcattattttgtagataattaaataatctttaattattttttaaaattaatatactgatgagaacatgacatataacaacataacaagtctaatcagtacttaacgggttggttgtaacgaaagtaacatagatataactttaagtatttaatctgtaaataaaaaataaaaagtaataaagttactatttttctagaaaataactcgacaacgatttggtggacaagattcaaagttcaaaaattgatgattttcagcaagagttaatttttactagtggatgatcatgaatatttatcaatggcaaaaaattagccaaaaactattttttttcattttttttttttttttttttgttatttttttagttaagtaagatgaaatttattgtacaagaacaaagccttcaaaaacgtctttttacaaaatcaactatctctaccataacttagtggaaccaaactctatcaacaacactagttttctctcttcttttttcctgaaaaatctatctataacaacccttttgatgttatttacaactctagaaaacgcactatttgtattccataaaactatatttttggtctgcccaaatatgatacacaacaacatttactcactgctacattaagcaagagtcatcgtaaagtgattccaaaactgaactaactctcaagctgacatgcagaaattatccagtaataaactgatatttgctaatggtaatattaagtctaagtccaaactatagt

SEQ ID NO: 266338 - DNA, 560 bp, Cannabis indica
tcccgctgaggtggaaaccctggtaattccccaggaaacacgtccaagaattctttaaccactttaacctcttcaggtccgaataacataggtttactggaattaattaccaccgctagaaatcctacacatccactgcatagtaattccctagctttcaacgctgagattcttgggacacgagaaccttgaactgaaccaacaaaaacaaatggttcctcatactccagttggaaagttactattttccgtttgcagtcaatactagcagagtatttggacaaaaaatccatcccaagtatgatatcgaactcagccaatggtaactccacaagattagcgcacaattctctaccttcaattctaattaataccgatctaacccactttcttaaaataatcaattccctattaggcaacagggttccaaatcctatctcaaaaacatcaataggcctaccaagctgattaagaactctcgaacatacatatgatcgtgtagcacctgaatcaaataaaacagtaaaagcaaaaccattgataagaagctgacctgtgac

SEQ ID NO: 266339 - DNA, 607 bp, Cannabis indica
ttaacatgccgaaaactacgttcaaacagtgtattgcacgcgtgactacgcgagtaaaataggctgtttgaacattattttctatattgtaaattattcggaatttcttaaaattttataggttatcttaaatagttataacgtacatgaatatgaaaaaaaaattagactaaaaattttttttggattcagaaacaagtcaagggtgtatcagatacaccccttttaaaggggtgcattgcagaatcacccaataatttttataatttatttttaaaaaattaataattttttaattaggaaaacaatattatatttttatatttttttatttaatttttaaaaatttaataatatttaatttttttagttcacattatatattataaatatataataataatttaattatggatgataatataattaatgatataatttaattattatataccaaatttaatatgttttaatttagctatatataaaaacctatataataaaaataaaacaaaatatatacagaacaaaaaaatacttaaatcatttctcaaaaaaaaaataatacacttaattcaaaaaattataaacaaatagggcataaaca

SEQ ID NO: 266340 - DNA, 797 bp, Cannabis indica
ctagtttgatcacatgggtaagtttagagccttatttcttagtgggataaatattggagaaaataaaatatcgggattgagcggggttgtggaatttgactattttacccctagtcttaaaaatgcttaagttgtaagttatggggcaatttagtctttttgccaaatgaagaaataggtggcttcctaggtttatgacacctagccaatgttatttcagcatagattaaattagttatctttaccacttaaagaaaaataagaaaaataaggaaattaagccaaaattaaggaaagatctttctttccttctctctctctcttcgaaccagctaggaacctgggatttcttgctgaagtttgtgttttcaaccaagaattcaaggagaatcaagctaaggtaaaccctagaacccttgattatgtgcatttttaagttttaagttagtttgaataagtgaatttgggtttggtggctgttagtgttagaaatacttaaggttcggtttttatattcaacttaggttgattagaggttcttgtagttggttttaccactttgtgttgaatttatgcaagtttgagttttgaactcaatgctttggtctttaatggcatgttgagtttcattgagttttttggtgaaatactggttggaatatgttgtttatatcctaattaggtactctggaaggtttggttgcatttggtggggttttgagcaagaaatggaatttttgggtgaactggtgcaaaccgggtaaccggctttaccagtacctgtaaaaccggttagc

SEQ ID NO: 266341 - DNA, 663 bp, Cannabis indica
ccaactaagcgaatcgtcaaacaaccccataatcgtatttttcttgcgtctttgagaagctttaaatggaaatactttgtatttttatccccatgtttcagccaaagagctcgacttcgttgcttccaataaatctctttcttttcttcaacacaattaagatcatgctccaacttttgagtagtgatccaatcttctttttctgttgagtttgcaaggctctctatttttcctttgagatcttttgttctagcaagcatctcctttttttgtttgacattccatgcattcaattttgaaccacaagattgtaaaagtcgatgtagtgtttgaagcgagtctccttgctgttttttcttccaagtttcagtgatgattcttttacaatcttcattatccgcccaagcttgttcaaaatgaaaacgcgatccccatctcttgttgaaggacttcccatctcccatttgatgagcttgaagtagaagcggcctatgatccgaattccaccaatttagaagggagactttgttcttcttgaatttgtctttccaatccgtattgcaaaggattctatcaagtttttcatacacaagattagccgctctaccattacaccatgtaaatcctcccccctcggcttgaatttctcttagatggcaatcc

SEQ ID NO: 266342 - DNA, 507 bp, Cannabis indica
ttattaataatcattcaaacttgagtgagtctcttgtattactcatttataaatgggcaccactcatatattaaaaaacaattaaaatttaaaaaaattttaagtaaaaaaatgttaaaaggtactaatattatttaaaagtgtcatatattattatttatgtaattaagtattgggtctcacataataaaatttaataattattatagaatatctctctaccatttatatgacaccacttatactaaacatcaataataatgctaagaaagtatttatctgtacgagaaactaagaacttttttgacaatttttttgttttttaaaaatatacgtttttcagaaatgagaacaaaatctaatttttataattttcaaaagacaagacttgtttggttagtttactaaatatatttttaagattttttttacaaaaaaaaaaaacaaaaacaaaaacaaaacaaacaaacgaaaaaacacttcaatactctagaccctgatctatga

SEQ ID NO: 266343 - DNA, 1022 bp, Cannabis indica
aatgggatttcaagaaaagtatcccaaaaaatagtaggccatttttgtgaacacggtaaggcgtttttatgagtttactgccttgaaaaacggtaggctgttttaccagaaatggcctgctattttctcagtggcttttttcacaaaattccaaaattcaaccaaaataactccaatctcttccaaactttccagaatttcaaataaggctaaaataaacctatttcatcaaacaattgcaactataaagccttaaataaaaaattaccatagttgagctaagtttgagctcaaaacttaaacctagctcaaaccttgccaacaacacacaacctaccctaaaccagttcaaaaaaacataatttaatccctagtactcaattctaacaataaccaaactcaacagaaccatccgcttaaaattacatactccaacctaacttttcacttgaaaattgaagagaaaaaggaggagagacttacctcaaccctggataacaaaaccttttggatttctatgctaaaatcctcaatatttgatctaaaatggtaaaggaaaatctgaattttcttggtttcttggtttggccgaacaagaggagagagagagagagtgaaaatgtgatgttttattttgtgagttgaattattgaaacttaatttgttttattcagctagataaaactagataaatttaggaattaatattagaaaagcatcatttattccccaataataattaaagcccaaaagacaattctacccttagttttattaggaagtaactgttggaatatatattactaggacctagatttactaacaaatatattttttaacatcctaaatatgaatctctaaaacgataaaacttaaacacataaaaagtatgagaaaccttacattggttgcagcagaattaaatgactccttttgttcagatctctaatccttgttcctttctgtcgcagagtataatcaagatttgagctcgacactcctttagttgtttggattcttca

SEQ ID NO: 266344 - DNA, 607 bp, Cannabis indica
cttggtccaggtctaagtctccattcccggtccgagtcctgcatccagatctagatccaagtccgtgtctgggttcgagttcgtgtctagagtcccgattcgagttttgaattgagtctgtagtcccggtccaggtctgggtctgggtcctagtcagatttcagttccgagaccgagacagggtcctagtcccttggttgtgttcccgagtcccggtctacttccggttctgcttctagttttagttcacggggtccaggtcttggtccgggtctgggtttgagtgcaggtatgggtcctagatccaaacatcgactgtgagttaggtccaaggccccagttcagatcaggatcccggtctcgggtcctagtctagttacactatcctaggtcctggtctgggtcctagttctgggtctgggtccaaggttaggtcttgggtctcagtgccagttccaaagcccgggtctcgggtccaagttccccatccaagtcccagtcctaggtctcagtccgtgtctagggcccattcggggttcaagtcctagttcgagtttaggttcggtttttgatccctctacaggtccagatctgagttcgagtccca

SEQ ID NO: 266345 - DNA, 473 bp, Cannabis indica
cttactataaatatagggtaccaatctcaagcttactactcattatatgcattatattacttccatctaaaagaggtagagagaacttgaaaatctgatgatctgatctaatgttatttttttatttttcatttgtagatgtagaagtttgtacaccaaagttctagaaattaatggctggaggtatttcgatcctaatattattatacatgttcaatataaatttatgtcgatgactctattttaataataccaattcattgattaattaattaaatacaaaataataaatgtggtactaaaacaattattatataagtacaaagcatgactttgcaactgtcaaatagaaaaactaacaacaaataaaaatagaaaaaattaaaaacacacaaggtttttatatgtggtatcaataatccttacagattgttactaatctacgaggccacgcccagagataagattcatta

SEQ ID NO: 266346 - DNA, 2627 bp, Cannabis indica
aatgtaaaaaagatgtcaattttgacatgaggtgtaaaaatctcatttgagaatccatgcaaaaaaaataattgtataaataatactttaatgataaaatttagagctatatatctataattttagaattaatgtttgaatgtttaatgtcattgtacttagttctaactagtttaagttagtataatagatacttataatgtaattatatgactggtttataactacatcaataaattgtctcaaaaaataagccaaatgacaaccaaaggggtgaatttgaaattattcctaaagtttaaaggccacttttattagaaactaattcaaggacaaaattataagtattaaagatcggggcaatattttatataatatgatgttgtgtatgtgtattagtatatatatatatgtgtaatactatatatcctacaaaaaaattattcatctagccaaacaagttgttcattcaactaagagcatacacaattaatcataatcaacacaaaattagaaaatactacttgaaaaatctacactaacataaataataaatatacataatttatttattcatctattttaaattaaaggaatgggaaaattcatacaaaaaaaaatccaacatatatgtttaatttatttatttatttttaaataatgtgaatgggaatattcataaatatattatttataacaacatagatctatagcattaataaaggaagaaatttgtaatggatccttgtgaatgccatcagagccacaaatgccactactaacatcaactccatcaggtttgagaattgaaagagcttcacaaacattctcactcttcattcctccagccaacaaccaaccatgtttgcttctaatgtttggtaatttaaactctctccagttaaatcctcgaccgctgagcatgaataatcgaaacaagttcgaatgagattcatactttcaacacaaaagattttagtgacatttaccgcataagttctcaatgttttgaatttgtaatcggcacaagtagtattagtaaacctataattttcatttaattctgcagtatcagttacttctaactcttatttcaccaaattcaaaaactaaatctcaaattttagacactaacaaagttcttgacgagaattacagttttactaacattaggtacttatgcggcttaaaaattattgaatctatgttgtttacaaattcgagaatttaaatatttatgccgtaaatattccaacattttataatgaaagttcacaaagaaagaatatgcctctaacctgccaccctttgcactgtccacaagaacccaatcaacaagagtagattcttgagctgttatactgtttaggagacttccattttcgtccgcgtgaaggacataaatgatgcggtgttcttgagctaaaattggaaaagctgctctagagttgtctccatgaagctgcagaattagagcaattgattataagtttttgctttgtaaaagtaaaatgaagtgtaaaaatcttgacagacatatagacctgaacaagttcgaggttagatgcatcggaaactctcaatattgtatccatatcatcatccacaaataccccaacaggcaatgcaccgaattctctggcaacttttgagatctctttcgctactgaaatcgaaacagaacgctttgagttgggccaaacaatcatcccaatcaaatcagcacctgcttcagctgccatagcagcatctctagctgatgttataccacacatcttcaccaaaggcctattctttttctgttcctccacagtaatgaaagcttcttctgatctgttaacggcactgcaagtcactcggttactttcatagggcttgacatttgacagacacagcttttcccaattaggacctaacatatcataagatttgtaagacatgctttcattcaaagaatcatttatgatctcagaagaaatgaaaatggagtctataatgactacctcactaagtaaaaatctagaagacaatggtgttctttctcattttaaaaagataaataaaatgtaaaaaccctatgcaatcacaaatatatttataccggtacagcttatacagtcatgaatagattaaaccaatgaatctgaatacattcaactgaaataacctctctcagaaagctgttagacctcaggaaagagaaaagggtgtatctgggtcattgttatagtatgctgagattagtgaaaactgtgaaattaacacagcatcatggagattggggagtcccaagctctcaaattcctgtggaacttgtgagttgtgactcttgacattttctaccatccaataatatttcagcttctcttcttctacaactaataatttcaatacttctgctactattctatagctcctattctataattatgctattgttctattgggtttacagtgtagacatactcaaacacaaaagtaatccaaaccttacagtgtagacctaatatctaaccttataatatcacctttgggctctgtcaagtgtcaacagttttttcgaacagtcttcaacatcttcatactcatcaggatatcccaattatcttttttgttttgtttatcgt

SEQ ID NO: 266347 - DNA, 645 bp, Cannabis indica
actagaatatttcaatagtgatatttgtaaaaatgacacaaaataataaaattagtggcatttttaaagtgttactataacataacacgatttcaatatttttttttaataaattgttttatagtttataattacttttgaactttgcataaaatttgtatttgtttgatcaaacatttataataaaattttaaaagttatatatgatttaatctaatgtatttcatatatgaaaaattaagatgtggttgtgtaacacttttcttttaaaatattttttgaaaaagaaaaatatgttaactattttttttttaattttaaaaccaaaagacaaaagtctgttttgtaaattttatttattttcatttattgattttatttaagtcgagtttcgagaccggggttcgaattcaagtccaggtctgaggctgggactcggtccaggtctgattccaaggccaggtccaggtctgagaccagggcccgatccaggtctgagatctagcggagaaaaacttggatcctccttttctgaagttattattaaagttcctatcaaacctaatgaactattgattaaaccatatggatgtataaagacaattcgtgatgctgttggagcatccattgcatggccaacaatat

SEQ ID NO: 266348 - DNA, 770 bp, Cannabis indica
ttgtttatagggtagtcaagcagtacctgggttgcattgttccatcatgtataagattcttggtatttcagagtacgattagtgtggacagcgtcttgcatctacaatagctttttctctagccctccatgctttttggtaagatatggagacactataattatctgccatgtcatccactatttcatttggtgtgtagtctctctttgggtttacaaatttggttcttattacactaccaatcaggttgcttgttgcattaggatggtctacagatgtgacatctattgagcatgtatgagaatgttgaatctttttgattttgaacatgtttgtttttccatgttttgatgccaagaaactccatttacaattttcatcgatgcaaactagcttatagtcaagtttggaggatctctttaccttgaagggctgattttttcttatagagtataggctgacagcattttgtagtgtttctttgtttgaaaaaacttgtccaacaaatatgttatcaacatgaggatctgagatcacctgacttgttgcttgctggcttgtttcaattgcattttcaacttgattgattacgaagtctgccatgtgttgtgcatactctgtccttgttggtatcacttgggtgattttcattgtatgtttagagtagtcttgattgatagagctgctaccgatattttttgttggaatggctgccgaaaggttaaccatcatagggtatttggtctcatcatcatctttttttttttttt

SEQ ID NO: 266349 - DNA, 640 bp, Cannabis indica
attacataattttttataggccaaaaagatacaaaatatggcattttaaaatttcgaattaaactgcaatgctacacaaggcaacatgtcccctgaaatgctacgcaaggtaacatgtcgcctgaaaagatgacattttaaaattaagatttaaattgaaaagtagtattaggagacatgtcgcctacatactatcatcttttgtatccaccacgtgccaaaattatttggatttttaccctaaaagcaagtaattaatgaataatatattacagactatatgaaatgcaattataagataaatgaatacattaattatagaagtgtaattaataatttaatatatatctgaaaattccttattcatatggagaaggtataatcttgctaagtatgacttactatacacttgttgattttatggtactaaatcagatacgtagtaaaagagtttcatattaactgattatcattgtacaatatccaaatggatctcccatatgtgtgtacattaaatcaaaatataaattaatatatacacctcttgaagattgctatcagggtatcctcgaagcttctcgtatgttgtatcccttaatctagatgatgaggatgatgcaattggactcacaccagtatc

SEQ ID NO: 266350 - DNA, 452 bp, Cannabis indica
tttattccattgttataaaatctctaacaatttctatatttgtacaaaatcatttaaattgattttgcattatctcgatgacggtatttgatcacaaatcagtatgtgatatgtatatatgaatattgattgtcaaaataacaaatcaatatgtgataggtatgaatatttgatcacaatatcatattgatggtcagtttttgatttaccgaatcattcatttatcttgatttgattttttgaattaattgttaaaatactctgacaattaatgtgacatagatgttgttggagtatctcacatataaatataaggtctcagtttttgagtttctcactcattttgtgcaaacagtaaattccatataagagactagagagagcttagaagcccgattgtccacactaactagtttcttttttttccttagatccaaagctcgtgtgggatt

SEQ ID NO: 266351 - DNA, 1865 bp, Cannabis indica
agagatgatagaagaaggattggtagatttagagaaggtcaaaacttaagataatgctgctaatgttgggactaaggtcttaaccttaaacaagttcaagcattgcttgattttgatcaatcttagaagttagtatattgagattcctagaacaccaactaatgatggctgcattctttcttcatcattgtcattcttttaatttgaagtaactagaaaacatcatttctagaaagttgttcactcacggttgctagttccagacggagtcttgtgaaatgatagtcgagttcggaaggatgttcttggatgactatcatgtccactccgagttcagtctttaaaatagctagtcctcccctacaaaagagttctagttggctagttatcactcctggaatggtacattcggatagtcgactctagcagactatatcctatctggatgcatcttcaccaagtttccttggaccgtgaatctaggagctcatatacgttctcagaggctctgagacttaagctgacatggagattttgctcaaagaggagttggttaagttagttatttttaactaacttaacaacctcatttcttccaaccaccggctttaggatattgatcctaaacctataaataccacatccacttatcattttagagattggaataaaaagatgaagaagatctcagagagatgagaatgagagtttgagagagaaaatattgagaggtgtagagaaaagagagagattgggtttcgggttttgtaagaagaatcttctgtagatgaagacgattcttgggtgtaagtgtgagagttgaaacacttagtgagaactcaacagagaatctcgtcttgactgtatagtaccaatttttgctcaatcaataaaggaagattatggtggtgttacagaactggagtagagccatagatcacatcaatctattggacttgaacaagtatatatcttggtgttgatttctttatttctgcatttatttttacttgttttcattactttgttcacccctaattttcatacagttgttggtctcgattttttaatcttgtcattgctaagcgtttgattgtttagagttttattgatttgattctacactattagtcgcaattttcccacaactgttatgttttctttttaaactaatacttcgattaaatattttttttattcaaaatgatgttgtttattgaataagatccacaaaattatacaacgaaaaatacagataacattaataaaaattaaaaatctaagtaaatatatgtgcaatccaatacacacaacaatagcctagtatatatatgataatggtaggttatgtggttaatagaaaattttatacattattttaataatatttaattagtaattattatcctcgtttctggaacatgacacgtggattctatgtcagcattccagacccatcagtaggaccctcatcaatggtaaggtgggtcaagcccattttaatatgtcatttcgggagttatcttggctttgtactcgggatactttctgccttctataggtcaagcccaaaaggtagttctagagtcgtggggctggaagaaaaaggtacaccagtctcggaagactcttccagtttttctatttattctctcttataaataagagaataacaactgtaacactggaaaataatatcatatcgtgatgaaagagaaaacttctcctaataagcacagggcagttatttcagaatattttctcattataatcggatacggttttgacctgatcaactcaagcccaattttcctagtctagcaggtttgtatccttcattgggctggacttcatgagtaagccca

SEQ ID NO: 266352 - DNA, 596 bp, Cannabis indica
atattaattttatctatttaataattatcaaagaaaattattttttaaaatatatttattaattagacgtacaaagtatcttaattaacaaataaactctatctctcttttcttttcaaaattgctcaaacttagtgaaaattctcaaataagacatagatttattttataatattaattgacttattaaatcaattaattgagtctataagataatattatctcaaataatgtgggcaccatgagcctatagtgttaagattcattcccatgggcaattaattaagtcaattagaaatttaatagcccatgtttatgaccatgggcacttaattcttcttaaaattgtccgaacttagtgaaaattctcaaataagacataatctcattttagaattctaattaacttattaaatcaattaattgagtctacaatgtagtattatttcagataatgtggggaccatgaacctatgttattagagtttatgccttgaaaagtatgtaaagatattttttttatataaataagagttgaataatttttatatatgcatgaatgttaaggttataacttgtagttgtacagagaatta

SEQ ID NO: 266353 - DNA, 586 bp, Cannabis indica
  modified_base (571)..(571): a, c, t, g, unknown or other
ttaaggacttttgttcaattttagtaaaaaaaaaaaaaattctaacatggatgaaagttcaaggggtatgatgatttagtacatgtcaaagttcgaggggcatgatttagtagatatcaaagtttggggagcatgatttagtagatatcaaagtttggggagcatgatttagtacataaacaatcactgaaagtagtaaaattgaatgaaattagacaaaagtccttacatcaaacaatctcaatagtttatgggaatttttaacggccgaaaaagttcaaggggcatgatttaactgcaccgcaaagaatttcaaatcatatttttcttgcggtgcggtacggtgcgggcgatttgagtggtttgaacggtttgagcgatttagatgaacacccctatagatatatggtacaccaaaactatttttttttttttaaaaaaaaacagttttagcaactaataatttacaacaaccttaattatatacatacattaattatataaaggtttttcaaaagtaaatgatgtatagtatacaattaactcattatatatgttttatgtttagatnttttttttaaaaaaa

SEQ ID NO: 266354 - DNA, 359 bp, Cannabis indica
cttttgtatccacctgaatttttgcatagtttgaaatttaatggcataccaaatcatgacatttgactaaaggaaggtgttccagtaatgttccttagaaatctaaatcaaactaaaggcttatgcaatggcacaagattgattgttacacatcttggaaaatgatccattagagctgacattatttctggaacaaatatcggtcaaaacgttacaatcccaagaattatcatgtctcctaacgaatcaaaatggccattcaattcaagcttaatagacgacaacttcctttaacaccatgttttgctatgacaataaataaaagtcaaggacaatctcttaaacatgttggattatat

SEQ ID NO: 266355 - DNA, 737 bp, Cannabis indica
atgatttatttccttgttttttcaataacatatctgtatggctagatttttatttttgcttattgctaaaagtttaaggtaaaagaactactactaatatgtaaattataactcaattttttttttttttaaatactcatccattaggatgatggctaagagatttagctaagctacactaaatgaaaatccttcttcacatttagctacacaatattcaacatttaaatatatttaactattttgttctttttcttttattcttttttcttccctctatttttaattaattaaatgaataatattaaaaatatattatttaaatgttgtaagagaaaaatataaagaacatgtacatgtgtgaggtaaaataaaataaaaaataatgttttgataaggtgtttcaaataataaagtaaaaaatttagtgtgagtgagtggtgtgaaatagttttgatttattttaactatctattttgataactattacataaaacatttgtagtatttggatattattgaaaataatattttgtaaataaattacgaagtaaattattttaattttaaaaataatttttcaaaaaatctttttaaattctaaaatctcccaaaatgatttctgaaataaaaattgatttttttttttttttttttttaatttaaactactcttataagatatatatatatatatatatattatttaattttttttttttttaaaaaaattttagt

SEQ ID NO: 266356 - DNA, 1024 bp, Cannabis indica
ttaataaaatagatggtctaattggtaacttttgcaaaatagaaagtccaaaatggtatttacccttttggaaaatcacattcacagatttttttttttttttttaagttaaaataataattgaaaagctattagtcaaaatagaaaaattattataattcctaatttaattctaaaagatatatttttattcatatacaaatattttttcttttaaaaaaaatctttatataattattattgaaattaaatttatcttattatcttttttaaaaaaattatttttgtaaaagcatctccaattacattctctatttttttaaccaaaatttagctaaaatagctaaaaaattaaataaagaaccattcttattatttatgctcaaatcatgctcctattttattcagtattttataattttaatttgttaaatataaattaatttaataaaatataaaaaaaatttactccatctcatgaaattactattaataaaacttaaacaaaaaattagaggctcccttatttgaagagttatgtatctattcttatagagaacttattttttgtatagttagaacttaatattttttaaccttactttctattttagctcaaaatgtacttagacaatatgattagagatgctctaactattttatcatatatttagttaagcaaacacaatttcaacctatccaacacaatcaatcgtgttatagtgtattttttatcatttcaatataaatatggtattgtaaatatctaatagtaacatgttcaatgaataaataaagatcggtttggtactgttaacctgtccaaatcaatctttacttatttatttatttattttttatggttaatttttagtgttcaaataattaatttgaaaaaataaatgtataaaatatacatatatatatttcaagatttaaagagttatagtttaaagtaatgttaaaaatataaacataagacaaatataaattgaatagacatttaagtattaaaaaaaagaaa

SEQ ID NO: 266357 - DNA, 3418 bp, Cannabis indica
ccaaacgatgatgtggatgaaaaagattcagagtccccaacatccagtgaacttggtggacccaacaagaaaattcttgaattaaaagttaattctgagaaacattcggaagttgaatttcctctagagaagaatcttgatgatgaaaaaagggaagtgtcagttgaaaatgggaatctagttggtaaggaagacacaggattacaacaggaaaatgtggctgctgatgatgataatgtggctgatgaagtaacttctgaagaaaaagaaatgaagatcattaagaataactacacagaaccagataagatcaccgaggctgataaaatattaaagcagaaggctgccttaaagcttcagttggagatggaagcagatttacgtaacaaggagatagcaaggcttgctgaggaaagcttctcaataggaaacaagctatttttttaccctcaggtggcgaaacccgatcaagatataaatgtgtatttcaataggagtctctctacactgaacaatgaggcagatgtgctgatcatgggtgcttttaatgattggcgatggaaatctttcactaggaggttaaacaaaacaaatctcgatggggattggtggtcttgcgagattcatgttcctaaagaagcatataagattgactttgttttcttcaatgggcaaagtgtgtatgacaataatgataagaaagatttctgcatacctgtggaaggtggaatggatgtatactcttttgatgagtttttacttgaggagaaacgtagggaactagagaaacttgctcaacaggaagctgagaaagaaagacaagcagaagagcaaagacgaatagaggctgagaaggcagctagtgaagctgatagacaacaggcaaggcaagaggttgaggagcgaagagaatcactccatcagtcgatgaaacaggctgtaaagtccgttgagaatgtttggtacatagaaccaagtgactttaaaagtcaggacttggtgaggctgtattataatagaagctcaggtccacttgcccatgcccaggaaatctggatacatgggggacacaataattggaaggacggattgtccattgttgaaaagcttgttaggtctgagacaaagggtggtgagtggtggtatgctaaaggtatgtaaacacgtgtatgttatctctatctcatttcccctgcaatttgtttgatcttgtagtttacttgaaacgaaaaaagtttagctaggtagcactctggttgatcatgtgtgaataaagctcaggtcatcttactaatttctttatgcactctccatggagtagaggtcattgaatgttgtgttgagagatagaaactcatgtcacgattcttgagactgacttaagttgttgggtgagttagtgtaaggggtatgagaccaaggctagttgtttcttatatacactattagtacaaagttattactttgtctttgaaggttagttgtattccaattggtgtctgtcaaatttctacaaacaagcaccttatggtttaccttttttttgtgtgcagttgttgtgcctaattgtgcttttgtcttggactgggtatttgctgatggaccgcctcagaatgctaaagtttacgataacaaccatcttaaagattttcatgctatagttccaaattccatatctgaggaactatattgggttgaggaggaatatcaaatatataagaagctccaggaagagaggagactaagggaggaaactaaacgtgccaaggtaatgcttaattacatctgtactttgttggctgagtttctgaacaatctgaagtagtattaaattattaatgcagaactttcctcatttcaaggaaaaatttgttgtctttaactttgcgccaatggcacttgcgattcttcattcagattatgaatttacactgaagatattcagtaagatcacattgttaagattctcattatttataatttgtttctttctttcgctattgtcacaggctgaaaaaactgcacttatgaaagctgaaacaaaggaaaaaactttgaaaaggtttttgctgtctcaaaagcatatagtttatactgaccctcttgatgttcatgctggtagtgtggtgacagttttttataatccagccaacacggttttgaatggaaagccagaagtttggtttagatgttcttttaaccgttggacacaccgcatgggtcccttggctccacagaaaatgtcaccagcagacaatggatctcatgtaaaagttagtggtgagtttatacacaacctgtcttgaaaaggtcgattgtttcatttcatgtttgaaggcgtctactgtgataactttccttttaagagacttgagtgttagtttttctggttctgcagttaaggttccgttggatgcatacatgatggactttgtcttctcagagagggaagatggtggaatctttgacaataaaaatggcatggattaccaccttcctgtatttgggggaattgcaaaggagccaccaatgcaaattgtgcatattgctgtagaaatggcccctattgcaaaagtaaacatgttaaccaattcgtcatttttgttctgatgtagcaagtatttgatgagaggttctaagttgaggtgaggtgaccaacatttgtgtttttgcttcacaaccaggttggaggccttggtgatgtggttactagtctttcccgggctgtccaagaactgaaccacaatgtggacatcatccttccaaagtatgactgtttgaacctcagcaatgtaagcttcatcgctgttgcttttatgttctctcttgcatgtaattgaaaaacatgtccatgtcctttagtgattcattatgcatattgcttaataattgtggagttccagatcgattgatttttctgaaatgttataaaattgcagtctccttacttttaacttgcaatagaattttttgacatttatctctgtaacttagtattcttataattcttatcacgtcaaattttgttttctgatataggtgaaggatttccagtttaaccaaagctaccattggggcgggactgaaataaaagtttggtttgggaaagtggaagggctttcagtctactttctggaaccccaaaatgggtagttatatcttctattgattttcaatgattttttgtttcatgcttgacatgtatttcttattttttcatctttgtttctggtaccattgtgctatttacacattttcaataatttttaatttctttttctttgcagattcttttggaaaggctgcatatatggctgtaacaatgatgctcagagatttggtttcttttgccatgcagctcttgaatttctactccaaagtggatctcatccggtaagttgagtttcagattaattaa

SEQ ID NO: 266358 - DNA, 641 bp, Cannabis indica
ctatcgctgattatcatgccagagtaaatccactgtgctgacaacactataatcatgaacaaatacatatgttttggacttaatagaatttataaacatgaaataaatcatgtgaaccatgcaatataaaatgtgatttctgatatttattaattagtaaatctgattatattgaaatgggttttattaacgacacaaaacccaacaggacccacgcggctaaagcttacaggctggcaggagggagatgaggcgcgtcacgcgcctggtctggtggtgagcctcacgagcctggctaggccacaagatgaatgcgcggacggttgggatgaggagagtggatccgtgcgagtgggcttcgactaatccaatttttagtttgcttttaaaattttgaattttggctccacttcttcacattttttccaatttagctccaaagtttggccaataaatacacctaaaaatatagaaaattaatataaaattaaaactaaataaaataaaataataaataataaaattactctaaacaacacaaaaaactataaaaataatattaagactaaaaatttaaaaataaaataattaaaagtcaagaactaaaccaatttttgtttataaaatatggtaaaataact

SEQ ID NO: 266359 - DNA, 1160 bp, Cannabis indica
aaaatatgtgtggcagattaaaattgctctcgtataacaaggtagactagaactgtttgcgtataacaaggcaaattagaactgctcgtgtataaacatggtagattaaaaactgttcgcaaaagtcatggtagattattaactacttgtatatctcaatgaaaataacattggagatgcatccaacttaaagtatcttaggctaaatcgagaaacaaatgtttaaattgtgaaataaaatgcaataagcaaacatggttaactcaaaaagaaagatacgaggcaaaagaaaatatataaattaactatgttggccatctaacatagcaaaggtttttacaaaatgccacaaggggcaaatattgtctcggcctgatggtcattttactgaaaaaaaaaaagaaaaaaacaacgtaaagataaatgactacgtctacattgttggagacttaattggatcttcttcttcttcatcatcaacttcatcttctgcagtgccgaattcctcctttttagtttgctcgcaataagctagcatctccccagacttttcacccagaaaagttaaatccatcccaagataagcaaaccaggcttagtagatagatcgtctagcgattgtgttgaccctatttttggcgtcagccttggcttcttcaagttttctaccagcattggcctgggtagccttgtttgcttcctcgagctcttggattttcttctgggcattttcaaggttgattttaagagtcttttgttactcctcggcttccaatataactttggagacctcggaccgtgagttagtccattgcttgaccaagacctcgcaatgttctctagtctggaaaagctctatttcaagcatctcaactctttggagacctctatgttgggtagcaaaagacaaaagggatgcctgcgaggaattgaaccaaaaagaatgtaagagaaagtataaaagaggaacgatgaaaagaaagaaggaaagtaaaagccaccgattgcataagatcacagccctcttcaccaaactcttaaaactccctttgttgattaaatcccagtcacaaggtttgaaagtcttgtagtgccaccaattattggtagcatgcatcaagcaaagctgcgagccttactgtaatatcccgaaaaataaa

SEQ ID NO: 266360 - DNA, 564 bp, Cannabis indica
acatatctaatgtaatctaacagtcttactaacatgaacgctaaacatgtaaatacatatgcatactgctatactaatcttaccttgattccgaatttaggtgtgccggccaacctgagtggaacaactgctcggcgaattacagactcctaaatcacatcaatcataacttaggtaagtgacacgctaaatcactttttggggacttaaacttgaaattaaaatttttccaatcgatgaatagcatggcaatacccttaacaactcaaaaatggaaaaactagggttcccaaaattgccccaaccggtaggccggttcccaacgagaattccggttctgcggggattcttagggaccaaccggaatttcaattcctacaggtccccctgaaccggaattccagtttagtgcaggaaagcatcaaaaattcataacctcaccaattcaaccccaaactctatgaaaccttcaagacctgctttatataacccaaataacatatttaaagcattaaaacaacaatacaagctcagaaacaactttcaccatgtgagagcaaagct

SEQ ID NO: 266361 - DNA, 647 bp, Cannabis indica
cagtacgtttaaaaatcacgcaatacacctatgctagttagggtgttacaatggagttctatgtagatgacatattagtcaagtccaaaaaggttgggggcacatagaggacctaaacaagtgctttaaattcctttgagaatacaagatgaagctcaatcccctcaagtgctcatttggagataactcgggcaagttcctttgcttcatagtaaattcccaaagaataaaatcaaaccttgagaaaatccaagccctttaggacatgaaatactccacgaatatcaagaaggtatagattttaactggccagatagcagcactaagaagatttgtatcaaagtccactgacaagtgtgtccctttcttcaatatcctcaggggaaacaagaattttgaatggaaaaatgagtgtgaagtttcctttcaagaattaaaaaagaaactaatctcaacctcccatcctatcaaaacctctagataatgaagagttgtgaatataccttgcagttacagaattcgttgtaagtgcagtcctcaattgagaagaagatggagttcagcatccagtatactatgttagcaagaggcttatcgatgcagaaatttgataccttacaatcgaaaagccaacatgttgcatgcta

SEQ ID NO: 266362 - DNA, 628 bp, Cannabis indica
gatttgaacaagtccttttctctcaaagatttgggacatgtgcattatttcttgggagtagaaatttatagagacaatactggaatgtacttgtctcaaactaaatatgtaactgaccttcttgtgaagttacatatggaaggtgcaaaatcttgtccaaatcccacaagctccagtgtaaaattgtctttaactaatggcgaaccgtttccagacatcactctatacagaagcacacttggtgctcttcaatatttgtcacttactcgtcctgatgtggcatttatcataaacaaactgagccaatttcttcatgcaccaactacagtacacttggaagcttgtaaaaagttactacgatacttaaaagggactgtcaaacatggcttaatctatgcttacaaattgattataattttgagtatttataattaataatttggtccctctgaaattataaatacaacttatagtatttatacattatttctatcattttaatattataatattatatgatgttaatggctatttagttttgaattatgtttatgatagtattatacattgcatgattttaatctaacatgttatatatcaaaaaccttagaatcaaaggtatcttctt

SEQ ID NO: 266363 - DNA, 798 bp, Cannabis indica
ttttttttataaaattaaaaaatgatgtacatagggtaaatattcctgttgattattacgcttccttttttctactcacacaatgtactgttttgttttcattttccacatcaattttcatctccagaatagataatgagcatgaataattcatcttatttttatgtttgggccacataaattgaaataataggggaccatttcccaaactagtcaatgaatacagatcagagtgtgcagttaatattacatatgtactactattttaagagttagatgtgagcaatattagcaagcaaagcaggtcatgattggttgagtgtggccttggaatggacgtgaaacattaaatcttgtttggaccacatcaatcttatgttgtcatcaccactttaattgtatgttctatcattccccacctcgtacaatgcaagttgcattacccatcccatgaacatagttacaaatcattttcgtttgcatttgtttattctttaagaaaaacaaaatgtgcataatttgtatatggttggtttgtgtagaatgtgtcactctataaccaaatgctcaaaactattatgaaggataaaaatatttttttcattaaatgcctgaaatacgaataatataggtgcaaaacatttgtgaaattgtagaaacgaaaccaaaaattgatgtaaatgggtcaattcaatatttttacaatgagccaagttgcaaaaagaggtcatacagaatgaaggaaaaaaattataagaactaatcgaagaatgacaagaacccaaattaaaacaggaa

SEQ ID NO: 266364 - DNA, 899 bp, Cannabis indica
gggaactgaatttggatagctagagaaaaaatcaagagaacagaggaagcagaggagttcagtattgatgacaaagtgtgtaataataaccaaccgaatagaaaagtatccaagcttctgttgggcataaactcataaattagtaacttttcttctccttcaatgcagcaacctaagagcttcacaagatttctgtgctgaagtttagagatcaaaatcatctcattcttaagctcttctatgccttgtcccgagctactagacaatcttttgattgctatttcctttccatcttgtaattttccctgcaaacagatcgacatgacatcccatatttaacttgctgttctaattgtttagttattcatttgtttaaaaaagaacacaatgtaatcataccttgtaaacagagccaaaccctccttgtccgagtttatttgtgatgttgaaatggtttgtagcagctaaaacagtatccaattcaaaaatacataactccgatggatcttgttgtttggcacttttgagattctgtagttgagactctgctattccagctttcagatttggagttagattaaatattaaataattttttatagaagtagaactataagaaagtaaattgataagttagaagctgtatcatttccttacttctatggttcgttctccatcttttaaatatgaaagcaatagcaacgattacgagaagagcactaccagaaataaatgcgaggatgatgacagtcttcctggatttgtgtcctcccactaaataacaaatgattatggataatatatgtgttggagtgaagagaaaaagacggtacacaaccattaaaaattccttaaaaaagcaacaccaccttaccaagatcagcttgtgcgaggcgaat

SEQ ID NO: 266365 - DNA, 1436 bp, Cannabis indica
tagatgggggacctagaccagggacctaggccccagaacccagacccaaatcagaatccgggactcgaacctgaactaggacctgacctggacccgagaatctgaagtcagacccagacccacacccgaaacataccccggacccaaactaggataggaacctggacacgaaccaggatcaaacccgaacctgaaccttaacccaaaatcggacccttactcgggacctgaactcgaacacagacctagaatcaggcccaaacctagacctagacccggacctgaactcgaacccaaactaggatcggaacccaggacttagacccagaactgaacccaaactcagatcgagaatggaacttgggactcggacccagacccggacctggacccgaacccacactcggagcttgatccagacctagaccaaaatccgaactcgaacccaaactcagaccaagactcgaaccctgacatgaactttaatccaaactcaaactcagaattgcaactagaagtggaaccgaactaggactaggactaggacctaaacccgaacccgacctagataaaatcaagacaaagacccaaactcgaatcgagactaggactcaaacccaaacctagactaggacccaacaatcctagaccagaattgggacctggacccagcatcaggatagggacctggccaacggaactaggaccgaaacctagtacccgaccccagacctggacttgaacctaggacccagctcatgacatggcacccaaaatgtaaccagaccagcacccgagatcgagatctggatctagagccagggcttggatcgaatccatagtcggtttatggatttgggacacagccctggacctaaacccaaaccagcacccgaaccaaaactcaaacctgaacccagtcctagacccaaacctggacctgaaaccgtaccttgtgacccgaaatcggaagttgaccttgacccagaaatgggaccagaaccaggacttggacctagaaccgtaaccgaacctggacctagacccaaaactataactagaccaagacccagactgaaacttagacctagacccaaaccgaaacccgaacccggatccccacccagacctggactcgggaaccgaacccagacccaaactcagacccaaacatggaactagactcgggacacacaaccggggctgggacctagaatcgcacccagacctgaacttgaggcttcaacatgacccataatcagtgtttgaatccaggactcagacccataccggaaccgggatccaaacccaatctttgacccagaatcggaatcgaaccaggactgggacgagaacccagacctgggactgtaacaagacccaaacctaaacctaaactcaacctgaacccatactgatgttggaatttattttac

SEQ ID NO: 266366 - DNA, 3960 bp, Cannabis indica
aaaaaaaaaaaaaaaccttctagtatacaacacattaaattaaagaatgctcaaatttgtgtaaatgtataaatgtgtaatcacatataacttctcgttttgttatatgtggagttagtaacttatgatttttttggtgagtggagtaacattttattaggcatctaccaaaataagtcaaggacttacataaactcagataactctagctaccaaactcttgccacatcaagaaagagaatcaatttggcaaggttacaaacaattacataaaagaaacttgaaaaccttaagattagtacaaatatcaaaaatgtcttgcaaaacaatcttgaattccgcgtagcagaactctttcttatttaggagcttagcaactctttggcagtctatctcaacctcaacaccgttgtaactaagcttatagcaaagttgcataccattaagaaccgccatggcttctgcaattagtggagacaacgcacaagcagtcggggtgacagcaaaagtcaaatagcccccaagatgatcgtgaataactacaccataatcaagcttcccatcagactcaaggatgtcggcgtcaacattaagcttcaaatcgacccgctagtggaaaggacatgttagacccttagtttacttcacttatgctatgggaagtaaaaggtctcactaaaaataaaatatctcactagaattaatttggagaagtaaaaggtccttagtatatttattgtgtttttattgttggcttttagtttggcttggtaagtgtgtgaatgcaatacatataagtgtgtgctgagtggtatagtgggtatgcttgaactggttgtttgtttcaacatcaataagagaggcccaggctctccaaacctgtagagttttgattgtgtgaaccatatttcatcaatacaagtttttccttcatcgtctattttcactactgaaacacatattattcctattactattatattatactgttgtatttttcaatatccaggcagcaacagtttggttcatatcaattggtattgaagtactaattttggtgaatggtgtcgacgagaatggagaccgtgaatgtcgagatttcaggcatgaaagaacatctaaaatcccatgatcatagcttggtcgtgattacagaacaactaaaaatgttgatgaatggtcaagctcatatcactaatgaactcgctagcatccatgaagctattaggacttctcaaacccctgttcggcgtaatgctagtgagaactcatcaactccaagtacaactgggttcggtatacacgagaacaaagatggggaagacgataagaattctaagctcaaaaaattgaactgcccatgtgtttaagggctgacccagacaaccagacgtatagaactgatcgttattttggcctacgacggttgtcgatagcataacagcttgaagctattgtgttgtgtttgaaaggagcagctctgcattggtttcaatgggagaactcatgacaacctatacaaacttgggaagagttaaaagtcttgctcatttgacgattttgtccagcgcacgaagggactatttacgattgtttccttcatctccggaaagattcaaccgaccaagaattttgtagacaattcgagagtttggccgcttctgtcagaacgattggagacgttatgttggaatcgactttccttacagggcttcaaatggagatccaaggcccattatgaattctaaagcccactgggcttgtccaaactgcagaacttgttgaaattatagaagccaatcagactttagtgagatctcatcatcgatttgagtctgggaagttgggatccactagggcccgaaccgttagtacatcacaaatggatgctaccaaggtaacttcttctagaaaaatagtggggtattgcataatgaatgagatggagatgaaagaaaagaaatatcgaggagtatgtttcatgtgcgatcagaagtggcatcatggtcatgagtgtaaagccgatgaactacaaattattcttattcaagcagagcctgaatctcgtgaagaaattcccatcgaagaaggtttgggtattttcccttcacccacgactgaagcactaattgagatcttcttaaattcagctgtgggattgacttctcctaaaactatgaagttattgggtagcatccaagattaagaagtagcggtatcgactgacagtggtgccacccataattttatcactactgagcttgtttctaaattggctatccccacttcaaccaccgaatcctatggggtccagatggggtcggtacaagtaataaagggagaatgtatttatcatggtgtgcgcttagtgatgcaaggtttggagataattgatgagttttcgcccttaacgttgggcagcactgatgttatccttagaattcaatggttagagacattaggaggcacgtatcaccattggaaggatcacattatgaagctaattaccttggggaaaaaattttacactacgtggtgatcctacactacatagaattcaagtatctctcaagactatgatcaaagtcattcaacaagagaagtaaggggtttgggcgagttgggcagtacagttgtaacagggttgcaccaataattactagctcctatttcaaagtttgcaaacttatgctctagtttttaaatcaccaacgggcctccctcctagtcacaaccatgatcacgccataattcttcgtactaggacatctttgattagtgattacccatatcggtacccccaatcggtaaagatgaaattgagagtttagtcggagatatgttggctgttgtcattttttcagtcaagcaccaaccctttttctagcccagtattacttgtaaaaaaaatatggttgttggtgcttttgtgttgattaccaagctcttaataaggtgatagtggttaataaatttcaattctatttattgatgagcttcttgacgagctccatgggtccaccgtgttttaaaagttggatttaagatcgggatatcaccagattcatgttcgtacaaaagatgtttataagacagcctttcgcactcatgaaggtcattacaagtttatggtgatgtcgtttcgattgactaatgcaccagctaccttctaggcactcatgaatgaaaattttaggccttttcttcgtcattttgtgctggtattctttgatgatatccttatttatagtcctgatgaagctactcatgttgaacatctcgatattgtgttgcaaactctttccaggcatcagttatatgctaatatgaagaagtgttgctttgctcggcaatagttggaatacttggggcacataatttcatctgaagatgtggtagttgactcgtctaaagtccaagtcatgctagattggtcgctaccttgaaccatcaatgaacttcagggatttttgggcctcactggttattaccggaagtttatggctgggtatggcaccattgctcacctctcactaatcaactcaaggaggatcactttagttggactgatgctgctacagaatcattcaatgctcttaagacagctatgacaaaggtatcgctccttgctctcctaaacttttctaaaacttttatggtagaaacagatactttcagttatagaatcgagattgttttgatggaagaagggcctcccatagcctatttcagtcaggctttgaagttccgcactcaactcaaatatatctacaaaaaagaacttatggttattgtccttgctattttgaagtggtgtccttactttttgggtcgaaggtttgtggtgcgtaaggattagaacagcctcaagtttttattggaacaacttctggtgacacttgacaatcataagtggctggtgaagttgttgttggagtatatttaaccaggatctagatt

SEQ ID NO: 266367 - DNA, 916 bp, Cannabis indica
tgaaccgtatcagagtggacatgctcactatctatacggatcggataggatcacttgcccgcaagggatatggctttgataccatgttgagaatcatggggttccatctcaaaaccaattgacaatgagtggagtagcccttgctcaattctctaccatttattcgatgtgggacaatgtccacaataccttctaatcacagttgccgtagatctttaaatacttgaaaagaaaaggatatgcattgtaattacttcagggtatacctgattcttcctgccaggacacctcaaccaatctactaaataagacacacacacacacacacacatatgactctccatggtatgatcccgcatccgatcccaaatgccataacaagaaatttatgttggacagtgaactcaaacaaaaagaggtagcagaaaaggcttttgaacaaaaaggagtttaagcttgtaaaaggaatattagcacataatatattagagcaaaattattaaaggaaggcgggaaaaaggttggaaaacagttatactatgagatatcagaccttaaaataccggaaaaaggaggtcgtcacaagctcttgtagcagaggtgcaaaacttccccaataatgcaatctatacttcataatcacaacagcagtcctcaatcatgccagtatattggttttgaccctgcatcaggcacagatgaataaggagtaaaatgacttgtactgtaatatttcaatccttcatgtttcagatttcttttattaattttatttgtatgagacaaagcttgtattactgaaaagaattacaaatttaaaagtgaacagactatcttcagtaaagaaataaaattttatattgaagtcaaaatatataattttaattccttcatatatcatatagccaaagggcaa

SEQ ID NO: 266368 - DNA, 913 bp, Cannabis indica
ttcaactcatggaaagctttctcctcggaaatccatgcacaattatcctcctctcgccaacttccgttgcatttaggagacctggtcgaagtcaagcaaagaccaggcgagcctctccgagcatacatcagtagattcatgacggaagcgaccaaggtctcacgggtaactgaagatggaaagttgtccgcgatactggggggcattgaagtcctcggtgaactttggaaggacataaggaagaacgacccggtagactcaatgagtgattttctcgaccgtgctgaaggcttcatcaaacttgaagaggctattcagcgagcagaaggtgagcaaaagcctggcaagtcaaaagctccttccactggaacgtccgcccaactctcccattacccaaataattcgagctcaaatggtaaacgttccaacaacaacaacaggcaagggaatgggaagaagggaaagttcaccggcaaaaccaagcaagctccccgggagaatcaagcaaagtacactgcatttaccatcttgactgaggatatagaaagtgtttacatggccactcagtcgctagccccatataagaagcccgaacctatgaagaaggatgttagtaagcgagacatgaccaagttttgtcgatttcacggagactacggccacgacaccaatgaatgccacaatctaaagcgggaaatggaattcctgataaggaaaaataacctgcatgtacaaaaatatgtcaaggccgatcagaatcagaggaacgacaataatcaagacttgctacctccaccggtagacggacatctacaagtcatcattgaaggcccacacatagctggagattcgggcaaagctcgggagaggtatgcccgaacagcacagcacgagcaagaagaagtgatcctag

SEQ ID NO: 266369 - DNA, 646 bp, Cannabis indica
attcagatattaaatattttaatcacattttttttagaatcctcttcgttttggtataattaataatatatttatataatttaagtaaattaatttaagtacacctataaatccaataacaataatcaacgaattattttataaaaaattgcatttaaactcatttttatttataaatttctctcactcaattttaataatttttagaaccaaatgagattaacttaagtgggcatataataattatattaaagtcatttttataaaaaaaaaataattaaaataataacttttagtataggaaaactttgctatattacatattatattttctttatgcaaaagtgaactagattcgtgcttaggatccacaatttttaagagcaaaaaaaataaaaattttattaggttttatttaaataaattaagtatattacaaataataaatatttatagtttaattagcttaagtgtataacatattatgcaatgtcatggttcgaatcccataatactcttttttaatattttttatatatatatttctgaaagtcagagctcaaaaatctaattcactttaggttcatatattttcaaaattaaccctgtttatatccatatccgttattgttgaccgagattttcg

SEQ ID NO: 266370 - DNA, 610 bp, Cannabis indica
cctttctcttttttttttttttaaaaaaaaaaacaagtagtatttagtttttgatattaagaatattaaattttaaaacaaaataaataaatgtaatgcattttggccctctacgtgtccatatttatgagttaataacggaattggtagtaacggtgtaagaaaattgtaacattcggtatttttgcctccaaaaataaacactaagtatttaagtgtataaaatctgaaacaccaggtatttatgccgcaatttacccttttgtaaaaaacaacagtctatattctttttgtccccaaaaaaatatttaaaaaactataaattcttaattttgtaattttgtaatcattaccttaaatactacctttaatggtaattttttaatcacaacataaatttttgtaactaaatatcacttttagtcacaacaaaaattacttattactaaataatatttaaatacgagttatcactaatttaattttaatcacaagtgttatagttaaaaacacatttagtaacattaaattataatttttgtgactagtacttgtagacaaacacattttaatgataaagtacaaataaaatttatggttagtcataatt

SEQ ID NO: 266371 - DNA, 528 bp, Cannabis indica
tagactcttgaagaatttttaattatattataaatgattgaagaacaaactttaatatatttctttctatatattaagaaatattaaatgtatgttttttgttcattagtagagaagtcctaaagtagttcatatgcataaaaaattatagatatatgatcatttgatatggaaattaagatcatacaacaaagatggaacaaatatatggtcttagagtaccatcattgtcacaaatgaaaatttatgttatcattaatgtgttatgttcatatctacttgaaattataaactttggtatgaattaagttgtatacacacacattaatgattaaatcagttggataaattttaatgtttcacgaacccctcatttataatttagaagtcaacacatgtaatatccgctaactccgaaagggtatttttgtaattttatttagctgagagtatttttattatgttacatatttatggatttaaatatgtatgggattatttttatgatgatataatatttaattttat

SEQ ID NO: 266372 - DNA, 940 bp, Cannabis indica
aacataaaatgttatttctgatctttattaactagtaaatatgattatattgaaatgggttttatttagggcacaaaacccaacaaaaggttcaaaggaagaccttgaacaccaatccaggatcctctgcattccacctttacattatttttttggttatcccaactccaaagagagaaggtaacatggggttgagccgttagaacatacattttctgcaccttgactaactcttctctttccatctcatccttacaccaaatgatacatctatcatcaaataattgactaaccatcagctttctcgccaactctcttgaaagattaaagaagatagtgctccgattcgcataagtgttgtttctagcaaggataattgccaaactccaatctctagactgagctttggaccgcatatattcatagaatttaggttggttgaatctcttctcagggtatagattttttggcttgaaaccgagattaatttttggatataattctttccattcaatttttcccttgtttcaagccgcaacatttacattagtcttctcaatgtgttgaattttcaatgccggtttcgccatctgtttcaccacattagcccaagagtgttggttcgtggagcccctttccttccgttcttctcttttctggctacttcgttcgcaaagttctgtcgcctgtcgttttacaatttcattaagacattcttttaattctgaccagcctgtcgccctttcttcttctggcacaatgatcgtattcatcttgttattttttagcactaaaatttccataaaggatccattatagtttaaaaaccattccaggaagcaactagcagtgctgctcctgaaggatcgtttaaagtcaattttttgtgatctgatttctgttgaagttcatctagagtgtcaatgatccagtccactgc

SEQ ID NO: 266373 - DNA, 1084 bp, Cannabis indica
tgatggtcattgatggagtcactcaatggttcatcaagactacatcaaggaagcaggaaagtccgattgttgcagaactcgaagccatcaaactcgctttgctttgggcaaaagagaagcattgggaggacgtgtgcatcttcactgactctcaagtcattgtgaactcagtactgaatgaaactattccgaattggagatgttggtcccttttttctaaggttctggagttgaaaagaagtttagttaactgctcttgtgcttttgtaactcgcgatgctatttcttttgttgatgttttagctaaagaagctagaagttcctccaaggaacctctgaattgtcaaggggagggattttcccctgtggttcccatgaaccttttctcggtttaatttgaactttgattctctttcaaaaaaaaaaataatcacagtcttgaattcactcccaagtgaaagctatgagcatattttgtggatacaataatatatgagaaagattctcttgcattgcattaatgtccaaataaattatgaaaagaaaatctgaacttaaagaagaaagtttaggagagagattgcagctggttcgttgaagcaaagatgtgtaagttgaaacactttacatggatgatgaaatttgaaatcttctctttggcatacttttgttaaaatcctcttaattaagatattccatgtcaataacaaataatagtgttgacattggatcttgttagccaactataatatacagtaaggctgttaggagatcacctctaaaggattccatttttagtctatgcccactgccaaaatctcaaaagagttcttctttctaaatacaaatgactatatagatctaattatttatggccaaaatcactttgcacattaatattttataatttcaaagaatatatttctagtcattattattagcttttaattatcaataatatatagagaatgtataacaaattagaagattaaagttagggtgactattcaatggttacatttttattgtaaccatcatggttatattttttcttttgacgttgtaatagcatattactaatggt

SEQ ID NO: 266374 - DNA, 700 bp, Cannabis indica
tcacaatcgacactaccccaaggcagacatgatgggatgtatgccttaaaagaaagtaataatggataatatattagagtatatatgaaatataattataaaataaataatgtataaattataagagtataattattaaatatttaaaaattctttattcatatggagaatgtataatctaataaggatgtataagagaattatgattatatgatatgaataaaataacttggtactgtattaaagtattaaaaatctttaatatgaaactactaagtacggttcactatacactatacttctagtgtgtgtgattttgattcggatcacatatgtagatgaacatgtaataaatatactgtgtataattagattatgcatgattggaccgatgtgtacaataaatattttttaccaaacttgttgtttaccatgaaaagagtttattgtatcacaatgatatagatcaacttgaattttaagtatattatagttgacggttttaaaccatatgctatagtgttatagctgatgattttaaactataagctatagtgttatagcggcagttttaaaccatagtatagcctgtagtttaaaataaaaaatttgcatcttcttctcgtctatattgcaccaaatttttgcctttcaataataaattgattctgaaaaaacccttgttatcatcacctgaaaa

SEQ ID NO: 266375 - DNA, 576 bp, Cannabis indica
ccgtcgcgaattctgatatttgtagtagtgaaactaagtgttagatactacaaattatgctaatcaagagaagatgaagactcaaagatacaaaaatttcggtgtatactatattgaagaagcaaaagaagatgaaattgctaaatcttcattttaaattataaattacatataactaaaaattttaaaaattagaataacaatcttatgtaaaattttaaaataattaaccaccttttttaaagaaatagaacttaaaacttactcatatctaatataatattttatgaaaataattaattcaataaaacttataatattttaattattatatcacttattttaaatagaaaaaataaatctacaattgataaatccatttagtggaacaataaatggtcaaataaataacaacactaccaacttatataatttatttctcaagaaaataactaaatatattgaaagtgtttctaaattattatcaaagtgttggatactacaaacttaagttgatcaagggaaaatgaaaattgaaatgtacaagaactttaattcatactctattgaagaatc

SEQ ID NO: 266376 - DNA, 3406 bp, Cannabis indica
tgaaacataaattgtaattgggagggaccaccatataataagcttttgataccaagaaagatatataattccacaaatttaatgtcgagcaaacattaaaaaagagagaacctgcaccagtcagcaaatgaacatggcaggtaaattggagtatttagctagcttcactaaacatgaatgtgctgaatgctaaacctaatctacaacaaagggagctgaaactactcattataattaaataaaaaataagttctgatccataatttcaatcaagataaatccaaataagcagaaggcaagcgccagagttctactcatcttgcttgatctcaaggcccttgagccttgattccaattcgtcatcattatcagcatcttcctcatcagcatcatcctctccatctgggtcgttctcatccaatagcccaagcatactaggtgaattcttaaaaatatctttcacctcatcaattccttcatcagatatgtagttcccattaatattaagcaacttgaacccagatttacgcaaaacaacttagcgccaaaaatcttgccccggcccttctgatcatatttgtactcatgtcgacctccttcaactggtcatgaccatcttccaatgctttaccgatcagaatggcaccttcatccttcagctcattctcagacaggtttaatatggtaaggaattgttttgcagctatagttgtagctaaagcagcagcagattttgtagtaatgtcatttccagccatttctagcacttcaagtgaaggagcagaatccttgagagcatgggcaagcgcttccgtaccttcatcctccaagttaatgtaactaaggtacacttcggtaagatctgaaaaggcaggaatagctttactcaaagctaatccagcttctacaccaaacatattatcacgtagatctagtttcttcagattggtacaggtcgcaagtgcttcagccagtgccacacccccttcagaacccacccttgtagaagaacagcggaaatcctccaaaacaggagaatgtcccaccatctttgctatagcaactgctccctcatctcctgtcatgttattgtgaaaatgaagaatcttaagcttctctgttgatgggattaattcagaaatggctctagcagcttcctcagagattccatcattcatcaaataaagctcctccaaattatgttgtgacctcaatagggaaccaaatgccctgacacccttctcacccatggcattgtttgaaagatccagaaacctcaagacacatccttccaatgctgcagaaaatatattcataacttcaagagcttctgcctctggccttcccgcaataaaatctgatagattcacttctgtcaattgatctttaatggataataagataggttcagcaacgcgagctgcacctaatccaaagcttctattgctgaagcaaatcttagtgtattttccttgtactgatagtggctttaaaagctcctcggcctcctctgcatcaataaaggatcgatgaccaccagatatatcaaagacagtctcatgagcagcaccaactttttcagatgttatcatctctccatccttcactctaggacctctttttaaaacttccagcataagcctacttgattctttggcatatatttgtactgcagaacctccatcgccatctggttccttctcaaaatgctggtttgcagttgcaaaagcaatattctctattttctttgaatcctgctcagcctcttctttatcaagcaggccatacttcctagaaaaaatagatggagttatgagattcttagtcattctttctacaagcagcagtctggtactctggctggggggccataatttaattgatgtcaaccggtggttgaaagtttgtgcagtagaatccatgtcaaaattacctgtaacaatgtaaacttaccagttaaaaactcgtaagagggtcaaaaattagtaaaatgttaacgagggaggaacaccaataagcaaaccacacagagagtcatagtcactattcactaccaaggtggcaaggtgcatttatgtgcattgtgcacaaacaaactcaacttggctccacaatggtagagttcgcatacacttttgtacagtcaagtcaaaagacacttcacaaattacattgagactacccaatgggaccagtggcaaaaataacagaagaagtaacagttatattgatcagaaatgaagtttacggtaatgacgaatgctccagtgcctctattttaatcctcagatgatggtggcatgatacaactgacaacagttcacgagtatctcgaaaattgaccgtaggaacatatattttatgcaaacaacagaacaatcaaacgttgaagcttacacagttaaactcattacagcaaacgattaaagttgattgttgatgtttctgccatacaatattgaaagaacattcactaaaaattctcctatttattaacatctcttaacaatactgcttcaataaaatccaataaaaacttaagaacataaataatcccaaattaagttgcgtaggtaagaaaaggatatgaaagaacgactatgacagacaaagaaacacgtcggaatatatgcattatattccgacgtatgacgatctaaatcagcaaaaatatatgcattatatatatatgagtgtgtgtgggatcatttagcagatccacgaaatgaaatatcgtacatatatttacacagatctatggcgaataatgataacaccctagagtccaatttgtgaataaatttcaaaaatatgcatacaggaacaggaaattggcaaaataataataaagtattaaaatatacatatgttaaagaagcatagttagtgtacctgagaagcagtgaaaccctaaaagtttgggaaatttgaggtgggtgtggcggaaatgaattctccgggaaaaggaagaatggggggtttggattgcgtgcgtgggacgcagaagaaatgatgaaagaaaaggaggaggcgatgcggagagagagtggatgattgaagatattgatattggagggaaaataatgattaaaccctcattctcaaatctgaaatctcaaaaactcaaaattaaattgagagccaaatcgtaggcactacgttcttccatttccactcaaataactaactaataatacctctttctttctttactttacgcctcatttcccttcttttctttcctcccttttgtgggccgggcccaaacctttattaggtagggctgagcctttccaaagccttttatttgttgctcatttctaaggcacccacttgatttgtttttattaaaaaaggatttctttaaaatctccaattgctagccatggttgaatgggagaaacat

SEQ ID NO: 266377 - DNA, 3922 bp, Cannabis indica
gaattggattggatgactttctgcacacccctaagtttaacattcaacattatagctgctaaaaaaaatataattactggaccattcaaaggcttggcttgtaacaaactttcctataaaaacatcataattatttactatgcaaagatttgagcaagttttttttttttttttttttttttttttgaaagaaagatagaattcaataaaataaattaactatgagaactaataaagtgtggacaagtatctggttaaatatactctcctaaagaactactaacaaaaatagcccgtgcatgcgcaacactatttgtagagtacaaaatagtcttgcaagaacaccattaacaattgttaataaagaaataacataaaaaatatttggctgacgtacgttattggaattcggactattaatccagcctatgaaaactgtcgaatcactttttataatggagatagaaattaatgcaaattgtcgagcaatacccagtcccaatctaaccgcaagcaactccgtcaaattcacaccaaactcccctaccacccccactgcccaacaagcccaaaccaccccagccctcactatcctgaatcacacctcccaattccccacaaaccctgcccgattttattgaagcgttggtagtcaaagagaagtgccccattggtggaggacaccaccttgtggtggctctgccaataatactagatgttttcatcctcataccaagtcattggtactctcaaaattcttccaaggcccactgagctagttcgagaagaattgccactcttgattgtgtcttaccaaacaatacaaattttctatcataccaaatccaccaaggtacatcaccatcaactcgaactcatcctgagaaagttcataaaaaaagaacattaagaatgttcgataccaggccatttaatatctatgaatagaagatagtaatcctacttattcccaaactagagtaagaacatgacaaaaaaataaagaattaactggatctcaaaattctcactacatcttgaacaacatagaggaactataaccttctgagaaccaagttacgtagctatacatggatggcatagttaaataggtgccatgtaaatagctttaattttggagggacacccaaagttcacataccattctaccactacaccaattgagatgaatcaataacgccctcagcaaattgaagggaccatgccacaacatagccactcctgaccgaataaacaccttcccggtcatagtgacagcaccatccatacacacctcacactaaaggaatagataagatagcctcaacatcaattggaagaaacgtcccctgaaatttctcaacatcccattcgccgttgtagcaataaattcattaaccaaagtgattccatccacaagactagtaataagtcgaaaattcacatgtccatgtatccatgggtcacaaaatatccttacctgagaaccatgaccaataacatgtctgatgcccttttgaattaacttaaaatcccacacaaggctggtccatagatgggaagacccacttctttctttagtttccacaatcgagcaatgggggaagtacttatgctttaaaacctgagcaggtagggaattttaatatcctccatacttgtttactaccagagccttattgaatagtcaaaaattacgaaatccaagaccactcagggtcttcggcttacaaattttctcccacttaatccacgagattttttggttaaccccattggtcccccaccaaacttctcttactattgacttgaatttttcacacgtatatatcagctatttaattaaacacactcatcaagtaatttagaatagcttggagaattgatttaataagtacctcacgaccaccagctgagagaaagctacgtttccaaccacgaattctcatcaacattacaaaatagacttttggtgtcaagttctaggaatatttaaaaaaaaaatgatactaaagaccatcctaactctttagtctcgatttataattgacacctataatgactttaagtgtcagttagtagaccgacactaaaagtatataactgagaccaaaaaaagttagaaaatatatatacatataaattgagtataggtatcgattcataactgagactaaaagatcttttggtctcaattataaactgacacttaaagttttaaaatgtaaatctttttaacttttagttgtatcaattttttcttaaagagtatataaggaatattgtataaccctagagaaaatcctaaacactatcctttctctctctgttgctcccaactctctctgttgctctctctaccatcccctctctctattatcccttcgtgtgctgccattactagaacaacttcagtcttcttcaattgcaacaacaaacaaggggtcaccgccctcctaaccccaaaacccagagaaaactagagatgagaggttgctgaccctctctcttctctggtttacatttagacggtgccttcgaccatcgtttggccataaggtggttaccaccgtgcttagggacccccaaaaccccaaaccccaacattctcgtccctctcgcactccatttctctcgatttctctctcgtcgtaattgaatcttagtacctggccatttggttttaaatgagccaaaagaagtcaatttttttgttttatttaaatgggtttttggttttgtttttatctctaaatatcgtttaggtttatatttttaattctatttgatgtatattttactgtaaatgtgtcaaagaatttatattttgatatataaattattattataaggcttatattgtataaaataaattggagtgcaatttattttggattgatctgttgaaatttattcgcttgtttatgatggtgttttatacagttttaagaatatgtaaattttatttttggatttgataatgtaaattttattgtttggatcttagttttggctcggagtaattcatcgtcagatctgaaagttttttttgtttttttttgttggtctcggttctaaaccgagacatataatacaaaaattaatagcacatctctaagtattggttgagaaccgacaccaatgcccaaaagtctcaattcataaccgacactaaaaatatacgttttgtctcagtagaataggtgtcggttctatgaactgacactataggtataagtgtgagtttaaaactaacaccaaaagtgtagtttgtagtagtgcttctgcactttctcacatattctctcaaaggtgtgcttcttatttctttcgaaaacagtcggcaaaaatttgaaatgcttcggtctgatccacttgagagacattcagaccaaatgtaattgcccacttctcatagttgatcttctggccagaagccaactcataagtctgcaggatacgccgaattgtcttagtatgtccaacaatcgccctttcaaagatgagattatcatcagcgaagaataaatgagacaccctcagtccaaatctaggacacctaaatcctattaactcaaatttagactcagcttgtaagatgagagttgatagagcctcgccataaaataagaacaagtatggtgagagaggaaacccctatcgtaatatcctagacaaaactacccttcctctcgaccaactattcaccaaaaatacatatttaggagtcatgacacaatcccttatagcaatttttctacttttattctctttaactttattagcagtgacaaaagtcataatctatagttaaatcaccacaaaggtaacttaaactattatagacgtgacatattattattaatataattaaatattgagtcctacacatttgattcaataaacaatataaaaaattact

SEQ ID NO: 266378 - DNA, 629 bp, Cannabis indica
tgtgtgtccttattgatcgttgtccagtaatatccttgtctaatgatctttttagacagactttgccaacccgcatgatccccgcagaagccttcatgaatttctctaatgattttgtttgcttcaacgggaagaacacaccgaagtaggggcattgaataccctcttctatatagtttgccttcgatcattatgtaacgaggcactgcatgctaaagtttttgcgcctcatttttgtcatttggaagttgcccatcgagtaaatagttaacaataggcatcatccatgttggagagctatctatcatctcgacgtcttctgtttcacatatacttggctcgctcaacatagtgaaaccagatttagttcgtccagatcattttgcgagccagttttgctaaggcatcgacgttggagttttgttctctcagaatttgttcgattttaatgtaatcaaatctttccaagttcttccgaactatctccaaatactttgccattttcaagcctttggcctggtatcccccgaggacctggtttacgatcagctgcgaatcactatgacagatgagatttttgacttttaaggcctctgctatctttaggccggcgatcaaggcttcatact

SEQ ID NO: 266379 - DNA, 616 bp, Cannabis indica
tttaaattttaaactcaaaatatcaaatttaataataatctattgaaaaataaatattattaatttttaaaaaaatgatatttaagttcaaatatatttaaaaataatattttattttaaatttagggtttgaaaattagaaaagtccgaatttgggaaaaaatcccataaaaatcgggttgggaaggtggctgcccaggaggctgcacgtgcagcctccaaaggctgcaaatccccattacgcgcgcagattggtggtcgagcagggtctggcgtgcggcaaaccccggcgcttgcaggatgttcgtgggcgaggaacgtgtctgaagggaggtgtcccgtgtctgaagacactggttgtgtccgagtgcacgcgcgcggatccctggttgtccaagtgcctggtgcactcgatgcacccactcgacaaccatggcacctaaatttcaaaaattcataactttttcaatttttatcagaattaagttccgtaaaaaagaaaattgcctaatttttcacaaggaatccaaataaaatattttcaaaaacagaaaaaatatttttcatggaaaaatttcgtactaacacatacattcatcacataagcacataaacc

SEQ ID NO: 266380 - DNA, 1241 bp, Cannabis indica
tttgtcatttcagaaacacaatcggctttcctctccaacagactaatcactgataatattcttgttgcttttgagctaatccatcaccttcggcataaaacacaaggcagagttggtttttcggcgctcaaattggatatgagtaaagcctttgacagggttgaatggcaattccttgaagctatgatgctcaaaatgggttttcactcacaatgggtgactcttattatgaattgcatcactactagctctttctccttttctctaaatggagaagttgttggccatgtacaaccccatcgtggtcttcgtcaaggagatcctctctctccttacttgttccttatttgttctgaagggttttcaagacttttgcaatatgaggaatcggctgggaacttggaaggattgcgtttaactaggaatgcaccttcggtatcacatcttcttttcgctgatgacagtttgttattttgtagagctacagagcaatcagcaaccgcaattaaaaggatacttgatacataccataaggcttcgggtcaagctcttaataacaacaaatctgtgatgtctttctcaccaaacacatcacctgctgcccagaatttttttgctaacacattgcatatgccaatcactgagtgtcatgaacggtatttaggattgccttcttactcgggtagagataagcaagagttgttcagccatattaaggaaaaggtttggaaacttctacatgcttggaatgaacaaattttctcagctggagggaaagaagtcctacttaaagcggtagtccaatctattcctacttatgccatgagttgctttaaacttacaaagaaattttgtagccaattggaaagtatgatggctaacttttggtggggcacaaatcaaaatggcactaagattcactggaaaaggtggaaggctttatgcaaatctaagcatgaaggaggtatggggtttagatcttttgtccactttaaccaagctctcttggcaaaacaggcttggagaatttttgatatgcctcattcattgttaagccggcttcttaagcacagatatttttccaataactcattcttggaagctcacattggccactctccttcatatacttggcaaagtatttgctgggggagagacctactggttaaaggtatgagatttaaagttgggaatggaactaacattgcttgtgccattgatccttggattcccagccatac

SEQ ID NO: 266381 - DNA, 2784 bp, Cannabis indica
aatcccaccatcgcctggggaaggtcaagtatgatgattctgagactgtgtaggtatgggactacacagttgaaaatgccttaaatggattgttggtactacctatattaacaaggtgcatcttgtttttttggtagcccatcacgaaagaacttcatggttaagcgtgcttgaccttgagtaatttcaagatgggtgacctcttgagaagctttttctggaagcgtgcgagtgaggacaaagcacgctagaaatactcgtgttgatctgtagggccagtcattagtccatgaagcagccagagtagcgtactcgtgtataagagccatcatttcatggatgtaaagacccaatagaggtttgaagcggaggcattacatgccccttgtctttttataggatatcctataggcatgaggcttataagctgcttgacttgaataccaacagagttttctgcacaagagatgttgtttttcatgaaaccttggttccttttgtaaattttgtagctattccatcagattttttttaaaaaaattcctgtttctgggcctgtgtcatctacaattccatctcctcattttgaatttacattagcttcaaatcctagtgttaatcatcaacgtgccagaccatcttgaactattaccaaaccatcttaattaccttaatgattatcattgctacctcgattgctaataatcttgttgtttcttcacaggatacaatgtcagtcactgcacatgctccaagttatctcccaagtttcgagctactgttttatctatttccagtcatcctgaaccagtttgctttggtcaagctaaaggaattccagcatgggataatgcaatggataatgagattgatgccttattgaaaagaatcatacttagatagtggttacttttcttgcagatcagcatgtcattggttgtaagtgggtttacaaaattaaatacaattttgatggttccattgaaagatttaaagcaagacttgtagctaaagggtataaccaacttaaaggtattgattatcatgatacctttgctcctgtcaccaagttagtttctgttaaactcattcttgctttagctactgttcatggctagtttttacattaacttgatgtaaacaatgcattctttcatggagatcttgatgaagatgtctatatgactctacctcctaggtatagtcctaagggggagaagaaattgccaccaaatgctgtttgtaagcttcaaaagtcatcgtatggcttaaagcaagcatttagataatggtttgcaaagttctctatagcccttttagaggagggattttctcattcagctactgatcattcaatgttcataaatcactcatctacttgtttcgtcatcttacttgcctatgtagatgatgttatacttactagcaataacattactcaattagaagcttaaagttgagattgaatgacaggttcaagcttaaggatttaggggatctgaaatacttcctcagcttggaaatagctaggtctagcaatggtatttttgtatctcaaaggccatatgcccttcaactcctagaagaacttgattttttagggagcaaactagtgaacacactaacggaacctaacctaaaatcttcacaggatgagaaggacaagttggcagatcctacactctatagaaaaactataggcaagctgcaatatcttattattacaaggcttgatatagcatactcaatcaacaaacttagtcaattaacaactgttccaagatctaagcacctcattgctactcaaagaaacctacagcaataaagtcaagcccaggacaaggtatactactatctacaacatctgaagagcattcacggatgctgactgggctgcttgtgtagacaccagaaggtccacaacagggttctgcatatttcttggagattatatcatctcttggaaaagtaagaagcaacatacattgtcgagatcttcaactgaatgtgagtatcgagtaatggcaaacaccataagtgagttgatttggctactgtcattgctcaaagaattgaaaatagagcacaaaggacctgcattgatgtactgtgacaacaaagctgcccaacacattgtagccaatcctgtgtttcatgaaagaatgaaacacattgaaattgactgtcatcttataagggaaaaggttcaagagggattgatcaagaccatacatgtttctaataaagagcggctagctagcattatgaccaaattaaaccttatttcttaatcaatttaaggtacttaaagacaagattggattggtagatatataccatctatcttgagaggaatatcagaagttagttagttggtttgttaatttgttattcggttatatcagttagtgtaactaactctttcactgtattctcgagctctataaatgctttgttcttgtacttttcccattaatgaaaacagttcagtttttcattcatcctctctacttctccttcttctctctcattcttccacaacaaataaagttaaatgcaaccaaaagtttgaaataattaaaacaacaatattaccaactaataaaatagaacaaaatatcatgaaaataaatacacaaaataactaagtattataaattcaacaaaaaaagagctagtaaaaatataattaattaaaacatttattttattatataaataaatataaataattttttaattttttatatgtattaaatgtaattggattaaattgatttttaa

SEQ ID NO: 266382 - DNA, 2482 bp, Cannabis indica
gatgtccactcttttgatcgctccacaaactcaatgatcttaacaaaggaaaaaaattggatattagataaaacctcttaaaaataggggggaaagtgatggagctagaaggaaaattgacgatgaatgtttactttggatgcaaaatcttctggtacaggtgttttgtttttatatgctgttataagtcctgcatagcaatacttatttagcccaaggccagcagcagtcatatctcgaataatggcatacctgtcacatcaaagtaaacatttcactcttaaatggaaaatgtctgtgagggctgatgaacttcatttaataaggatagttgcagaatgcagacaaagcatatataaaacatacagttatgaattataaaaaatatcccctctatcaggagttcccatgttaaaattgcaagaatgaaccagcataacaggtaattacaatttcgatcagcaaaaaagtaacatacactctatctaagcggccagcagcagcacatgcattaagcagacagacgtaggactgcaccattggcttaacttcgaatatcttcatatcctccaaaacctatatgccagtggtaaatttaaaggtacaactaaaacaatgtttcaggaggatacataaatatattactgtaattactaatgaaataataaagatatgtgatgcatacccgaattgcctgatcagagttatggcactttccacaaagtgagatcaaaatgttgtacaatgtaacctataatgtaaaggaccactaatcaaaagttgttacacgaaagaaattatattacaactgatcctaatccaataaccaaagaaacacaagtgatggaaaccaggccagggagagttcgtagtaatggatacatgtacaccaaattggttaatgaaatctaaaaattcacctagtaaagagaatgcaattacatggtgtaaacccttgcctatacaaaaactgaagtataatccccaaacttacgtatattacatgaaaatataaatcatatgcaggtgcaggtgcagcccatccaagcaagtgaaaaaggagaatatgatttaaaatgatcaattcttgcccttttcaggatatcaataagttcaatagaaaaatcttattttgctcattaagtaaatatattttgaaactacaacagtatttgggaaccaaaaacttataacaattactatcaatatagcagaacgaactaacaatataacaaaatccaaaatggggaataaccatagatatgtatactggtccttgtttaaaaaagatatacaaaccgaaaactccaatcttaggagaaaaaatcccttttaaacaaaaatgattttgacatttgttaaatgaataattgagtttatgaattgagtaaacatacatcaggaaccaaacccatagacttcatttcatcagtgaagaagaaagcatcctgcaaccgagctcctttcattgttccagcaatgagcgaatgaaacgtgtcccttgtaggctgtacaccgtccagcaccatatcctcatacacatccctcaacaagaagtgcctaaaccaaaaaagaacccaatcacttattttcctcttaattctaaccaacacagattcaccaaacaaagatcaaatagaagaaaaagaagaaccttctctgagcagtgatggaatcgataacggtattgtactcggaaacattgttggcgtaattcctctttgcgtattcctccgtggaagcggcggcggcggcggaggagaagtatcggcggccaaagtgttgggccagtgacctgtggtgccctgaaagagaaacgtaaccattatcaggttgttaggagattgaaggagtcgaagaagattgaaaatggtgaagagagagtaccagtaaggagcttgaggaggctcatggcaatggcgttgctctgtttctctgatctgtacgaacaacttcgtacaaaacccagaaaacctctcccaaaccccttattcctcccttctctgcaagtcagtctcccctgttgggcctaattgggcctgaacccgcttagactgggttttcattgcagccctatagttttcaaatatgccaaaacaaaagggaaatttacatggtatactaacttttttactgcgattttttataagtttcatactgcagtatactgtgttaagtttttactggtgttttttgtaggtattctactgttgttttgagttgttctgctttgtgttttactggtgttttataaaaacacagtatttttgaaaagatttccatgtgacagtatttttataaaagttaaccaaaattacagtatttttgtaaatttcccaaacaaaattcccttttaaccataatgaacacatatattaaagaactttgaaaaataatattccaaaatatattttcggacctactagaggttgaaagaaaaaattgtaatgtgagattataattgggataagttgaggaatac

SEQ ID NO: 266383 - DNA, 948 bp, Cannabis indica
tgggttttttaggagacattttattacctgcagtgagttgtatatgcatttatttttgaaatatttttccacaaatgaatatatttttcttacgaactttattttttgtaatgaagttataaaatattctcatatatagtgtgtttctctcttgttttttattttatctatgagattatcttaagtgtaggttgtttaaagaatttattaaaatatgctaaaaaaacataaataagttcttcttattaaaaaacagtatttgaaagcaaactagtttgtaaacattatcctaatgctaaagggcaccagtggtgcctagcacccttctatgtgtcaatatcgttattggtccaactaattatcgggtcacatatactttaatataatagtttttagagagtattgttaacccaatcgcaacacgacatgtcgcaaaggtgctaatagcaataacaatgctcatatatctttataaatattaaaaggatttggttaataatgttataatattatttactattttgttgggcagcttgctctagcaaatccgggtacgattgtgatggagaagctttacgcgtcagaattctcaaacgagattggagagaacaacatctttctttctgttggagacgctgttcacgtctttgctccaaaaactaagtaacacagaagaaccctgatcccaatttaatgcataaatcttttaccaaaaaagataataataaattaatacataattctcttatatatcatatatatatatatatatgtttagtaaagtgtaatcttaaacgttcatggcttgattttgaacccccattagtcttttatttagtgattgtgaatttgtgagatatatttattatatttaatatttatataagacattttaataattatattaaatatataactgcagcaatttttttaattattagtaataaa

SEQ ID NO: 266384 - DNA, 803 bp, Cannabis indica
agagaaagagagattttgattttgaaacacttagagagtttctgggtttgttggatcgttttgaatagcttctacacgatctaaggaagctaatggtcatgacgaaacgggctaagacaacaactttcgaaatccaccattctcatgcacgttcaagcacgttcttgagccatctcggatttgaacgtgtatgagtcatttctgggttaaaataagattgtgtttaagctaaagggactcctagaaggcatttggacgtgaagaatgagagctttaaggccttgaacgaaaatcgttggactccatttttaacggtacacaacaacgaagaagacaacaatgttgggccgtattatttagtgatttaaggtctgcttgacgttctgggcactgtaggaagcttcaccaatcaaaacaatgcgtgaaaagcaactatgtagggaattggaggctcgccgtcgtcggagaggaggggctcgctggcgtaactccggcgaaacgatatgggcatatctgaggtggttttctcatatttttttttgtagatttcgattctacagattattttagggtgtttggtaaagtttcataattttcttgtaattatttgatttattatgaattatttagtttattttttaaattaattaggaaaaatacttagattactcagaaaaatctaaatttattttatattattatttattagatataaactatttcaaaattggtagattttaatttcggttaattttttatttttcatgaattatttgtgttatttcttaatttaattatgaaaa

SEQ ID NO: 266385 - DNA, 1196 bp, Cannabis indica
tgaatatgaaaaaaattagagtacaaaatttttctagatgccgaaacaagtagagggtgcatcaatacattcatagggggtgcattgtagaatcatcgtaaacttttgaatttgaatttagaatttgaattttgttagatttaggttggttttttttttttttagtttacataagtagtaattcattgtttaattttttttatgcattttagattttattttgtaatgagtctgtatattgattttttatgttagtcgtttttcttatgattatttagcattttgtatgtttggtatggtagttgtttttaatagatgtttaatagttgtattgtagttgtgttacaatgtgtttaatcatcagcttttattttggctttttttttttcaagggatgggaatacaagtacgttgaaaattcgatcactataaatcgaaggtcgcatgtatttgtacttacaatatcattgagaaccttcatgtatggaccatgtattatatgtgttggggtattgttaaggacaattttaaccaacttttattagagtgatgaacaaagacttgtagtttgaggttattttgtgaagaatcaactgtaggaacattgcaaatcaacatcaactcagcctttgtttagatttgaacaaactaactatattagaattgcttttatgagagctctgtgttgggttgtctatatgaaataccctcaaataatactaaaatagtgtcggctaattaatgtataagtattcctacatcagttctctgagcatcaataaaaataaaaggcaattgtacgacaactaaggtaccgtttggcaacacttatgtttttaatttttaatgacaaataaagtaaattttattttaaaaatttattttgaaaaacaaaatgcgttctgtaaccacttttgtttttaattttaaaaataaaaacaaaagtgtgttctataaagttcgtttttatttttattttttgattttatttaagtcgggtctaggtccagggtcggattcgggttcaagtcagaagccgagttcagcgccaaggccgtggggagggaatttgggtccgggtctgatcgtaatcaaaagattgattaagaaaaaaaaaactgtttaaaaaaacattgaaagtgatttttttttttgtttttaaaattttgatttctaattataaaattgaaaagtaa

SEQ ID NO: 266386 - DNA, 698 bp, Cannabis indica
aattagagttggacgacccatcagtacgttatacacggaatggatatcaacaaccaaaaattcctgcatttgtgtcgttgataaaggcagttctctcatagttaatggaagctcgatgatgcctaagctcacaacactatcgcctgaaaaactgcataggcttaccatatatggcctcaactttgcatcctgtgaacccatctttttttaatgtatctttgtagaggatattgactaaactcccattattgaccaatactcttttcatccttttattggcgagctggactattatcacgaggggatcaacatgtgggtattgcacatgttttgtatcttcttcagagaatatgattggtggttcattcgacttcactttttctaatggttcaggagcaaatgctgattgtgcatttttcacttcatttatatacctcttttgggcactgttactatttcccataagatgtggccctccaaaaattaccaagatatccttgccctcaacaaggggtgattgtaatctcaggtaattcaggttgttaggctggttaggctcatttccttgatttctcacatactggctaagtatccttgcgagatcaaactttctatctcatctttctattgtcgacattcctcagtggtatgccctatatccttgtggaatcgacagtatttagttgaatctcgctgtg

SEQ ID NO: 266387 - DNA, 920 bp, Cannabis indica
ttatgggcaatattataattgctatttcgatttatattggtatgaaatattgtactctcaatggggagacatcaaaagatctaaatggattgtgtttgtatgttatttagtggtagttcatctgacagggtggatagattcgaaaaattaaattatgagttaaatttgctagtattcccaagtggaatataggtcgtaagttgttaatggaggcataggtctaattgatcaaataacaaaatcttttgttcagaagtgatctagcattaccaaaggtgagacaatttatgagtattgtctgaaatcctagatgaattgaaggcaacgattgtgtagtaattttgagattatgtaggcgtgggactacctatgctagtaagaagatcttgttttggtaaatcaccatgaaggaactcgatggttgagtgttcttgactcggggtggttttatttaggaaatttccccatgaagcgtgcgagtcagagcaaagcatgttagaaacatttggattggcccgtgggactagtcgttagtccatgaaatagctagagtgatgcactcgtgtataagagccatcattctgtgggaataagggcccaatggaggcttgaagcggggacgttatcggggtagcgtataaaataacatcatgaagaatagtggtatcactaaggtgaagaagattacttgaattacttaaggtgacatggtaatgatggagagtactttatatttgactggatagtcaatgtggtttataaggagaccattgaaattttaggaaaggattactttattaagcaattatagaaatgcatactcacccacaatgggaaaaagcttatgaattgagattcaatttaatggacatgtatttgagttggtgaatgttggatcacaaagtaggttgtttattaaa

SEQ ID NO: 266388 - DNA, 921 bp, Cannabis indica
aaaaaataaataataccttgtaaatttttatttgttattttgtgaaaagaatacttagaaaagattcttctttcccttaaattttattacctattagtacaaaaatgtatttttgtttaaaatttaatatgttaaaagatacataatcttgtaatatactgtacatttgctcattattaaaccaacagaaagtaataagcttgaaccacccatgtcaaaaaaacaaattaaaaaaaatacaaaggttctatgttctgaggataaattaaactaaaaaaacaattaagagctacataattatataatttttttttttatagtagatgagttcgttgtgaactcgtcatatatgtgactaagtaatacattttttaagaccaacaaatgtacatgtttttgtagccaactgccactagcagttctagtgaatgacgcaacaggaagattactaaaatatagcaagacaacacaacaagtatcagttcttctaaggggcctagctggagcagccggcgtggccataagtagtaatgcctcatttgttcttgtaactgagttcataaccaagagaatccagaaactttggcttacaggtcctttggcttttacatccactgttattaaggaatttgaaggcagacctgataatattaagaagacccaaataggagactatttttgggtggcagtgagcacaatgagccctattggtataacaatcccttccgcagtaaagatcgatggaaatggtgtcgttttgcaaaccatccctcttgaccgctattacttcaataccgcaatcagtgaatttaaccaacgtggctcgaatttttatgttggctcccttcaggctggttttgttggtttattgaattgatgaaagggttaattatatataaactaaaaatatacatgtgtatt

SEQ ID NO: 266389 - DNA, 858 bp, Cannabis indica
ttaggattctcttttgctccttgaattcctcataggctcgagtttgccgaaggctaccttctgctcatgtgtgaggtaaatattttcccaagttccattaagctcggtataaatagtatacactgacacgtatttgtcatgcttcttttgtttctttctatccttcgacagttccctgatttcgtcctttcttttcggaccagaagcccccgagttatccattctcgtggaagcagtccctgttgacacattgctgggtttacctcccgagcttgttttcaacaagttcatttcctttcgggcttcttcctttcgaacaaacacctaagccctctcgttgaactctgtgatgtttcttaccggacgtcctagtagatcatcccactgcttgcccccggcagttaatggaaaatggagatccccgcctgaagggctgtaagttgcgtgttatcatcaaagtatctaaccctagtggcagccgtgttaaaatgacttaagtatgccttaagtgtttcttcaggctgctgctttagattggttagcgaggccgcttcgggttgcctatccctagcggcttgaaattgcttcttgaaatccctggacagctgctcccaggaaattattgaatgatgagtaaacttgttaaaccagctactcgctgctccaacaagcaaggtggggaacaaaatacagcgtaaattgttcgtcacgttactcgctcgcattatcgtgttaaagttattcaaatgcgagaccggatctgtggttccgtcataggatgagacatgcgggtttttgaatcccaaaggaaaaggggtattcataatatctgggtgatacggctcaagctcctcgtta

SEQ ID NO: 266390 - DNA, 584 bp, Cannabis indica
ctgctgaaagttttctgcaactcagatccttctttaattaagtttctcttaactgtaatttttgtcaatttcaattctggtttaccatttatgtttagaagattgattcatgttcttgacttcttttttttttttaataatgaacttatcatttaaataataattagagactacaaatatgataaaaaaatctatcaaattaagtttcttatccactctgctgtaaatatgcacaactaatccataattagagagtacaaatatgatacaaaaaatccttcaaattaagtttcttatacaccctaaatatatgcacaactaatctataagatatcatggaatagggatgttggaagttattttactagtatttaaatttaccaacatgtatattgattataattctataatctaacaccttaaatatgaattcctaaaacagtaaaaataaacacatataaaatttagaaaaacttatattgatggcagcaaaatgttatgactccttctattcaaccttgtaataacaagatctgaacttggatctccttcaagtgttggattcttcacaatcttccacacta

SEQ ID NO: 266391 - DNA, 864 bp, Cannabis indica
gtttggggctgctgtgggtggctgtttcttcgtgttcagcaaggtgtgaaatgaggaagtgaggaagacgaagcaccagggtctaaatgtcaatgcagatattttcaccccttttagcttcccttttaataaatttggttaaaaaaagggaagctaaagacttacattgtagtagtgttgaatgtgttgcttagggaaaactataataaaatataatcaaaattcatgcttaaagttcaaaaaccacatattatgaattcatgttatatgactctaataaatcttgataataaaaatataataaaagatcgaatgcatgcttattttaagtgattagtttcatagatcgatttatcacgattattatcataaacacaagaaaaagaagatataacaacattaaagaattaaaatcataaagatatagagtacttagaataataattcctttttttgattatgtagtataattcctctgaatgaaaaggtctccaagagctattatcatttttggaaagttgtggacttgtgaaagcatgtcctgaaagactttcttgtccttccgagaagggtcttcaggaaagctattcctcctccggaaaggagttctagatggctagttgttcctcctggaagatagtcccaagtaatcgactccaactggctctttcctatccaggaagctaggtccttgatgcgtgtcgtaattaagccacaataaatttactaatatttatttccaatacctccaattattttaatataattgtaagtaagggtcgatcctacaaggactatgtttatttaattattcaaaaattagtgtcaaaagttagaaaaggaggattttaagattgaaattaa

SEQ ID NO: 266392 - DNA, 2232 bp, Cannabis indica
tagaatccctcgtggacttcttgcacaatccctctagcttaaagatctgacacacaccttaaatacggcatgttgaaacccccttcgatagaggataccatcgatcgttaagtatcggtgggcttggtgctgtaattttttggacacagtccttccttgaggtagttcttccgttgttatgtacttgatgatgggggccatccagcttgacccttgttcattagtagccacttcctcttttgacctaatgctagtcttcgtgaggtattcaacaggtaccacccccagcttttccacctcattgtttttgagactaacttagctagataatctgcatgggcatttctttctcgtgggattcgttcaatcttatattccttgaattcttgcaataatttgcttacaactgacatgtaagcgaccatcttttcccctcgaatttgatattctcttgatacctgattgacaaccagttgtgaatcactgtatacctctaccctattggctcctacagccttacccaattttaatcttgctttcagggcttcatactcagcctcgttattagaagtcagaaatgtgaaccttagggcagcctagagtcttaatctgtagggggatatcattgctattccagctctcgatccattctcatttaacacaccatcaacatacactctccatgtaggcatatcccaagttggtatattggcgttagcctcagtttcattgcactctacaataaaatctacgagcgcttggcccttaatcgagatgtggggaatgtattgtatgtcaaattgacttaactccatggcccacttaaggagtctccttgaggctttagggttctataagacttgttgaagcaggtggtttgtaaatactttgatggagtgcacctaaaagtatggcctcagctttcttaatgcaatcaagagataaagagctagtttttcgatcaaagggtaccaaatttctacccctatcatgtgtttgctgacgtaaaacactgggtgctgaacctttccttctttctggaccaaagctgcattgattgcattctcggagatggctagatataaatacaagtcttctctgtgaatgggctttgacaacactggtggttgggccatgtgttctttcagcttcttaaacgcctcatcacagttttcggtccattcaaacttctagaattttttcaaaatgttgaaaaatgggatgcacttgtcagttgaacgagagatgaagtgactcagggcggcaacctttccggttaggctttatacatccttgtgtcttcttggggagggcatactcaacaaggcctgtatcttttctaggtttgcctctattctgcactggcttactatgaaccccagaaatttccctgatttaacgcaaaagtacactttttgggattgagtttcatctcgtacttcctaactacttcaaagcattctgtatggtcgtctgcatggcccatgcttgttttatatttgaccaacaagtcatccacgtacaccttctgttacgccccaggaggcctttgaacattcaattgaccatgctcttataggtggctccagcattttttagtccaaagggcatgaccaaatagcaatatacccccttgtcggtcctgaagctgatacactcttggtctacgatgtgcatcttaatctggttgtaccccgaatacgcgtccatgaaagacaataacttgaaacctgaggtggcatctaccatttggtcgatcctgggcaacgggaaacaatcctttggataggctttgttaaggtcggtgaattctatgcatattcgccatgtcccatttggtttgggcaccagaactaggtttgccaaccattccaggtaatatacatcgcgaataaagatgtttgacaacatttgtccacttccttctctacggcatcagccttcactggatctagcatacgccttttttgttgcactgtttaggatgtgagtgattatgttagggcttatcccggtcatgtccccatgacaccatgcaaacacatctgccgatgcctttatggtgttaatgattttacttcgttcctctgggtcaaggctcttacccaggtggataactttagatggatcttgatccagcacccttacctcttcaatatcctccattggctctaacaccgccttagaaccaatgtgagggtgtaattcgtcttgccctaccatagatgccga

SEQ ID NO: 266393 - DNA, 2525 bp, Cannabis indica
aatgacttttctaccattttggtggaatgactattctattttaaaatgaaaggaaatgctatagcaatacaagatgagaaaaaatttaataatttttttaatcaattttttatatacattttaaatttgatttcattcctattcttatacatttatccttccaaccaaacgccatgtaaaatggctttatgggcagcattctagttgtaagtttctgtagaaagaaaccaatacagaatttgctcaatgggcagcagcgcaaggaaagcttgtgaattttgcagtccattttaaaaaacttggagcaaagggctaaaattagtagtttcaaatgttaaatgggagactgatcaaaatcaaacccatctatctattatgaaaatgcatgaaaataagcatcagttttgcttatttaattactaagtctatactgataaggtttgttaacttgtaatcatttttaatgcttatgtataacagttattcattaagacaaacatgtctattgtgcttttctgcatcttggtttctctttactgcacatatatgcttgagcaagcgagcgagtacaagtaaacaccaatgttgttgcttgagtaggctgtttgactatgaaaatgttataggagctttttagtaaattgtaagtggtgagaaagtctataaatatgtaattgtgtagctattattgaatatagaatgagaaaatagaactttggttcatttggagtttggcactcactcgaagagtgtattttaggagatttgttctatcttaaaaaagacccgttacctaacataggcttccgctttctttaattattttgtgataggaccctggtttgggtaatatgccacatagcacaagtcatatgagtatgttattatgggtggcaagactcgaattcttggctctctcctaaagagcagcggctctcaatatagacactgataaattccttgtgccttgcctatgtggcataatcctatcaacttgatgctagttatacttttttatagggaaccgtctttgtggtcttaattaacctcaattagttttcctataagttttgaggttctggaaaactgaaaagtagtagtacataggaacaaagaaaaatgttgtaactgaacctttgtttgcatttgcatacacgacaatgtgtgccttttccatgatgttttagttttatttattttgtatagctaaagtgaaagcaacttgaatgttcaaacatattgaaggaataatctcctggatactattctgtatttgtttgtatacactaaattgtaggaaccctaaaagttgataggggcatttgatttgaatattatgaacttcttactcattagtttttgttacctcatgcagatgggactcatactatatgttgtaccaagttttttgacacggctttctggtttttgggtcctcaaacgtttttttttgcaagttagatgcttccaactttgaacagttcaatccgaagctacttttttgcgcctttgtcggtctaccttagttgtgcctctactgcacaatatttagatgttccagaccagaacatcaaggaaatgaggagaagcactagctgcctgtcatgaatgctcaactgtgtatgaaactctagtattttttttagcctgtatatatattaaatccaaattcggataaaacttgtatagtaaccgatgttcattacatgtacatcgaaatgttaaaagcaaggatctcattttgatgacttgcattttcctctttttgtgaattatactataaattatgagtaattgagaggcatgtcctccctatgccctgaaaaactaaaatagcccaagacttttgctttacactggttgtttatggtatatccaatctccttgaaatgaacaaatttatgtatatttacacaatctacttatttgggtttaatttattttgttaagaaggatacatttcttgatatatatactcttgacagttagaatgtttcatccttggcaatcttatatctttttcatagaaacttatggtgctgttttagagatattgagatgaaggtttaaggccactattaacttttagaattactactcacaagtggtacctaacactacaacgaggcatcaccttgcaaataattagctaatttttgtaataattattatgttataatatatgataatatatgtgacctaatacttaattattatattaataaactattgacaaatgaaaggacattcaaagccaccagcttatctaaaatgagtaaaaaagatgagagaaaattgagtcttgatcttgaagttgaagattctgtaactgaaataaaaaagtagagcattttcaattgtttcaaggacttgtttctcaagtcaatgatgtgtttatatacatgtataccagaaggaaaaaagaacccttcaaaaagaaaaagaaaaagtttcatacaatttggagaatcaacatgatgattagtagtaagatattcttctgtaaagcttaggaggataatgtt

SEQ ID NO: 266394 - DNA, 2106 bp, Cannabis indica
acacaatttgttacatgttaaagtttaaggcatacaattcaatatgtgataatcttcatgttaagcgttcattagtaaaattaaataaaattaaacaaaaataattgcattaatttaggagaatttttaatagcataaaaagtctaaaggacacaatttaatacatttagaaaaattttgaggtacttcactacttaaaacgaaaaaggaaagggaaaacgggttttatggcgctcaaactggatatgagcaaggcgtatgataggatagaatggccctttcttgaagcaatgttaaggaaaatgggctttgtggaaaattggattcgtttaatcatgacttgtgttttgacagccaagtacaaaataatccatgatgcctatgaggttggcccaatatacctttctagaggcataaggcaaggggaccccttatctccctatctgtttattatctgtgcagagggtttatcatctttactttacaagtatgaaaggaatgggtggattcatggttgcaaatggtgctccaagaatatcgcatatgctttttgcggatgatagctacctttattgtaaagcaacactccaagaagcacaacgaattcaagagttacttcataaatttgagtgtgcttcgggtcaacaggtaaactttacaaaatcctccattttcttcagcatcaacactgaccccgtcatccaaacgcagatttgtaattacctccatatggctgtggccggagagggtagtttctatttggggttaccaagtacaatgagcagaaataaaacttcagtgttggggttcttgagggataaagtgaagaaaagactccaaagttgggaaggaaaatttctctctaaagggggtaaatagcctcttataaaatcagttgttcaagcgcttcccagctatgctatgaatgtgtttttacttcctcttgagattagtaatgatattgaaagagcaatgtgcaaattttggtggaaaacctcacaagatgataacaaaggtattcattggatggcttgggataaacttagccttcataaaagaggaggagggatgggctttcgtgatctctgagatttcaatctctctcttctaggcaaacaagggtggcgcatgcttactcgtcctcagtcattagcttcccgtttgttcaaggcgaggtattttcctaatggtaattttctcaatgctcaattgggttcgaacccgagttttgcgtggtgaagcatcttggaatctcagtcattattaagacatggtactagatggtgtgtgggggacggtagcaagattccaattctaggagagccatggctccccaatgaaggaaacccccaagttgtatcttatcacccgtccttggttaatgcctttgttaatgctcttatgaaaataggggagttaacttgggatgatgatgtactaaatgatctttttgaagaaaggtatcgtgacttgatcaaagccattcctctcaacatctctagaacttttgatcatttggtttggtccagagaaaactctggcatttactctgttaaaagtgcatatgctctcttgcaaaaattgaagggacactggtttgatgaatcagatgatgcgttttggtgtaggttgtggcaactgaagcttccttcaaagatgcaaaatttggtttggcgagcgtgtaacaactgcttgccaacggtggtccaattacatattaagcgtgttgaggttagtccaatctgcctgttatgccacagtgaggaagaaaccattatccatgcgttggtcacatgccgagaggtcaaaaaatgctgggatcgtgttggaattggcaccatagtgaattatggtgcaagcttcttcgactggtgcgctgctactttcagcaacaattctgctgctgttaattgcagaattgtggtcgtgtgttgggctgtttggggagccaggaacaacctggtttggaacaataatccgtttatctttgaagacgtggttgcttttgcatttcgctaccttaatcaatggaaagctgctcagatgtcttcggattcatcgtggcctattcttatggctgccgatgttggcgagcagtggacacct

SEQ ID NO: 266395 - DNA, 1751 bp, Cannabis indica
gaagtatcaaaacaaaaactcgagagctcagaaatagggtgcccaatgcctaggttgacaaatggcctagtgcgttgggttctgcttatctgattctaattctgctttgaccgttcgtctagttttgcacaataattaagatcaatgaagtcatagaagtcaaattcacaactttgcatttttcatttccaacatgggaaactcactcagaaataaagagtttcgagtctctcatttctacaaaagagcaacatctctacgaactgatgtaatgccctgatacttaggcacgcaacaatgattttcttaattaatgtgccacctttcctaatcaaagggtttttcttgaaaattttgcaaattaaaattttgatttaaactaataaatcttataaacatatacatgtattttacataagtcaggatcccgtatttaaactttgtacaaatattatcaaaatactttgactaaacatgtcgcacagtgactacaaaatacaatccaagatgtcccgagaccaaacactctagtccacgccgtcttgacatgtacaatcaccatccaatctaaaagtagacaactgtgagtcaacaaaactcaataagaaaagaatataacaaataacatattaccgacacacctatccacaaggtttatcttatcagataagtaagaacgttctttacatttggtactatcaaccatgatatcagctactactagcgctataattgcactgtgggcttgatactatgtgcatatcgctatgatagcatcaataatacccaaaagtataattgacgatgatatcactcttaaccagtactatactcgtattgccgactcggtactatgctcgtaccgctatgatagcatcaattaatactttcaggaattggatatcagtcaaacccagtactatactcgtactgttgacccgacacgatggttgtgctgctgtgatatcaattcataactttatgtaatttacatatataacaggcatattcttacctcatttcttaattcaagtgagttggctgacctgaatggaaaactggattctggatggatgccctaagtcacatttacgtaaacgggtaaataacacacaaaaaacctactccaggaatccaaactcactactaagggatctgctatcgttaatacttataacaataccctaattatcaaggaaataaccaactaaggctctaaaaataacacgaactgacaaatcaaacatttcaagaaacctgcccctgatccggttaactagttaactggtttgcactaggtaatctaaactagttcaaattttgccaaattcgtgtctaaaccataccaaaccttcgaaaacacctgtatcaacctcaaataaaaatttccaagcactagtagcaacaattaaacacagaaaccaaatccatcattaatgagctaagtttgagttcttaaactcaaacttgctcaatctcctcattaatcactacaaccaactaagaataacctaaatctatccaaaataaccttgaaaatcaaactagaataaagtctaccctaaacagccactaatcttcaaaataacaatatcaaaccaagttaaagcttaaacaacaaagaggtgagagctctagagtttacctttacttaatactccttggatcttgctaaattttttgaaaattgaagaggataaggctggaatctccttgtttatgtgggagccgaacaaagagagagagagaga

SEQ ID NO: 266396 - DNA, 775 bp, Cannabis indica
tttttttttaatttaaaaagtaacaaaacaaagaataataatgaatttttgttatgatttctttatgtaaatgctagatgtaaataaagataaagaatcacaagaccagagcttaattataatttatatgatcatgttgatataatgttattaattgatgcgatatttggtgaagtttgattattaattaggcgcgcagtcggtgtacagtctatacattatattataatttgtattaatctaaagtcaaccttcaaaagttgaatgttcatatatgctttcgaaactaaataaattaaataagactatatgttttagaaacatttagcagtttcaagcagtttatatatagagttcttttatcaatttttttttttttttttcatttctagtattttcaagtatgtattttattgttgttctcgtgggcacgtacgagacacactatataatgctcagaaaatcgtagatatataaacatttaattctaattattagttcaaagaagttatgatggcgaaatcaagctttgtcgttattgttcttttatgcagcctaataattccaacaaaatgttatggtcattattctgaaccatcagaagatcatgtagctgggagcttgtttatcttgggcgattcgttttttgatgcaggaaataataactatatcaacacttcaggtcaagctaattactatccatacggtgaaaccttctttaactacccatctggtagattttgtgatggccgaattcttcccgattttattggta

SEQ ID NO: 266397 - DNA, 714 bp, Cannabis indica
tcaatagagacaatattaaatttcaagttctcaaaatctataaaaataataaaaaaataaaaaacagatctcataaacacaaactcaaacattagaaacccagtaaaacactaaaaactaaaacattaaaaatacacacaataaaattcaaaacccaagacttaacacacacatcataataaaaattaaaccataaatgaagatttatgctgctatttttcgaattccgatatttattagcaacaaatttaatattttaagtatttatgtcacaatttttttaatagtaaagttaaaattttaatataatcttattaagtaattattattaattaaaatatataatttattttttatatataatttaaaatattttatatatccgccgcgaagcgcgggatgtttactagttaatatataaaatacactagtttaaatttataataaggtaaatattattttggaccttgtgttttgaaagatattattaattgcaccctctgttttgttaaatgacaaaatggatcttatattttttaaaatggtaaaaaataggaccttgaacttaatttttgacaacttttttataatataaccaacttgagaataatttctaagatgaacagatattaaaaatataaacagttttgtcataacacttttaaatacggaatattattaaatttttattttagtacaaaaaatctaagttca

SEQ ID NO: 266398 - DNA, 685 bp, Cannabis indica
attaatcgcactcccactcccaacttagcaaacaaaactccttatgaaattttgtttgggaaaacacctgaatatgtgcaattaaggaattttggctgtcttgctttcgcttctactctcacggcacataggactaaatttgccccacgtgcacacacatgtgttttcattggttatcctcaaggcataaaaggatataaattatatgatctaaacacaaaacaatttcttatttctagaaatgttgttttccatgaaaatgtttttccttttcagaaattgaatgacaacaagaacattggtatagatccttttgccaacatggttttaccatcacctcatatatctcagacacatattattgattttgactctcatattcatcacaatatcagtactgatagtcttatgcaggaacaatcaacaaatgatgtctctaacaatgaatctgcaacacaaagaagtgatacacctgctgcagcaagtgaaattcccactgctgtgcaacaagaagtgatcacctgctgcatcaagtgaaattcccactgctgaacaaactgatatatccacaccagcagacaacattgtcaatccaataatgacaatcctaccattccaagaaagagtaacagaattcacaagactccaagctaccttcgtgactacgaatgccattctttaattc

SEQ ID NO: 266399 - DNA, 1192 bp, Cannabis indica
atttgtaggggtgattttaatttgacaaattcacaagatggattcctcggttcaagttatctaataggttttgttgtttctacttttgtagttgcaattcttacctcaaggtaagatttatttatttttaataaataataataatatttttcaaaaataaaactaatttattataataattgatatcaaaaaatttcagtcaaaatcgattaaatcttatccaaattgggataattttttggatgggcggcattgttttgtgtggattctcaaaccattttcagattcttactatttctcggatgtaagttatttaaggtttattattatattttttgataaacatatagaaattccaaataaaatttaaatatttatactttttttctatatatttttatatatgtgagcaatttactatatattttaaattttattaataacactaattattcataattttctaaaaataattaaggctttttttttcttctagaacgtaagttgtctattatacatacaaatataaatatttgtaattgtaataattttgtatgcatatttaattttatgaattatgtttcactaaataactttctatgaaatagattgactggttttggacaaggtccactcataattcttggagctcccataattagcgatatcgcaccacatttgaaggttttttatctcaattttttttaaacctactcatttttaattaatatatatatttagatattaatttttaatgtttaaatatatcaggaagcaatgtggatatcaatatattatagctttacaacaccaggctttgcatttggttatatttatggaggacttgtgagtaacattatttctattattttggataatttaattcttcttggtatataaaaatttattttattttcttaatattctatattttgtgtgtaacatatttagattggaaagtatttgaactggcgatatgcatttcgaatattatcactgtttatgtttcccctattcattttaagtctactgataaaaggtatttttttaatttcttattattaatttattgcttgtaatctttaatgtttcactattatatatatatatgtttggttcttatgattttcattatataatttttaatgtagttattataataatttgtttataaactttttttagtgtcata

SEQ ID NO: 266400 - DNA, 904 bp, Cannabis indica
cgtacgtcaaccttctatgggaaggtggctcgagttcaacgagcagcataacttcataaccgtacgccattgcaaatggtatctgtccagtcgctgtttttttccattgtacggtatgaccatagaacttcaggaagctcttctggccagtttcctttggcatcttcaagttttttctttagtgtatccttcaaggttttgttgactgcttcaacttgaccatttgcctgaggatgcgccactgcggagaaacttttgatgataccatggttcgcacagaaatcagtgaaggattggctatcgaactgcttgccattgtctaagactattttgtacggtagtccgaactggcatatgatgttcttcacaataaagtcttgaactttctttgatgtaatggttgcaagtggttcgacttcagtccatttagtaaagtaatcaaccgctaccactgcatactacaccccacctttacctttaggtaattgtccgatcaggtcaattccccaaatgggaaagggacacggactttgtgtctgtgttaactcgttgggcggagctcttggtatctttgaaaatctctagcatttgtcgcacttcttaacataggctctcgaatcttcaatcatcgttggccagaagtaaccttgccttagaattttctttgataagctctgtctggcggcatgatttccacagaatccatggtgaacttcagataggagtcgtgcaacatcatcttgagtgacacatctgagcagaggcatcgagaatcctcttctatacatgactccctctactatgatatatcgtgcaactttccttctcattttctgagcctcatttcggttatctgggatttccccagagttgaggtagggtgctattggtgtcatccagtttg

SEQ ID NO: 266401 - DNA, 562 bp, Cannabis indica
ttatttttgtgattaaaaattttaaaaaaagtaataccaaacaccacctaagtatatatatttttttattataatttaatttgatattttatattggtaatattttttattcacttgaatttttacggattagcaatatggtagttaaaagtcgtgtcaagtgctcaaaaaatgtgtatttatatatgtaaaattattatttaaatttttaataaaattaatgtgatagatttttctctaaaatatttttgtaagaaaaataattttgtggcacatttaaaaaaaaaaaaaaaaaagaagcaaaatgtaatttttaaaagtaaattaaaaagatatttttaggagaaaaaaaataaaatctcaaacttaaagtaacccataaaagataatgtcgggtaacacaagaaaatattctattagtgaaacataaatttaaaggggattttcatgtatatgggaattgagtgtatagtttactcttttttagcataaataaataatatcatggggttaaggaattttttttttattattattattttacatttatataagctttttt

SEQ ID NO: 266402 - DNA, 70 bp, Cannabis indica
agccttctctctccctatctttggccgaacccactctctctctcttcctcattgaaatttcgaaatcctt

SEQ ID NO: 266403 - DNA, 629 bp, Cannabis indica
gttttggaagatctagctacaaattaatcaagaacccatttgagtaatttgcggcattaagttcaacttcagttgtaaataaatacctaattttaatttttggcgttaataataccttagttatatttttggaactttgtaggtacctaaccgttaaaatattatgtcattatccacatgtcattttcttattggtatattttaattatttttttaaaaaaataaaaatttaatgacttcgaccaattagaaattgtcacatcgcaatttacttaacaattaatagtcaggtacctacaaaagttctagaattataacttaggtattattactgctaaaaattaaacttagatatttatttgcaactgggagttaaacttagatatttatgccacaaattactcaactcttttctacacgactctaatttcttttctccaacttttactgttcaatttgaaagcaaacaactaaaacgtttcacttatttaataagattttattgtcagtcttggatgctaaaagcatccttagggtgatctcgtagttctaagtagggctgaacattttgagcgggtttgacccgaacccgagcaacccgcccgaatccgaactggtgaacccgcaaa

SEQ ID NO: 266404 - DNA, 2794 bp, Cannabis indica
tataccctcatcatttggtcgaaatcgaaataaataatattaaaaaattataaaaactaaattaaaataaaaatgtataattgtggaatttacattgagaaaattattaatatagatacgcaatttttattattaatagaaaatctaaattgtaaaattcccacgcacacacactgaggcgcatatatttacttgagaaactaaataaaaaaaaaatcgaaaaaaaagagaatacgtaaaagtcaataatcttgccgtctacttttggcaagatcactgatcaaagagtcatcgtcattttcacattgctccaaatatatattgaaagcaggattatatgcagcagctaatcgaagataatatgcagcttcatctccgcgccccacattgtataaagcgctgaaaaaaccaaactcatcatcaacttcaagatgaacaacaatcatggcgatggagcctattgtcatataatcaaatagtactccactgcatatatataccttgaaagctttaatattccatcaaaatagtgagttttgctcattgggtcctctggttctttcaaccttccgatcctttccaagtgtaccagcccttccttaagtttcccctgtcccatacacaaatacaaagtacatagctttcaatgtttaccacatttataattttatataaacatgtatattgagctgttatgatcatgttgaatctcaaaatttatttttccagtaagttagtgcacctgacaaatatagagagaccccgccatttgcaatgcaaagattaaataatcgatttcctccacttctgttagctcttcagcaagcaagagctggtgagaataataatagatcaatggggtgcagagtttgaaagaatcggtattagccaaattcaacataagaaatattagagccaaagtcctgttccaaataattgttcaaaagcaagtaatacatgtataacttttttttgaggcagctacagagataaactctcagtcacatattgcaggcaaagtaattatctcacaagattaattcattcatgtaccacatacggcaatcttgacaattagaaaatgaatttagagtcccagaccttagaaatagcacgttccagatactcaatcgcctctgtaagcattcctttctgcattagaatctgacccatgagaaccaaacattgtgtgtaatcaggatccttggaaagtgccagtctgcagtaaaagagaatgagcttgatgttgcagctaaagacaaagttgttatgaagctttgcagaaaagttgaaagtctaaatttctaagagaagatcagaaattactgcattataggaattgctctttcaatatgttgttgtgataatagttggacggaaagctgccaacaattccagtgacgaaatttaggataaacttttattaacatctgatgtttaacgtagttttcaagataaaaaaattaaggtcacttacgttaagaagttccttagggtataggtcttccaaagatacttccatatgttttccaggttttcttgagggtgtaggggagaggtcttccaaaaatacattttgcagtcttttagattcacttaaggttgttataggaggaatactaatgccagagtgtgcagctgagctagaagtaatcttgtctgataaacccaactttacaagtacatcaggatttttgagtgataattgctacaacatcatcataaaacacttaatatcaaagaaatatcacagagggcatggattgaaatgcatttatagcaatgtgaagctggaaagtaatcaaaatattttttttattagaaagttcattttctcattgaagaagaagaatgataaccaacaacttgattctggttaggaagttagtttaggttgttagtgtcgttgttatcttaggccaactgtaatgaattctgttataacagaattcctctatttgtgctgaataaaaatgtgtataaataaaattcttgctccttaatcacaccatgatttcaagtgtggttaactgagtttctctctatttctctctgtgtttgttttgtttcatggtattagagccattgactagcttccatggcttcctccggcgacaactcgtccccagtcagagtctccgatcctcaatcagagtctgctgctctagttcacactcggaatccgttctccaactctctgtctccgactctcacaacaaagcttgaccgatcgaacttcttggcgtggaagtctcaggtcgtccctaccgtcattggacatgatttagatgaaatcttgttcagtgatatcacgcctccttcgaatctcatcaatggcgatcctaaccctatgtttcttcagtggcggcgcaaaaaccagcttcttctctcctggcttcgttcatcgatgatggaaggtgttcttggtaccgttgcaagctattccagctcttactctgtctagaaagatctggagcagaagtttttgagccaatcaaaggcttggttattacagctcaaaggacaactttcgactctttgaaaaggtactctcagtatctctgactatgttgataaggtcaaatctttgagtgattctttagctgttgctggccatgctatatctgatcttgatctcattcttcatcttcttgatggtcttggccctgagttcgatcctgtggtgtctggtataacgtctcggagtgatttcccgtctcttgaagaagtgcaagctctcctcatgtcacaagagattcgtcttgaacgcagaagtcaagtacatcaaaggtag

SEQ ID NO: 266405 - DNA, 708 bp, Cannabis indica
atgttattcatataatttaatcatcacacatcgtttgtacatataattataataataatattactttcctattattatatacaaaaaatataataaacatattattgtaatattaaatgttgtagataaatgttacccatataattataactttaatcatttatttataagaagggtagataagaaaaaataatttttggttgatatggaatgacttttcaagtcattttatttaggaaaagtaattccttagtttacatgaattataattcctatgaaatgagttttccaataataataaacaaaccaaacacttgaatgatctttttttagaaatagcaattccatttttacactcattcatgtaaaccaaacactacttaaaatgagcctcctctacttggggtattaataattatgtgcattaatataaactcctctcgaactgtttgttaagttataatttttcttttatctttgtaactttgtagccacaatgtagttaggtgggcgtttgccaaggatgttagtggtttagttgatttattttctatttcaaatattgttatatgtaataatcacgaggtctaactgttattttctaacttttctaactataaacgttttattttcaaagttaacgttgtcctcataagttgaagttttttgttcttaattatcatgcattgttttttttttttttaactt

SEQ ID NO: 266406 - DNA, 1071 bp, Cannabis indica
tgaagagataatagtatcctctttcttttcttttcttctttcttttttttttttgagaatgataacactcatttttattttgctaaagaaaaaaatatatataatctccgatttggattcttaaagaaaaaatatatattaaagtgacacacaaagtatattctcttacatttattttaattgctttaatatcttcaaataaaacaaaacaaaacaaaacataggatgatattcatatattttatgtcatataagttttacttcttttagagatctgtgatggtggaatctgtttgtcacagaacattatttcaggttagtaattgtatttttcttcaaccttcaaaatgaccaataatgccctttttcttcttataatattcatctctcttttttttaacccttgtgttattattaactgtgaatcatcatattattcatttattataaatcaattttcatttgaaaaaattaagatgtgaataatgttatggatttttgcatagtaattagtaaaaacgatttatataaaatattattttagaaataatttattaatctttaaggatcgtttagtatgtcgtatataataaaacatatttgtactgtattaattactacgaccaaaattttaatacaatgtaagttatatttatattataatatttacaaaatattcgtggttaattctaatttttgacccaaacacgagactctgtcccgaacccgaaacccagattcggacccgaactcgagaatcaaactcgaacctagacccgactcaaattccagatccaaactcggactcagactcaaacctaggatccaaacccagaccggagacccaacccgtagtgttggggttgagtgtattgaattgaaactatattacaattttacataatttattaatacaagtcaatattaaacataatattgtattaaacagtactaatattaatacaatataatataatgtaatacatgatattaaacgatgcttaagtgagatattgcatagttttttaaaaaaaaaaaatgaaaagaaaatggagcaataaattaaagatt

SEQ ID NO: 266407 - DNA, 745 bp, Cannabis indica
cttttccaaaaactgtgccaaacaggcccataatagacccctcttctaaacttaccaagtgagagaggcacaaaactagaatgggaacgggaccacgacaatgctgagggttgagctccggtgatgctcatcatgtgtgtgccttgtcacgccatgggaaaaattagagagagagagcattagatcataggatcaggctcctaggctttgtttgctaacgagatgtgagtccctgatctgtcattaatcataggcgctgaaagagatggaagctcggatttgagcttagttttgagaaaggaagagaaagagttaggtctaagaagagggaaagtcatcaggaaaagataataaaagaaaataaaataaaaataatttatttatttaatttattaattattaactttaaattattttttaatttgtaaaataattttttgtaattttaatattatgtgtataaatataaacttgtcatatatataaaagtgtacacataaacagtccatgttgatacttaattgtgataaataagtgtcacctttaatttgctaacagttctgtaatttaaagaattttactagtaaattagaaagtcaattacaaatgaattgatagttcggagagtttagctgtaaattttttaacatttatgtattttttgtgttaaatttgacactaaatttacgaggtgtcatcggtgaaaaaaaaaaattaaaataagatggtctcatatacatataaa

SEQ ID NO: 266408 - DNA, 810 bp, Cannabis indica
acacacacacacacacacaccttttgcaatttgtgatttagttgcgcaaatatatgaacataacgacaaaaatattatttatggtcatcccatggaatctgatttcaatatgaccaacacacatgtcatgagattatacatgtttgttacattatctacttcaaaataggtacttgtcaaagatatgaagcaaacattgctcactaggatgaaagatctactaaaccatggcaacaaggttcagacaattcgggcatggggatggtttatccaattgttgggagcctacgcattgaagaacaggaatttaattaatgatatgcttaaaatccccgagcttacatttttggaccaagatcctcaacttcagattgcttcccaggtatttcctaataacccattgtgtcattgtgtgtgtattgagaggggcagggggtttgttgttttgcattattagagaagtatctatataattgtaggtaatcaaatcctattatggtaatcttatccttgtacggttcactttacatgtttctttacttcactcatgtggtaaccttgtaagcatttttttttctgacaaagtaaaccttgtaagcatttaatcttgtaatttttttttggcgtctatgttattgatgattgaattatcaacaactaaaaaatattgtatgtaaaataatttcattggttaattaaactgagtaatgctttacgattgcgttgtactgatattgcaggttgcatgggaaggtttaatagatgctcttattcatcctggaatattacctaatacaagaaatgatgcta

SEQ ID NO: 266409 - DNA, 566 bp, Cannabis indica
taaatattattctttttatgtcatataattcatccaaagtattttgtttatgggtggctgattaatttcttaccctatgagtttttattattttattttaatatcttattaggttttttttttttttatcttttatctaatatacatttcattatttatctttttaaaagaaattatttaatcaatatttgttttattaagtttttttattttttatttttttttattttatgtaatatataatttattatgagttagttttattttaaagttttttttttatatataattctatatttttattagtccaaaaaaatattcaaattaaattattttaaattaagctaaacattaatttttttttttctcaatttataaagaaaaataaatcaaatgagatgagaacattttttttactatttatctattaatattttatctattatataatatgtcttctaagtaatatataaatatatattttgttagagtctcacaatgtttacaaactatgtgaatattatacttattaactacaagtaaacacaatatatattatatttcat

SEQ ID NO: 266410 - DNA, 2273 bp, Cannabis indica
ttgaactgaaaaacacttaaattgatgatacacctgatgcacccacacttcaattgtaattttttttctcatattccacttacaagaaaattgaactgctcggttattttgaatctgatccttttactgtccaattcattatatggatgcttctggtttcatgtttaattactattcttctcgtgtgctgatatattgtttggtatgctacatggctattgtgaactgtcagagagacttgtttcattgaagagaaactctgttaaatggtattaaccatgaatttgtgcttttcttgtcctttcagggacctgagattcgaactggtttccttaaggatggcaaagctattcaacttaaggagggtcaggagattactatcaccactgattacaccatcaagggtgaccctgagatgatttccatgagctaccaaaagttggctgtggacttgaagcctggaaataccattttatgtgccgatggaacaattactttgactgtcttgtcgtgtgatacaaaagctgggtctgtgagatgtcgttgtgagaacacagcaatgctgggtgagagaaaaaatgtaaaccttcctggtgttgtcgttgatcttccaacccttactgagaaggataaggaagatattcttgactggggtgttccaaacaagattgatatgattgctctttcttttgtacgaaaggggtcagatcttgttaatgttcgtaaggttcttggccctcatgccaagaatattatgttaatgtcaaaggtatgctcagtgtttaatgtcatttcaggtgtgttatctttaagatgatgcttgcacccataaatctctcatgttcctgtaaccattcattcttatttcttaggatgatagttttgatgttaattgtggaaaataattatttttatacgtataattatatgttttgtgctgttatatcaggttgagaatcaagagggggttgtcaactttgatgagatcttgcgtgagactgatgcattcatggttgcccgtggtgatcttggaatggaaatcccagttgaaaagatttttttggcacaaaaaatgatgatttataaatgcaatcttatgggcaagcctgttgtcactgccactcagatgcttgagtccatgatcaagtctcctcgtccaaccccgtgccgaagctacagatgttgctaatgcagttcttgacggaactgattgtgttatgcttagtggagagagtgcagcaggggcttacccagaactcgcggttaagatcatggcccgtatatgtattgaggcagaatcatctcttgactatggggcaatctttaaggagatgataaggtcaacccctcttccaatgagccccttggagagtcttgcatcctctgctgtgcgaacagctaacaaggccagagcaaaactgattgttgtgctgacacgtggtggaaccacagccaaattggtcgccaaatacaggccagctgttccaatcgtatcggttgttgttccagtactgacaacggacacatttgattggtcctgcagtgatgaaagtccagcaaggcacagcctgatctacaggggtttgcttcccctgttggccgaaggatcagccaaggccactgatgcagaatctacagaagtgattttggaagctgcattgaaatcggcaactggtagggggctgtgtaagcctggtgattcagttgtggcactccatcgtattggaactgcctctgtgattaagatctgcatagtgaaataatgtgggacataaaagttaaaagaagccaatacttttccatgtcccttgttttctgttatgtaaccttcagagcactaagattcacttttaatattgccattttcaagtgagctttattagatagagggtatgagtacctctggattatattaatttgcagttagctaatgttatgagttgggacattaattttggcatggtatagaaataaggctgagctttgtggtcccgttgttagtccgttctgattattcactattttatcttttgtggtggtgttatgcttattattgacagttttgatggcagaattttggctaaggccaagtacactttccctattcaaaagaagagcacctccaacgtaacttaagggcaatcgaacttctctatctttttctctatatcatttttattcatttaaatatttctcaaaatttcaataatatttatatttcttactaattataatatttatttatatatatattttctaattataatttaaac

SEQ ID NO: 266411 - DNA, 605 bp, Cannabis indica
ggataatggattacatccattaacccctaaaaagcctagggattacaccatgtgtttcctatgatgtattcgttgggaatgcgtgcctttactgaataatacagaaagacatgtatctcaattctggggatcaccccaaaaaaacactataaatacctcccaaactcattaaggtagggtcgagaattttaggtccgtaagactaaagagaaaaccattaagaacattctctgtaataaatactctcataaatacacagactcatggactaaggctcattaacgcccaaaccacgtaaaaatctcgtgcattaacttcttacagcttttcttaaatattattattatattggttgccgaaaacctcggtcaacagtactaaattatgtcccctgaactttcatccacgttagattttttttactaaaattggataaaagtccttaaattcaacaatctcaatagttcaagggatatttttaacgactttaaaagttcagggggcatgatttggtaatgttaaagtttgggggtaaaaatgctaattagcctaaaaattttacggtgattcaacaatgcacttccttaaaaagaatgtactgatgc

SEQ ID NO: 266412 - DNA, 2330 bp, Cannabis indica
tagtcaaaaaattagtatcccggagcactcgaaggactatggccagatgttgagcgtggcggttctcattgttgctgtacacaagaataatcatcaaaaaaaacagtaacaaaatgtcgaaggtagggtctgaaaacctgattcatagctgcttggaacgtcgaaggggcatttgttagcccaaaaggcatcacaacaaattcgtaatggccttggtgtgtcctgaaagctgtcttgtgaatgtccatgcgatccattcgtatttgatgatagccagctctcagatctaacttggagaagacggtagcaccacccagttcgtcgagtagttcgtctattgtgggaatgggaaagcggtctttaatggtgagaccgttcaacgctctgtaatccacgcagaatcgccatgacccgtctttctttttcactaatagcacaggtgacgaataggggctagtacttggtcgaataaatccaacatcctgcatctcttgcaccagtttttcaataacgtccttttgaaaataggggtaccggtaaggtcgcacgtttacaggtgccgaacctggctgtagaaaaatgcggtgatccaccgaacgaaaaggaggcagctgattcggtgtagcaaaaactgctgcaaactgagacaataaaccccgtccctgtggcggaaaatgggcttcaagagctgccagatcagtaatgtcattctccttagtgtcctcagttgtttcgagtcgaaataaaccccgaacttctccttcgcgcagtaaggtagtgagctgtgtgtaagtaagatggttcccagaaatttgagtggaacccgatagcttaataatgtttccctgccaagtaaattccatggtgagtgccttgtgatcgtgaatgcacggtcccaaagtttgaagccattgcatacccaaaacgacgtccaagccacagatcggaagaacatatagatctactatgaagcggtgcccttgtaaccatagctcaacctccttacagagcttgtaacacaacaaaaaatttccattacctatgtatactttgaaacgtttcgtctcttcccacggtaaattgagttgtgtagccaatgattcttgaataaaattattattgctaccggtgtcgaccaatacttcgagtgattcattgccatgtttcgctgtaatgcggaaaattctcgggttcaatgaattagagagcgaattgagacttacttcttcttctggactgtcaatttcatgttcctcctcgtcagcccccatggatgcatcttcctcatcttgaacgcacataatcaacattttgttcttgcatttatgaccataatgaaacttctcttcacatgtatagcataagcctttctcccgacgttccttcatttcactgggtgataatttcttaattggcagagagattgtattgggtggtttacccaatggttggattggaggtgatggaggacccgtactcggcttgtatgtggtcggaaaagttgaatgtgaattgggttgttggtaacttggtttcgagatccacccggttctattatggtctcgttgtcgagcgaacagatcttcattgcgatcctcgaataattgggctctggccatagcatcggctaaattcgccggaggtgccatcaataactctcgtcggatttctaacttcaatccccaaatgaagaagttcaagaacatggagtctgccactcctgtgatacgaggcatcaacatttcgaactcttgtctgtactccgaaaccttccccgtctgtgtgagtttcgaaattcaacccaaaggatcgtcgtaaatggatgtaccaaagcgaagttgtaattcccttaagaaggaatcccaatcataaatcgatccacctttttccatccattgaaaccagctggatggaggtccgcctaagtgaaacggaacaaccgctaatcgcattccataatccactcggtgaagatcaaaaaacttattgatcttataaatccaatcgtccacattctgtccgtcaaagcgaggcaccttaactcgcaaggttttgagaattgagttgatgtctcggcaatctgattcagcatcggaacgtcggctccgttcgcgaactgagtctctgcccccactagcttcacccacttggttcaccggcgatggttgagaattctggttgaagcgttcatcgatcatcatcttgatagtctccatctgggattccgatcgttgttcccacttgaggtccaacgcctgcaacaatgcagcaatctcctcgttcttcattctggaaagaaaaaaaaagggtcaatgaaagcaccaaatgtt

SEQ ID NO: 266413 - DNA, 516 bp, Cannabis indica
aaaactcataaactcaagagataaaggtttctagggtttaccttacttgcaaaaaccttgaatccttgctaaatctcagagaaataggaaggaaaagttggtccttgccctaattttgtctcagtcgaaagaaagagagagttcaagagttcaagagaaaaactctattttctaattttcttaattttttcttcaaatggaaaaggattttccccaattaatccttgaaaaatattactttgctaggtgtcaaataataaggtagccacctaatcaatactttgcaaaaagactaaattgccctttagttttaaactttaaggtatttctaaagctaggggtaaaatggtcaaattccataaccctgctcaatcccgatattttatttcctctaaagtatttcccaccaagaaataaggttctaagcttgcccatgtaaccaaactagtcatccatcgcattttccgttgtcgccgagcgaaaattaaaaaaattacatatttcacatataagcta

SEQ ID NO: 266414 - DNA, 1329 bp, Cannabis indica
gaaatagtgtatcaaagtcattacaatattcgagaagggcacagagcaatgcagtcgtatacaattccggtcgtcttaaagctaagttatcagtgttgttgcctttcaattttgttacaaagaaaggatttttgatcggttggggggcaatgctggcttgtatacaaagatgtcaatgccctttcaccattagtgctatagtttcttgtatccctttgaatacttattaaatgaaataataataataataattaaaaggaaaaaaagtcattccaatgaacaataacattgcttttctctttaaacctacttatgagtcataaatatacatctataaaaataattatatgcaacaaaaaggcgatcgggtagtgcctatcattttcctattctactcgagaaggttctttattttagggagactatcgagtagcatcaagagaccttctctgaagacatcccgtaacttctattagaagtgctacttttaattggaagtaattgtcgctagggcgattcgaatacataaaggcaacctagttgggcctttaggatatgcatcccatctcaatgattattaaaatttatgggcaaaatctagcactccttgtgtgtgtgtcttgtactcaactcaagtcccaaatcatgttttgttcattaaaatgaattatgagattgtttagttttggccacataatcatcctaaagatcaagaataaacagtttagactacaacaaatttctccacagaaacacaaatctctcaaatttgtgtatcacaatttactactacacataattcacaatcataatacaaataaatgttttattaatcatgttagtaacaaatcaaaatttcctccataactatagtcattagttagttatttttcttgatagccattaatattattagttccattccattatggttttgagaatgttttgtctttttaataattattagccaattaagatttgacaaaatgggtccactaaattggtaggtcagtggatcactgtcactttctccatacttctttttttttaaaaaaaaaaaaaatatttaaaaaaattgaattaaagataggtaaaatatggaacatttgccacctgcaaataaagataattaatcatatattatctgtttatatatattcatatattatccatatttgaaatattcatgataatttacagattttcggagcaaatatgggagtagttccttcctatattgaacctttcatattccacaacaagaatgtaaaattttaattttttttagttatttttttattataaattttaaaaagttgggattttttt

SEQ ID NO: 266415 - DNA, 710 bp, Cannabis indica
cctaaaagacatttggcataggcgtctaggacatccatctgttaatgttttaaatcaagtccttagaatgtcaaatgtaaaatttcctttgaatgaaactcaacacttttgtgatgcttgtcaatacggtaaatcacatgcactgccttttcagaattatttgtctaaatctactggttgacttgacttagtgcacaccgatttatgggggcctgcccccataacatcacacactaatttcacatactatatacacttcctcgatgaccatagcaggtatacttggctataccttcttaaaatttaaatcggatgcattgcaagcatttaatcagttcaaagctatggtagaaactcaatttgggaggaaaataaaaaaaactgagaagtgattcaggtggggaatattaggctttttcaaatctggtcgcacagagtggcatattgtttaatcattcttgcctcaacacttcagctcaaaatggtcgagccgaacgaaaacatcgccacattgttaaaaccggacttaccctccttgcacaggcaacaatgcctcaaaaatattggtctgatgcatttcagactgctgtctatttaatcaatagacctccaacctatgttcttaatcacaaagctccctatgagattctgtactcaagacagcctgattataagctgctaaaggtatttggttcagcttgttttccatg

SEQ ID NO: 266416 - DNA, 886 bp, Cannabis indica
attattggtaattattattatgatgtataccaatctgatggagtggaccacattagtaattattaattttttttattttaatgaatattaaataatttattataaaaaaagtaatcgatccaatttgcactattgtggattttattggatttaaactgctatgcggattgaattagatccaaaatataaaatccgcacttagtgcgaattgaatattgtttgatcaaaaaaaagcagattgaatcggatgaacaaccctaactacagttctttacggtcagcatgtcagtcctttaagttgctactccttttggtcccatcattctaaaacatttttccatgctttgcttgaatgtaaaagagcaaagtaagtttggagattatcaaactttgactttgctgtctttatcagctactttcacttctgcaaagtatttatgtttcacattttagatgttttctctcaacagaacttagaacatattgtttgcattatttaaagcatttggaatgaacaaaataatgaggtacatggtaaaaatcccaaaccaactggtgttcttctactccctgccttaaactatgtcacagaattccaaaatgctaaaatgggcagcacgccagtagagacttttggccagcatcttctaggccttcactaacctcgaaatggttgaattcaccatttggaagactaaaactcaacactgataatgcagtaaatacaatgacaaaaaaattctaattttagcgctgtccttcataactcagatagtgagatagtgactaccttatcaaagccttttcaaagatgcttcaaaccagaaattctcaaggctatgactatcttttacaaccttatgtgactaattgaattgcaactatt

SEQ ID NO: 266417 - DNA, 650 bp, Cannabis indica
caaacaatataatttaattaatagaaatataattagttattacacatctaacacaatttacacttttatatacaattatatttttctttataatattttaaacacttcaacgccacataagtaggtatatctcctctaatctccaaataacagtcccacacactcttctcgagtgcgtgtctgtcactctctcaaattctcattattatgtatgtttgtcaactgtaaagatatatatattttttttgaatgggtcaactgtaaagatattagtcttagcccaaaaagaaaaaaaaactgtaaagatattaattagttgtaaattgaaaacaatagtcttggttttagactggattaaggctgaaataatgttgaaaatgaggcacaatgagctagattaagggaagggacagaagtgcaaataataattggagacaaagttaggacatatgaatctcgaactctaactttgttgatgaaacatttggcatataatctgatattgggaaccgctatagaggggaccatccacccaatccaaacactatcatctataatctttagctgttaacatatacacttgcatttactttagatcatattctgtgtataatatatatttttaaaaaaaactaaaagaaaaaaataaa

SEQ ID NO: 266418 - DNA, 1176 bp, Cannabis indica
gtttgcctctattcctcgctgatgaaccataaacccgaggaactttcctgaaccgactccaaagacgcactttaatggatttagccgcattttatatcgcctaagtatttcaaacattgcttgtaaatggttgacatggtcttttgcctgttgagatttcacgagcatatcgtcaacatacacttccatagtatccccaagcaaatctgcgaacatcatatttaccaatctctgatacgtcgcacctgcgtttatcaaaccaaaaggcattactttataacaatacagacctcgatctgtaatgaacgaggtatgttcttgatctggctcatacatcgggatttgattatatcccgagtatgcgtccatgaagctgagaagttcatgacctgcagtggcatcaacaagttggtcaatgctaggaagtggaaagctgtctttgggacaagctttatttaagtctgtaaagtcaacgcatgtgcgccatgagccgttaggcttgggcacaagtacaggatttgctaaccaatcggggtagaacgattcccgtatgaagccacaggctaggaggcggtcgacttcttcttttagcgcttggtacctcgcggggtccattttgaggcgcttttgtcagacacctcgcacttcggggtcgatgttcaagcgagacacatgacctgcggagatattccgaccatatctgaatgtttccaagcgaaacatcaagattttgtttgagaaaggtcgttagtctttctcgctgctgaaaagtcatttagagccaattttcaaaactttactattatctacgggattaataggtacctcaatagtgtcttccgcggcttcggcggttgcggcataatcgaggatcctcggatccaaatctggtccatctttgtgcggcacttcttcaatcctaaggacctcctggcgaggaggcggtgcctctaacagatagatgacatttactgacttcttctctgcgagcttgactgctgcattgtagcattctcgcgaatctgactggactcctcgcacagagcctactccagcgggagtagggaatttcattgtgagatgatagatcgacgtcacgatcttcatctctttcaggattggtcaaccatcacggcattgtacgccgaatatggtcgattaccgcgaagtcagcca

SEQ ID NO: 266419 - DNA, 1393 bp, Cannabis indica
ttaccatgtgtcattatgctaatgcagaaaatatatgtttcaattgtaagaatccaatctacacaagtaaaaaaagatgttgtaataaagtaattgcagacattaaatttaaataataataattcagaaaattcatacttacatgaaacggttagatcaaaaaagaaaaactctatatgattaaatatagtatagagttttatttttgaataaagataaatatcacttactgctagagagatgcatgatgaagatatattcttcttaaaagaaacaaatgaagaagcgatgaatattaacattaaaatttcatatttatctttattcaaaaaaaaaaattgataaaaaaatatgatattaaagtgatgaatattaacattactgggagaataagcagagagaaaaatctagagaagaagagaagtggtgtaacggccaacaaaaaaattagagggtatatgattctgttatatatattgggatggaaaaaaagagagaagagatgagatataaatgggttttgggttgatgagatattctcagctagctctaatataaattagaataggaatgtccaaattgtaatagaaaaatcaatacattacaacagcaaaaacccaatcgtattgatatagtaaatgtacaacagcgaaaatccaatcttattttttggatttaatgggattcaaaaacccaattgttatttgggttttcaagatttgataattcgacccataaattgaaatgctttctttattttccacgtaaaaagatttgcggaagaagtaatcaaacatcaagaaaagaaattaaatccaataaaaagacaataccaaaatcgtgttaatgttcatgtaaatatccccaataaagaaattgatcgataaatatccttctggccactctgaaaacccatctgatcgataaacatcaatcaaacatgtgaatttttgtttattttatctagagtataatattctataatatttattggagtttgggactaatagttacatatatcatacgtaaatattctatagaatattattatagaatattatactctagataaatatccttctggccgtttgaaattagatatttatgttcatgtaaatattcacatcaagtgtatcctcatttgttttactaactcatctgatcgtttcgtaatcaaatattaatgggatttgttttatttttattttattattttattatatataaataatattttaatattttattatatataagtaagaagtcacccataaatttctcataaactaagaattcagttatatagacacgctttatatagaatagatatagattcatgggtgacattttatttatattaaaaataaaataatatattattaaaaataaaata

SEQ ID NO: 266420 - DNA, 541 bp, Cannabis indica
ttgcagagttggcaaacaggtctattgttattgaatctgcctctaccgtggccttgaccgcgattgttgtgagatcgacctcctaggtgctggttttgagtattttgaaagcctccaaagttgagagatctgcgcatctgagtagcaagatgtgcagcaggaattgtaggatctccttgagttgaatgaagttgttcaagtctgatttcctggctttgcaacatgtattaaacctcttgtagagtaacctggtcatgtctagaagttaggttaacaacaactgattcatactcatggccaaggccacccaatatacagagaataagatcatcatcagacaagagttgtcctacagcagataagccatcagagatatttttcatttttaaaatataatcatgaatagataaactgccctttttaagtgactgaagttgaaaacgcagctggagtatgctggcctttgaacttgtggtgtataatcgttcaagagttatccacagttcatgagaggtaacgcaatttatcacatgtccaaaca

SEQ ID NO: 266421 - DNA, 1609 bp, Cannabis indica
ccatgattctcaacaggtataggcgacggtttttaatcgtgccctatattataaattggtattaatttatttttaggtgtaaaattaattattagataaatatttaaggatggttattgaaattttcctatttaaaaaatattattagatacataattaaatttaatataatagagatatattataaggtgcaccttataattttttccttacaaagagagaggtagaaaaataggagttggtagatagatagaaggattgagatatggagagagttagggttagagagttagggttaggggatttagggttgtaaacgccaatgggtttagtcttattttaattttttttttttaaaaaaaaatttaaacccgccaacccaactaatctgatcatcatacaggtagattttgggtgtaattttttttatcttaaaacctcgcaaataataaacttgtctggtgttgaactctaaaactaatcccataataatacttggataaatattagcagtttttttatttttacacttcaaaactagtttttttttttttttatttacatttttatagaattttatatagaaactcaaatagtaaatttaaaaaacaatatatggagtaattcctctaagtattatgtgtaattaaaagataattaatctagctttgtggtggtttacataggaaaatccacaataaatgtcaagtggtagtgtgacagttacaacatgccaacattgccggtggcacaaattatggtattacatataattaattaatttagtatacatgtaattgagattgttacctactcttatcttcattgtatgtatatagtttacttattattataatggttcatgaagaccagggcgatgagatctattatctattatcatctctcattattataaatcacaaaacaaccattattgatctcttttaatttcttgttccttttggatatggattttattcacaatttcttgaatttatttctgcccactatttctattattgctataattttatttctaccaccttttctgttctacaagttattcaagtccttcttcatcaaaatatttattccaacccaaaacttggctggaaaagtcgtcctcatcacaggtgcctcctcaggaatcggtgaggtgaggtttgtctatatatccaatgtgtatatatatcatcattttgaattaaaatatatataatttaaaaattaaactattttaaatcatctattagaaatattccgaaaattatattatatttattaggctaaatagtgagtacctaaaattttaaatttatacatgtcataaatttaaagtttatttttagtggcacaagtactaataaaatttaaattctagattattggatctagacaaaaacatatagtattaattactttcaaattttcttttaataaattgaaaatggaatctatagtacttacaattttacaaacattgagtttataccacttacaaacttaaaccttaaaatacttatactacaaattttttaacttttagtcataacaaaatttgtgactaaaagtaaaaaagttgtgactaattataaaacaacattcttat

SEQ ID NO: 266422 - DNA, 654 bp, Cannabis indica
acccgactatacgggtttttaggtggtcaatttttttggcagcgggtggtcgggttttcgagtttgcgggtctaaatgtgcagccctaagggtcgaacctcccctacttagttttattccttgaatatttccgtgtcccagagcctcttccaaaagtcttgaaaacacctctgcaacacaaataaataggtatggggagagaggatctccctgtcggaggccacacgatggcataatctttccgacttgacccccattcaggcaaatgttgagagtggtggtggaaatgcattgtgaaatccaactgcgcatcctttgaggaaatccaaagcaatccaaagcgtggtcaatgaacctccaactaagcctgtcataggcttttacaagatcaattttaattgcaaagtatccctctctgcctttcttccggttgaaagaataaataatgtaacgtccccgcttcaagcctccattgggtccttacacccacgaaatgaatggctcttatacacgagtatgtcactttggctgcttcatggattgatgactgaccctacagaccaacacgagtgttttcagcgtgctttgtcctcactcacacgcatcctgaaaaaacttcccaggaggtcaccaatccttgaaattgctccaggc

SEQ ID NO: 266423 - DNA, 696 bp, Cannabis indica
atttgactattaaagtcattcaataacaagttagaggaaggtttttggcgggagaatttgatgatgacgttgacgctgtgaagatggagattgtttatttgttgagtcactatttatatgggtatgagaacggtaaaagagtcgacaatgagttatttggttttgtcgatggcgatttgtctgagctaaggaatatcgcatttggtaaactgctgtgggataggactttccactacatgaatttggcattcaaggacggtgacaatatatattacaagattgagaaggccaaggaagagaaggataagttttattcttttaaattccaagggtttctatttgctttcctaatttggttgttcgagatactaccaagcctgtctcctaattattgcaagaggattgccaatacgtatcctcgaatgttgaattgggagagttcatataagaaaaaaactgggggctattcagaacttgtttctgaagtttttaataattctgaggtaactttcaattattataactgtttttttttaaatagtgtatttataacaggtttttaatatgtttgatttcttttcgatttttcaggccactgttaagaatttttatcctgttggccgtgagcttaagaaagttgctttacaaaacctcaaatttgaaccggtttatcttccaaagaaacctcgaggtttc

SEQ ID NO: 266424 - DNA, 1012 bp, Cannabis indica
accagttccttagcagtctcagcggcagctatgtatttggcctccatgatagagtttgatgttgcggtttgcttggcacttctctaaacaatttctccacccatatgagtaaataccatcccagtgtagacttcctatcatgaagacaagcttggaaatctaagtcggtatagcctacgggatttaaagcaccaccctcgtagactaacacataatgccttgtacttttcaaatatttcaaaatattcttaactctagtccaatgttcccctcctcgggtttgtctgatacctgctcacaattcctactggatagcaaatgtttggtctagtgcataacataacatacattagacttccaactgctgaagcataaggaacctttccaatgctctctatctcttggggatcagtgggacactgttccttagatagacagatactaggtctagaaggcataactgcccctatggtgttagtcattgagaatcgctctagcaccttatcaatgtaagctgcttgggagaaagcaagtgatctattcttctggtttccaatgatttgaataccaagaacataaccagcttcacataaatctttcatttcaaattgagtgttaagcatttccttaatgttagtcattttcttgatattgttaccaataatcaaaatgtcatcaacataaaggcctagaaatactaccacttgattatccttgagttggtaaatacaaggttcatcttcattttggtgaaagctgtaggttttgattatttcatcaaaccttttgttccaagagcgagaagctagcttaagtccataaatggacctattgagcttgaaaaatttctcttcctatcttggaagcttataaccttctagtttatccatatagattgtctcgttaagaattctgttaaagaaagctgtcttgacatctatttgccaaatttcataattgaaagtgacagctatggagagaagttgtaacaccctaactaccataggcgtat

SEQ ID NO: 266425 - DNA, 1189 bp, Cannabis indica
cccatgtacttttaatggtattatacccatattaagaaaatttgaatttttatatttcattttttttatctaataaaaaaaattatattatattggctgagattgttatataagaaaaaaaaataaagaaaataaaaaaaaaattgagtttgactttaatgttttttatataaatatattttaaaaatcgattatttttttaattaagcatgaaactcaaatttattttatattatttattatcggattaaaatataataatttaatatttttaaaattaatatttgtagttaaattttttagcaactatatatcaatgggtaataataaaaacttaatattcactattatttaggcttaattgtattagcataaataaccatcttcgaagattttattgtttatgactatatttttcaaaaatatttcattttttgaaattataaaattacaattaagacccttaaattaattttgatcaaaaatatatattttttaaatatgaccaaaatacatctagttaaggatttataatactttattaaaaaaattaaaattaaaaatataactaaaagtatcaggcagaataataaacttaaatatttatatatataatataaattgatcccacttaactttagggaaaagcaaagcaaaatatacagagatttctatgtcttaattaagcttttcaactgtgtaagatttgtttgaaagagactatgcttcactacaatttgataacattaagaaaagtattaattaataacatacccaaatctattatatatatacatacatataaattctaaattattaattattttttgtaattaattaattaatcttactatataaaaatcttatataatataatctaaaagatgatgagatcaattattacaataaataattttcattataaagattaattatatcgattatttatttatttatttattttgaaagagctaaatatatgtcgattattgattgtgtcatgtaacagtgcatggcacatgcataaccctaactatatgtttggcacgtacgtggtatatattaaagataataataaataaataaataaataatctaataatatttatatataactgtataaccttaatttatccgagaaagaaccttaaactataaccacatatataacagagtaattatcaaaata

SEQ ID NO: 266426 - DNA, 365 bp, Cannabis indica
atacttgtgagtagatctaaaatcctggtaaaataaattccaacaacttcatacagaaaactgaaaagtttctacttaatttccttacctcgaatgtggggtcctagcattgattgcaatgagagtgatcattgagaaataattgtcttacgaaaaaaaaaaatctaaattttatacgtattaattagaatttatcataatggtatatatacatatatatggggctattatagtaggaattgggtattttatctatcaataggaatagtgaattatagctcttgatttaatccaagggctcaaatcaactcttgaaaactacaccaaaattaatatattttttttatttataattaatctttaat

SEQ ID NO: 266427 - DNA, 703 bp, Cannabis indica
acaaaagttagcaacaatcataaaactcgttactcatgtattataacaaaaatagtaaccttgtacttaatcaataatcaaaggcttcacaaattcggtccactcatcccgtactgcattgatcttctcgttatagtaacgagcgtttgacttaaactgtaaaacaaaacataaaaaatattaatcattgcattaaaatttaaaagtataattaaaataaaaactaaaatgaagattatttatgttaacatgatttttcaagaaacttgcaggactaacaaccgtcatgaagatttgaacaatcttcatatataacataataactacattatacgtactctattcgactgctgtcgacacgtgtactggatgattgattcctttatattctaatttctacataagaccccaacatctatatgtagataaaaactccatatagatttatatattgatgcttattaatgacataatttaataatgaaaaaacaaaaatgataatatgataaaatctaataaaaattaatcaagatagaacataactagtgagaattatttggttctttcattttctgatcaagatatgaattttctcctatacagtcataaatatatatataaagagcacacaaaaaaccaagtaatagtacataaaataaagaaactaacatcatagttagagattataatatctgatataaat

SEQ ID NO: 266428 - DNA, 623 bp, Cannabis indica
gtcaatctcctattacaacctcttagtcaacttttacacctaaaaacatatgttggaatatttttttttcaaatttcttttttacgggggtgttcgttatgcttacaacatcatccctgtaaattttttgaaaaatttcgaatagtttacagtgccgaaaatacgtttcaagttttttgaacacgcgtggtaaactattaagaactctgttttcggtacagtaaactattcggaatttttcaaaaatttacaggggtgatactgtaactataacgaataccgctataaaaaaaattaaaaaaaaataatttcgacatgtaattttcgaacataaaaattgactaaaaaaaagttataattaacactcctcaaaatataattataaataagatattaatatgaaaaagtctaaacaataaataataattcccataactaaccattaattatctaatataaaattttcaagtgacaccctaagatagtgaggtccattgaatttccaatttataacagtaaaacaaaaaaatctaaaattatcaattttaaattaacacaatttcaatcttatcttccgttcaaaacactactactatcattataatctaattttaattaaatat

SEQ ID NO: 266429 - DNA, 3139 bp, Cannabis indica
tttattttgataaaaaatcaattcatggtcctatttatacaattttagaaaatacaggatctattttgttatttaataaaacatatgatctaattagtaacttttgtaaaatatagagtgcaaaataatatttaccgtataatttattattattacttaccttgatgcaatgagtagaaagataaagaaagatgtttcacttattgcaaagccttttattttcttttctgcatgtaaaccaacaagcaaatcaagcttttcaacatcatctccataaacttcattaagtgcttcaatggcttcctcatcacatgttaaatcttcccacttggtaattggaaccattagtaagtttcttctgaactcattgtaccttgcaactcctctctctctatctctataaactataattgccaaacaaattttaacaattacaaactactaggcaaagaagcaagaaaatcaaataaatagacattatgtaaaagcactcttaaaaaaatagtgatcataaatgtttggatcctctacttttttctaaaataagtgtttgaaccctctatattatagtcaaaaatacttttattattaggctttatttatagggtcatacttgaaaaacacgtgttttggtatgatcattaatctgtacgagattatatttaaaaatattttgaccgaatcagattcaaagaacttttgtaatctaatttttagaataaactgtagaaaaaatcaattttttaaaaaaacaatggtttaaattggtatttaactaaaatatatgatccaaaataattgtttttttaaatgttaaaaattataaggtcatacttggaaaacatgtgattttggtacgagcattagtctagattatattaaaaaatattatgaccgaaacaaatttaaaaaacttttgcaatctaattttcgaatcaagtataagaaaaatcatttttaaaaacagtggtttaaattggtatttagctaaaacatgtgtacaaaaaagaatgaaacttagtgtatgaatagtatcactatgaagtagagatttactttctaaggcagccatgtcaattggttgtggtctatcttctccattgatatcatgtgcaatgagatttctcatccatgttgggtagttccatagtgagagttctccacaagcttgatgacctaatgacaccaacatttgttccaacccaatctttgatagtcttttctctccttccttgcctatcatttcctccattggaatcctacatatgttaaatttagtgaattaggcaatatttatttattttctcacaacttttacaaatgattctattatagttacttttataacctaatagagaagaacattgttattaaatattaatagtgtcgaacattattgcaaagttttactttgtatatagttaacgataagtcagtcttaaactaactgagacctttagagcaaaaaatacaattaatatttttttatgataattttatatataataataaaatattaaatatagtactctaatattatataataaagatcgagaagagagaaagagagatggagaaaagtatagtactcttctattataggaggggatttgagttttgaaggtgtagacttgatgtccctaaggatgaatttttcaggtaaaagtgaatgcattctataaacactcacaaactcctcagttagtgaataaggaattccatgatctctaggcttctttagaccaaccaatccacttagtaatggtccacaaatatgcccaaacatgtctttaatcctcttccctaataatccatacctacaaaacacaagtgaaaaaataagaaacaatattagtatatcacaagatgacataaataaaattactaatacaaaattaacacaaaatgacaatttttaacggatatgatggtttgaacacaaattaaacaactgtcatatcatgattcataataataataagaataatttacgatataaatacttaaatttaactcccgcttactgataaatacataagttacatttttaaaactttcgtaagtacttgatcgttaagtgttaagtcaatggtcacgtgacagtccctaataagtccatgccattacattttttattgataaattaatttaaatatatcaattagaaaacaatacatatgtggataataacttgacatttaatagtcaggtacctgtgaaaattctagaaatataacttaattattaataccgtcaaaaattaaattacaacctaaagttaaacttaagtatttacgctgtaaattactctaataataataaaggttttaccagttaattctcatgccagcgagaagagtatcggtcttcaatagttcaatagtccaatctattgtatgaactttagcaatgactgctgaaaccactagtcttgcatgtctatagagattctcatcatctaattttggataatgttcctaaaaaataagagtaaattattagctaaactaatgtaaataagaaaaggaaaatcaacaaatcaagcaataattatgaaaatttaaaagattgtcttactttcaacatatcacaaacaacattgtgttctttgacaaataaagcttgtaggagagaaaaacctgcccagcaattccgaacatctccagatatcggaatgcctttctcgtcatgctcgagaagcatgtctttcgagatcttcaattttccatctttgaaactccttactcttgtcatgccctcgttgttgttcccatacactacactcccatccctattcaaaatatactactcgaaacttaattacaatttatatgagaaaaatatttctcaatgagtttttaatttataaaataatgtttctgataatctgtcaaaaattctcgaaaccttatttgaaacttcgccaaaaaaaattacttctcaaagtaacattataaaaaaatagtcggtaatgatcttggttggttgtgcttttaaaagctgtttttaagcttgaaagcactgctattgttgtttggataattaataaattttagctttcagcactaaaaatcacttttaatagaagttaattttaataactctctctcgaaaaaaaaaaaaaaacttacttaagaag

SEQ ID NO: 266430 - DNA, 695 bp, Cannabis indica
tttgaagaacaaattgccattattgaaaaatctgtaaatttatgaaaaaaaaaataattaggttaagaaaaaaaaaaaaaagaaatgacatgtaaatggaataaatgaatatgcaaaatatagaaatgagagaccctatgtatttataaatttatgtttatgtttataaatttattttcataaatttgagtttattataaaaccaattttatatttaaataaaatattaaataaatattattaaaaataaaatattaaataagtttttattaaaaatataagaatattaaattgttggtttcaaattttttttttttttactagacaataaatttttataattagagtttattgtttttttagtggctttgggctatagaaaaaaaaattatttttggcctttatttataaaaaaatgtaatattttttaaaatcagtaaaaaaaattgtataatttcaaaagggaagtattttttttaacccctggactagctaggccctaggcacagacctagcccacctatgcccaggccaggaaaagagctgtaatgagagagtaaatcatgtgtttggtagggaggaaatagacagaaagaaaggaaagatgaaaggatcccttctcctctcaaatgtacaaaatccaatctttccgaaaatgaaaggaaaagataacaaaagaaagtatataaaatgtc

SEQ ID NO: 266431 - DNA, 680 bp, Cannabis indica
ccctatgatcttaccaattcaaatcaaacaacaagataagcaaaagcaacataaaaaacagagtaagttgaagaaagaatgaaagaagaaaagctttacatctttgatatcttgatcagtacaaaaccccagtttgagcatcgttgcagctaaatacacagccaacccaattttctttgcaaacttatgagttgcccaagttacactaattcctccggcactatgtcccaccaatataacctgaaatatatatatagatatacatattacaatatataataagatggctgtcacaacaaactaattataaatataatatattaggattgagctatatatatatatatatatttacctgctcatcttctggcaaagttgacatgaagttgaataagggctcattgtaatcgtcgaaagtgaagacggaatcggcatcggacttgtctataccggcggatttgaggtcaatacaggagactttatagccggaattttccattaggcaccggattttgtaccaacaccaactccctccacttataccatggaccaaaacaaagtgtgccttcaatggtgctgctactactccggattctggcatattttcttcttctatcttttctttcttaacttttttctaccttcacttgtccacacatatatatatatcttatatacat

SEQ ID NO: 266432 - DNA, 677 bp, Cannabis indica
atattaggatgttaatgaaacgtacttgttagtaaatctagatccttgtaaagcatattccaacagaatctggttaagttcgtacacaagtgtatacttagcctcttactattggttctcagggacatcttgttgtacctgagaacaattagagctttagttcaatgtttgcctcagccttggctgtaccattagtagtgccagaactaggagctttagttcctctttctttgatcctccagtcaaattttcaaatgtctaaaggttgttgattaactcgtggaagtcaaagctccaacttgttcatgacataatttgatgtaaagggcagaaaagctggagtcaagctattcaagatcaaactcacttgatttgtctgatctataacagctccatgattctcagcctcttggaagtaactagtcatttggagcaggtgaacacgcacattctgatgaggtttcatccatgcattgataaaattcttggtcgcctcaaaacgagcttgaattgacgccatcccaaatagttcactcaactggttcatgatatctgcagccgtgagagtattggaaaaccttgttttcaaggtatcgaccatgctagacagcataaaagtaccaagctttgttgttagcattctgccaacgctcgaacttttccttaactgccttggt

SEQ ID NO: 266433 - DNA, 647 bp, Cannabis indica
ttatttttatgttgagaagaagaataggtgtagtagttcacatatttttgtccttgtaattttatgttgtggcatgtttggacttcccttgtcctaacactttcaccgttcaaaatcacaacgggcagctgagtgtggacttttctcgtcggaaggtggtagcagtcctctgtttttgttctgctagttttgggattcagtgttgcttcctttgcgttaggggagttacgagtgaagttgttttactttttgtttttctttggtttgtttactttagcttttctagctctttcagtgttgtgcaccttatgtccaattattagatttaaggaattttatctaatttcattcaattttattgtttcagtgattgtttatgtactaaaccattgctccccatactttaatatctaccaaaccatgcccctcaaactttgataagtactaaatctacgcccctttgaatttttcatccatgtttagaattttttttactaaaattaggcaaaagtccttaaatttaacaatctcaatagttcgggggggaattttttaacggccaaaaaaatttagggggcacgattttagtacatgtcaaagtttcagggtagaaaaatttactaattagcctaatcaaaattatgtga

SEQ ID NO: 266434 - DNA, 1767 bp, Cannabis indica
aactagatagttggcttaatttaggtcaagataaggcgaagaacaaatcaatgaaatcattatcgcgattttgggtgtgtacttggatccaacttattgtgatgagtttagggttgtgtctattcccaatagcatctcataaatcattgcacaatctatatagtcaagagtaaattttcacaaatgtatttgaagataatgtcaacaaaataaatataaaagggcccttttgtctcaataataccccaaaagatataaaggataaattagggccctttgtgttccattttgtaggaccttttgtttggattgaaaagaagagtagaggaagaaatggctttgcagctaccttggctatatagttggtggggtattagttgtaatgtcattcttgtcgacctaactaatatatatttataaaatcttttaagtcttaattctcctttgatttttgtttttcaaatcttaagtttcatgcctcttatttttcttcttatgtgttctaagagaagtgacattaatgcttcatcattttgagaagttcttatatattacatgaatagttttattcaaaagcaatgttaattaaataattaacttttaaccgaaataattagaaaatactataggatatgtcagaatcggccctcaaattcagtgggccatgagaaaattaatataaaattgaacccttagaactaaatgtaatatttttcaaaattaataaaaaaaaatataataatttaaaaggagaaattttattattggtccctggactaggtgggccctagacataggccttgcccgcctatacctagggctggacctggatattctaatgtttccaatagtctaagtaatattaagtatttaggtatctagatctcacttaatgatatggagctcccacaaaattatacataattttcaaactattaactacttaaaactaaagttaaccaaaaaataacctacttatattatgaagacaatttagctcgcatttttgttacctttaaaatacatagtattgccgttattgagagtgatcataatcaggctcgatcttagacacaaacggttcaggtccgtgcttaaggcctccacttaatgatgcccttaaattttttttttttaaaaaaaaaaattatatacaaaaataaaagaataacaaattttgaattgaatctcattcatgggcttgaggtccatgatcattattagttcacctgaaattaggttgtcaatgaaatacccactttaatgtttgaggaaattacactctataccatttttatattgttctcttttgtttttacccactttttaaaagtctatcatttttacctcttttttcaaacattataccaaatttacccctatcacttcaagatactcttcatgtgactctcttatgtaagggtattttgggtacaatacatataaaaagaggtatgtttcaattaaatataaaattagaggtaaatttaatcaattgattaataaaagtggtatttttcaacttaccccttaatgttttgggagacaagacattttaggtcaagtgggcctagtatgttttttggtggcccaatatccaaactagcccaaaggctacaaaccaagcccaaattatcaaagcaaatcgtaaaatgggccattgctttcacagaagggctattttttaaaatatgggaaaaattattgaggttatgataaatatggcataaaaagtaaatgccactaaatatggcattatctaaccaa

SEQ ID NO: 266435 - DNA, 1825 bp, Cannabis indica
ggtggtgccttcgctgacgagcaagacaaagaagatagctttttccggcttcactttctgaagaagaaaccccagtcgccaaagctgcgactttaggtccattgtcctctgaggacatagaaagaatggttcaagagctcgctgaaccagggaaaatcgagattcatgatagagaatccacagtgtgcgctcgtgaacaccttgtccattctaggcatgcttctgacgtcgaagttgaggagatggatgatgactgggagatcttgaccatgagtcaggagaggaggaagatgctgaaggaagtgggactgattcagtggataatacgcaactgaacgaacccttctcatgcaaggacctggtctcgtgagtcaccgaatctgacctcaccacttttacgaggttgaatttgctggaacttggcaccatgtgccttgctctacccagagaccacatctttcctttaccaatcccgcaataatccccatagaggatgtggttgtttctatacccattctgatgtggggtattgattcccttccatccattcattactattatcctcaagcggtatgatgtctctcccttccagctaaccctcaatagctatcgcatagctctgggttttatgcgatgtacatggagtacgcgcatagggagccttcgatggaggatttcagttatttctacgatataaagaacgtgggcctccataatggcttctactgtttcagcaagtgggctacttttgaaatcaacagggtagaaggcatggtttccaatatgagagattggaagtctaagtggttttacatgttcaaagtaccagggattaggactgactttaatcgccggcctagtacgtcgcacttttcaacacttttgttaatattcatgttaccttataagatcgtttaactttttcttcctccttgatcacagatagaccagctcgacctgttctggacccagcctgcaaagaagttgctaaagttctcgatagcctccctgttcaagatcgtgattggcgattattgtgcacaactttgaagttgcaagaacataaactaattcctgagaacgcaagccttcatcgagagccattatacaaagagccatctgaaaaacaaaaggagaatatagacaagcgtctttctaagcagacctctcgaccaacatcaggtaactcatcgcgtatacgtggtatataattatgaattatttgtacttaccttaacttttttttctcgcagaaatgacttttatgaagcagtctccagtgctcaaccgcaagcccaaaactggaaccacgacgacttctccgatcgttcctcagaagaggaaaagtgacgttgacgcgacccctgctgttgactcgtccaagaagtaggttaagccttctcaggacaagggaaagaaggtcatgattgacccgactgttagagcccgggaatttatgactctgtaggaaaagttcgtgaatgacgagttttgtgtcgagggtggaagcgattcctaccgaggaaatgatgtcactaggggaggagtgttaggttttatgccctaaataaaactcatttcaatataatcagatttacttattaatatagatcagaaataacatttaatgttgcatggttcacatgatttatttcatgattatatgtacataatgtataaattcatctgaaatccttttcacatacttgatcctgtttattgtgctgtcaacacattggaaagtaaacatgactatgtgaataaagattcctagatttatcagacatagggttttactgatatgataatctacaacagagtttac

SEQ ID NO: 266436 - DNA, 578 bp, Cannabis indica
ctaggggtaataaggtttaaaaaatagtaacgtaccctaacactcatctaatataccctgagacccatctaatgtaccacgaaatacattccataaaagtacatcacgagacaaaatcgtgtccctactattatatggctaattctaattaataaaaatctaaattttgttgagaatttattcattattcataataaaatagaaaaataaaaaatatatatattattttatgatatatttgcgtcattttttattattatgttggaaagactaaaatttacggtgatcgtgtctgtttaagagactccgacaataagtcctgtatttgtattttttgtaattatatctaaatattatatttgatattgagaaatttaatattccaaaatcttatagtaaaatttaaaaaattaaaattaatttacagaaaaaatacttaaatttattctcggttgcagataaatatttaagtataatttttttttacagtattaatacttaagttatatttctgtaacttccgtatgtatctaactattaaatgtttagtcattatctacgtgtttttttttttctta

SEQ ID NO: 266437 - DNA, 767 bp, Cannabis indica
agtgtttttgaaaaaaattcaccgccccacagtaaaaaagtaaaaaaattaaaaatttcagtatgtggtataaataatcttataaatataggggtgtttattggaccatatttaatgtttttaagtttatccaaattcgattcaattatatattagatgttaaattataccatccgatccgattcaattaatttcgggataagttgaaaagtacccatttttattacaccttaactaaatataactccttccaatccaaaaaaaaattaatgttaattttcatatatatattttcttaaatataacaacataaaatttaattattctattaaactaactaaaaatgttaattagtttaattaaaaaataacattagagtggatgaatttatggacaccccatatatataaaatttatatattatatttattttgatgagttgaaaggatagtatatatattggattatgatgagaagcggcacctagtaaaaaggaaaaggaaagatgcagtttggaccagccaaaaaaccaaccgcaagtgcatgaactgaatctagctatagatatatcatatatatatatatatatatatatattaggacactatatatatccatatatatatatactcataatcacccacttgggttggccaacaacaagaggaaatggttgagagaatatattcaagattgactctttatagaagtatatatatagtactactactactactactcgaatccatcgaatatatatatatata

SEQ ID NO: 266438 - DNA, 580 bp, Cannabis indica
ggtaaaaaaaatactactgtattataaaattattaatattatatattcttttattaatatggtattgtataatggaccattcaaaaagatacaactgaagtgaaaatagctaatttttataaaagatattcacaatttttttttttaaaatcaaactatttggttaatggtaataaatcactcatttaaaatagagatttttacaaaaaaaaatactaaattttgagtaaaagtttagaatcttaatgccacacgatttttttttttttacaaaaatactatttataaaataatcgtaaaataacaaaatagaacaattaaaacaacagtagaacaattaaaaaacaactgtggaaaaacagtaaaaacttaacacaatacacattataaaaatacacagtatttttggaaaaaaaattttgccccacagtaaaaaaagaaaaaaaaacttaaaaaatttcaagtatgtggtgcaaaaatttctttaaaatagaaaatactaatttgatacaaatacaaatagtaaaataatttatatatttatatcctacactataataccacaaaaggcttgggactc

SEQ ID NO: 266439 - DNA, 514 bp, Cannabis indica
ccctaaagcataacattttagaatgtaataattttatgttcgagaaatatagagaaaacactatacgatagtttataatttttttttagttaattttgttattagtttttaagttcttatattattaaagtgggttataaaatttagtatatttagttaagtatttatttttatactttttctcaatattataatacacattattatgattttttgcttctttagataatttattttatctttaatatcatgtatttttttttaacaaaaaagatacttttattcaaaattactaacaaaatacaaacacaaacaaagggcagcaagaaacaaccctaccacagcaaccacctaccaactattcagaacattaagaaggtaattgtcaaatatgcttttcctgctcctactaacatccaacactctaaccttgtctgcttttttaatattaacactcacagccttagttgttttacataggggtgcacacgggtcgggtttttgggtggttggg

SEQ ID NO: 266440 - DNA, 1118 bp, Cannabis indica
ttttattcttattctattcttattatttctatttcttaccaaacgtctaacttaaagttattttttttttttttgtgtgttatttttaaaaataaaattaatttattatttaatcgaactttctatccaatcaacaacttttataaaacacaagttttatcttaaatttttttcttagaaaatttggagctaataaattggaggcttttggtgacagtatactcacctatcaactcaaagccagctatatatatatcaaccaagtgtcaaatgaattggatttttggtcactttgtgaacatgtggaagattttttttttcttatttcattttagagaatactttcattacaataaagtgatcgaactaatgacagtaacatatgagatttccattgcataaatgaaaaaataaataaataaaggatgcccacaaattaacaaataaaggaattcgattctaaactgttcaatctaaacaaacaaaaaagtccattctaaactccacgtttttcctgtgtattataaaagttttaacttttttgcaaggatgtgtaatttatttatttatttattttgaaaaggataagggtgtgtaacatgaaagttaaatatgtcaaatcacaatatacagctaatcacaattatttgtactaataataataataatttgtgaattatatttttatgctatctagaacatttaaacagtaggtgattaatactaataaagagtgtgttacagtcatacaatggtttttatgcttttataactctagattaacatatgatctttaatattttaattaaataactaatatagaaaatggttaactaagaagtaaagtacacgttgttgtgtaaattttagcattgaatgatcgtaaatcgatttataatcttctatgtattgcaacttacaagattcacatgaagaagaagaatatcttcacaataaaagagaagagagaagtaacacaccaccactaagttgaggacatgggcaagggcaactcagctttggatgacaaatacctttgtatatataatatgaggattgctactagctaccagtggtacttagcacttacatgtcgtgttgcgattggttagcgatac

SEQ ID NO: 266441 - DNA, 2544 bp, Cannabis indica
ttgatttgcaatccatatccacatgactatataatttcttgtatttctctctcacacatgctcgtactctatcatttaatgtacacattagtttgtctgtgtccatatttcttattaaacttttgtgaaatctttaattaactgatgcttaaagtaaaaatgcttgctgtttcttttcggtttgaatggtcaggtatgctttgttcccacaaagtttaagtttcgagtcctttgtgggtaccaacagttgttatagtttcatggttcccgaatattgtagttcccccttatgcaattgagatttcgtttttgtttgcaggtgttcgagctggaatgctggaggcaagcacgaagctggatacgatgcttttatgacaggatgcatctttgctcaagcatgcagttatataggcatcgattttaaactccattcctcaaccgaaaacttagcatacaatgaaaaactccaaaagcacatcaaccatttgtatctcagctggaccaatgcagacattattgatctaagaaccggtaataaggtcaccgaaactttggaatccaacccaaaaaggcgattctccaacatttcattcgagaacattgtgttgatttggggttttccatccaaactcaaggccaaagacataagatgttgcatcacaaaagcattcggtccaacctctgtaacttccgtctaccatttagacgaaacagcagtttttgtctacttctctaaaactgagtttgtctccaagtttctaagcttaaagcaaaacttagagagaagtaacaatgatccaatttcggttttgaatcctctcgctgaacttttagaaggtaggaacacccatgctgcggattatgaaacttacaaagacatttgctcttccccaatgtcgaaactcttattcgcaaatcaagcagaagcaacatgttctaaatggaagaaaaccgagcttgaagataccgacgcagtaattgaaaaccgaggatactcaactgagacagcttcagatataaaaagtgagtcatttgttgatcgaatctcatgtgatgatgataaggtcataaattgtttatattcacttcaagacactcaatcaagaactagtaactttagctaggttgactcgaaatcgatcaaaccaattcatttagtaacattttcatacataggactcataatatgacagttaaattagttatgtgacacttagtgcagtatgtcacattatatgatgatctataataggttttaacggctgtgatcatcccattgtatatgagtgaaataggcttattagaaaattaaaaaaaaaaagaaacagagaaaatgggttattatttatggtaagaggaacaagttagtagccatcattttcataatttattattattattatttattgaatattgcattaaagtaaaattccttcattggaatgtttcagaatttatatagtgagctgttgtttttacttattaagaagaaccatgccatttctgaccactgcctcttttagccatagctcacctcataataatgtatatatagctgtatctatatatagatatttatatatatatatacccactatatgaattaacatcatattcatatcaatgaagttttggtaaagagtaagatgttttccacattcttttttcttttcttttttgtcatatgttttcattaattgaaggattgattatcatcactagtttttcatttagttggaaatagtgaaactaattatatagttataacaggtatctcatctatttttgaaaaactaaataatttaccatattaaaaatatgtatgtgtataattatgtttgaactgtatttgtcataattatgtgaaatatatgtatagaaaaaaattatagtacaccatcttataggtggtttttagtagaattcttaactagttcggtatttaagagaattttttagttttttttttttttcatttatttatagtcgtgtacgttgtaattatttaagattatttgtaaattttaaaatgtaaatatttaatgcatgtgtataacatgcacaattattaacaaaataaatagattaaaaaattatattgttgacacagataaaacagtctatttaaacaaatttcttctctcatacaaaaaattctaatttttttcaatacagccactaaaattaaaaacaaaaaataattttaaaaaactaatagaagcgtttggccaaatcttttaaaagcagttttttgaaattgagttttaaaaactagaaaacataaaatataaaaaatattgttttctattgggatatttgcggtaaaatctctttaacatttgtaattattatatatataaccctaataaaaaataacaacaaaagtactttatcttacgattttgttgtaatcatactatattttggctgttaagtgtgaattaaattaagtttgttaacttaaaaacacgtgccaacatatttctttagcttatttatttgacacttgatgactaaaaaaagatacaactacaataaaatcgt

SEQ ID NO: 266442 - DNA, 1173 bp, Cannabis indica
cctcctttgaaaagtcactcggtagcctccctagagaagtcactcgacaatgacttcttgagaagtcactcggcaatgacttctcaagaagtcacgcataaataacttctttgagaggtcactcagccatgacattacaaatgtcactcggccatgatcttgaaaaacttggaagaattttcccaagccagaggagaatgaaagcgacaaggatacaatcacaaggacatggtaagcatgcgaggagagtacgaccatgcctacaagctctgaaagcaaggaggtactgcacctatagggtctgaggagctgaccaagggtacactgtagccacaacccctgtgacccaggaccatctgacaccagacaagggtatgaagtgtaagaccaccttctacacctacgatttacaccctgaaagtgatagcttgtcccctttgggaccactatgtatctcaagccacttaggcctataaataccccatcctaaagtgagaaggggttggaaaattagagttgtaatcttgagcttgaaagcaatagaagaaaaattttctctactctaaaatttcatggtcatttgaggttacattttatcatcatctccttcttatttttgagtttaagtttagattttgattttccagctacaaagttagttgacaagttctcgtcgtcaacacaaactaatatgcctgaaatgtaagtgttatcctgatttttcccacttgacgtggcatgtccacgtggccaagatcaatgccatgtgagagtacaactcgtcaagaagaaggtcaagccatctactcaacactataactaacggggggtcagagtacttagaagggatgatgaaacgacgaacaaccaccccgagggggttggtcgaccactcttggtcagccctatggacaacataggctggctagctttcaagcattatgtggccagccaacttgcacttggcaagtgcatggctggtcagcctttgcctggcaggcctttggtgtgcagccttcatccatggacaataagttaagcagcaaattgggccttgacaaccaacaaaaataggggaaatattaacttccctatttttgagggataattaactcatttaaagtttattattgtaaagcccgcttagttaatttggaaattagcagttgttta

SEQ ID NO: 266443 - DNA, 791 bp, Cannabis indica
gacttgatttacaattaattgcgaatcactatggcatataagttgttaaccttcaacacttcagctatcttcaatccagcgatcaaggtttcatactcagcctcgttgtttgaagtgtcgaattgaaatcttaaggcatagtgaaacttgaagccttctggaaaaattagtatccaccctgcacccgagccatgctcgttggatgctccatccacgtgtagcttccaagtatccacatctcgttgaacaagcagattttcttttggagttattacttctatcaggaaatctgccaacgcttggcccttaatggatgttcttgggtgataagttatgtcaaactgcctcaatttaattgaccattttatcaatcttccaaaagcatctgattttgataaaacctcaaaggttgatcagttaacaccttaattaaatgtgcctggaagtaaggccttaatttgcgagatgcatggattaggcataaggtaagtttttcaagagggggatacctcgactctgccccagtaacctcttactaacatagtaaacaggttgctggtgctttccctcttctcgcactattgatgcactaatcgcattttctgaaacagccaagtagaggagtaatgattctctagttattggtttcgccaaaactggaggtgtcgacaaatgcctttttatgcctttaaaggcctcctcgcactcttctgtctactcaaacattttgttgcctcgcaatacattgaagaacggtaggcacttaatagttgatttcaagatgaatctgt

SEQ ID NO: 266444 - DNA, 2388 bp, Cannabis indica
caataacttgaacagtatctacaagctgatgaacttggactcactccaacttccctcatcttattcacaatcagcaaagcctcgatcccatttcagcattcaagaagcctcgcataagggtattcaaaaccgaaaaatgtgattcgtatctatagtgattttcccacatgaactcaaccaaatatctactcctaacagctccaattctctcaattacatgagaaaccatgtcctgggccaaaaattggagatcctctgctgcgaaaaaaagtgcagcgaggccacaagacctcaaaactctatcagaatggtctctaaaagaaaatttaaagaaagcaaaagcggtgtctcgagtttccaacatcttcattatatgtacaagagagcatgggcaaaactctcttgagaagcactcaagtgtgtgaattttccgagttttgattatttttgataacccaacagcaattttgcacctttcgtacgggtttataccatttaaagaatcatccaatatgggaaaatcaaaaggcaaaaactggttcagaaaatcaatgttcttggaatgccttataaggagtgagttgagggtttggggttgtacctcgactgtgctgagaatacgatgaacgttagcagccattggcttgttcaccagagacacctaaaaatctacaaatcaatgagctaactgtggaaccttcacaaacctacaaatcccatttcataaacttcgagaaaaacaaaaacagtaaactgccccaataatatagcaatggcagtgtatattgtattctaattcaaacatatatatacaaagatcttttggtggagaaaccaattgcagttttgtaaaatactgaatgagaacaatagtcaacaagtaaacaaaaaacagaatacagaaaagaagaataatcaaacaaaactagtagcaaactaaagaaattaagtccaaactaaagaaattacaattgagagctatgaaagctctacagtcgtaagacataaacactaatttgatgcttcatgattttatttcttgacaaagcatatgatccatcctgagttgaactgttgaagaaatcaacccaaatctacttacatcacaaaaatccatttcatagcattccataagactaaatcgaagggagcctaccaaatgcacaatgatggggtaacaaaactagcagaaatcatcattatgaaacgcaaacatgcctcgtttagcatgacattctcagtatagcccctaatcatgctatcccacttaacagagttcctctcagacatttcatcaaacaggtaactgagatatttttaagggtattgtacaaaaataaatcagagatcagcagaaccattttaatttaacacaatcaattaaatcagagatcagcagaaccattttaacttaacacaatcaattaaaatcataagctcagaatctcaaaatatatgcatgcattaaatttaactgttgaaggaatcaatccaaatctacttgctatcccactaaacataattacctgtcaggcattacatcaaacaagtaacgagcccaaattaaattactaatcctaatagaggtattaataagagtattaaatcacaagtaaagctattgtaaagaattcgataatgaagggtcttagcttcatctaaggcacatgaattccagaattgagtagcaagaacttaccttgttttttttttttttaagaaaaaggtaggaatttcaaggctcatcatcatcatcatcatcatcatcatcagtatttataatccaaaatacctttcttcattatacaaattcaggtgttcttgttggtgtcattgagattcaggttgtgtgttcaaagtttgaactttttagtcaaattttaataaactgtttttgttttcaaaattttaattcttattttaaaaaataaaaaataaaaacaaattgtgtataatggagtgtaattacactataattactaaaaatattaactaaaaaacttattatcttatgtaattaattaaaaataatgtgtaattagtaattattatctcataaattttaacatgtactaatttaaataatatattaagattattaaatttaaagattttttttcaattttagtaagaatagcctaacattaataaaaattctaaaaatttgatttgatacatgtcaaaatttaatgtacatgatttgatagatattaaagtttaggaagcataatttaatacatgaacaatcacataattagtaaaattaaatgaaagtagataaatatttttaaattcaacaattttattaaagttcaaagacaaaaatcataaccacttgaggctagctcaagtggtcataggggtgcgtttgtgttggaggtcttgggt

SEQ ID NO: 266445 - DNA, 3474 bp, Cannabis indica
atcgaactaggtgctatttcgcatttggggctctgtatctgaagactttcatataaattagggtttgtgattttttttttgtactatgaattttgaattgtgattttttttttatctggtttgtatttcttacaaattttatgatcgaattctttcagaattgcctaaagtgagatgggttcttcctgattcatacttggatgtaaagaacaaagattatggaggtaatattatattgagctcgtgtggtatgtcttttgtgtgttctggttttaagaatggccatttcttagctcgtaagccgtgtactataacttttatttctgaccttttctttgtgaagttgtgatatgattagagtgtaaaaaaaaaccttgatttgtagaaatcgtttactattcttatccaatcttattattttttatttattttttttttgcatcacttgacttttgagtttttcttctttaccaagtaaggttgcatttggttggaaagaatgaaaacacaataatagattttaaaatggaataaaatttaaaatgcataaaagtaaataataatttttaccttgcattgaaatttcaatgatctttacttctatttcaaaatagaatagccattttaccgaaatagtgtaaaagtcataccgttggaacgacattcctaagtgtgtaaatttttaggattaggtgaattggtaagtcttgcttgaagtcatccaggaaccactatgcccactcatgcggcatgccatgaagaaagggcagtggtcattgataacttattgcataaaaatggctttttggaaaatcggaatctatgaataatccttgacattttaatcatttttaccgtgtgcaatgtgtgctgctgcaatgatcttatataagattgctattattatgttaaccaaggtgtttatgtgatcattagaattgtgttgagcatgatctgtgactctttttcgttgataccgtttatacaccttttggcaggggaaccttttattaatggtgaagcagttccatacgatcccaaataccacgaggaatggataaggaacaatgctagagccaatgagagaaataggcgtaatgacagacctcgtaattttgatagatctaggaactttgagaggaggagagaaaatacacagaaccgggattttcaaaggggtgcacctactatgccaaaccagacgatgcagaatgctggaccgaactcccacagaatgccccctaacagcaacatgggtccaccgcctcccaacatgggtggaataccccagaacaatatggctggagctcctcgcaacaacatgaacccacctaataattacggtggcatgccaccaagcaacaactggagtggaccgccccaaaacaactatggaggaggaccgcccagccataacatgggagatccccataacagttacacacccggcagggacgctggaaatgtgtctggaaggaactattcatcataggaaaacccatcaagaatttttttgctgtaaataagcaaacatagctattcatcttggatttttaggctttctgttactactactaggttgagatactgtttgtgatgtgtagctcaagtgattgagaatcatattctaataccttccctctgctttattcactcctaaaggtaacaaacttttaagtcataaaggtatattctcataattcaaaatgacacgttcatgtttcatttcaatttgatatggaagtcaattttggtgtaagggtattccattcaagctaaagaattcttacatacattaaatagagtaataaaaaaagaaaatgtaataattaggagtggtttacaactagattcttcaatagggtattatactattttagtctcatgcattaagtaatgagtagtgatataaaatattctttagcttgacgaggatgagattccatctcaagtggtactttttttgccactaatcttttatttgtgattccatctcatgtgttgttgaatttctttcaatatcgaatttgggaaaacatatctgatttgtgctgtggagatttgaaaaataatactcccaacttaaagttgtagtgtgctcaacttatcttcacttgattccatcaataatgccatgttgttttgatcaaatatcttcccaccgacttggtataagctgtgtctttattttatttacttatttatttgttttacttttgctgaatatagaagttgttgtggctagttttcacttttcagtgtattatgttcaagggctcggatttcacaatatgaatctcttttggtccaacacttaaattaccaaaagttaaaaagtacataataataaagtaaaactaaggtaggttcattaactatgtcactcattataaggaatatactaacttgtttttgagttgggttgtattttgtgtaagacttgtcatcgttttaattttgttgctcacaatattttcattgggtgttgtcaaaaaatattatttgatccgttgaagtttccttaatccggataatattatttttaactatcctatggtataacttttaagtcttatttacatatgtatattagacttttgtttttttgtaaaaaaaataggttcattaaatttagagcactcttaataataagttaaaataatttaatctttaaattatagagaaaaaaattacaaaagtgagtttctatcaaataaactaaactttagttattttacataatattttaacttaataaatattgtttaatttaatatagagagataattactaattgagctaaacataacttttctatgtgtcatatcatgtgttttatttttataaaataaataaaatatattaaaaatatttaaatgatgtaaaaaaaaatagaaaaatatgatgtaatttaaaaatttgaggtaaaataaataaaataaaattttgataatacattctaaaaattaaagtaagaagcagttgagattgttcttatattacttacaagatttattcttaaacttgataaaaattccaagaattttcttttaagaaaatgtaaagagcaatttcatatactaaaaattcagatagtcatattagtacttggtactttttttaaaagggtaatatttgtactagattgttaaataaatagtgagttaataaattttcatgggggatttgcagtcatttgggttcaggatttcttttttaaccttagttaaataaagaaagaatcagaattaattgtggttgttccacaaaagtgcttttaaatttatggcaccaacaaaactcgttttcaactatttaattgtatgcactcttcaaaaaaaaataaaaaaattgaccatttgaatttgaaccaccaacgactctcttttctttggtcagagaaattaatactcaataacacaactgttcttcctcgattaaacaacaaacgtatatgtaaaaaaaatttatctt

SEQ ID NO: 266446 - DNA, 6949 bp, Cannabis indica
ccactcaatgcgaagaacactgtgtttaaagcaatgggatctgtaaatgttaacggccaaacaaaaccgacttggaaattgctagacgggatttgtagagaaagccttgcatttgagacagctaagagagaaggaatttctgaaagaataattcaaagagctgaagagctttataattcagtttatgcagaagaagggattccaggggaaaatgacaccgaaatacaacacttgtgttcttatgaaagtttgaatggttctgacagacccgattttcaatcaaataactctggaagaaaagattctgaaaggagcaggtcactaaatcaaatggaagtcttacagaaggaagttgagacaaatgtaatatgatatgtcaaaagaagctgatagagctccacaaagaaagaaaaaaactacccgaaacttagcgaaatccattgtgttccggttggtcctagggaacaaccacctccttctactgtaggtgcttcttgtgtctatgttatgctcaggcctgataaaaaactatatgtgggacaggtattcttccaatgaactaatctatttatttacctcatttgtaccattgtcattatactgttatactaatttgaaaaacaaatttccatgttcatcattgccattaccacagaccgatgatttggagggacgaatccgtacccaccgctcaaaggacgggatgcaaaaagccagattcctttatttcacagtcccgggaaagagtctagcctgccaacttgagacccttctcatcaatcagcttcctaaccaaggattaaatctcactaatattgctgatggcaaacataggaattttggtacttccactctttcaccggagagtatcactgtttgttaaagaaaaactggtcagactcgtcacgcatctccgattttggtttaatcttttctacactaatcagtgaagacagtggaatggtttgtgctctccctcccaaatttatgtatatgattgtaatttttgctgaaaaaatgtggctctaatttgaacaagcagtggctgcagcaattttggtttttgttaactgttgctccattgtttctgattctacattgtcaaacctcagtaggtaggtagacagattgaaattgtttagatgtatatgttatggaatgttaattatagacaatttcttatttaatcaagtttttcctaagaaatgcaatgtgtttgctgtgtctttttatttatatttactttttaactttatgcttaagcaagacactgagataaaaatgaaaattactgttaaactcagccaaatttttataaaaaaaagaaatataatattacaacaaaataagaaaattcaatacatagtaaaataaggcatgcataggaacttgcttctctctcaatgaagaagtaggttacttgaaagcttgcgtatcgatctagaatcgaggagcccccttcaaaccaagaagccacgattactaatgaatctgctaatgtggaatatgagggaattgtgatgcttgagatagatttgattttgtagatgcttgagaataaggcactgatagaacaatcagttttgaagtcatttggaaattcagtgagtggtagattgaagagctctgaggaagatgtgcccaattcaaactaggttgaggatgctgagaaggaagtatttccaatcttcagcttaaaagcattgggcgaagctcaaagaatacaaattagtgggacagttaagcttcactatgaggagtctttgatgaaaatctggtaagcatgttgctaaaattgatttagcagaagtggcagagcaagattaaaactagaattctgctgttatatgtatggtgatgggagccaattccccattcatttgaaggatttgttaaacgaatttggggacaccttgacattgagcgagtggtgaggatgagtatgggactcaatattgtagaattccatgatgaggcaacctgagatttagtgttggaaactagagttgtgcaattcgacaagaaacatgttattgtgcgctctgggacataagacttggatacattcaggttagttcgttctgtgtctctttgaattagattgcctaatctaggtcttcaatattgtggccgaaattgctttagtgtcttggttagcactatagcgaaaccaattatagtggacaaagtctcgaaggaaagatctatgattaagtttgctagagttcttgttgaaataaagataatagataatcccccattcataatttactttgagaatgaaaaagggcaagttcaagaataatttgttgaatatgaatggctccttattaagtgtaataattagaaggaatgcggtcataacatggttgattgtaggaaaattggtccaaaagcttgggttaagaaaagcttgaataaagagaaatttgctggaactaaagatgaattaaaacaggagataaaggtctttgttccaatatgggattctgaaataaccaaggattcagttggaaaaagatgaagtagggaaagagaatcaatagatggctaatttctcaacacttgagcaagacaacaaaaagaattgagagacaccaaagagagttggaaattcgaaggttaaagggaagcttgtagtgtttgaactagccaaaattcaaaatacttttaaagttctacaagaacaaaggaaaggtgaggaaaaagggtattatatttagtttggtgttgatggattattccaacataattagctggaatgtaaagggtatgaataagaggaataaccagggagataccctgagtcttttgaagatgaataaagttggtataggtgccttactaaagaataagttaaagaaggctaaagttgatgacatgatgactctagattgttccatggttggcattattactgttgtactatcacagaagggagaattctagtggtttggcagaaggctttgtccaagttcaggttttattggagtaccagcaatttgtgcattgcttggtcagaataataggtatgcatatggtttttccagtcacttttgtgtatggtttaaacaccattgaagagagattggagttgtggacgggtctctcaagtgtctctttacctgttaagccttagttaatagtagaggattttattgttgtgtttcatcatgatgaaagatatgtgggtaaggaaattagttcagctgagttaattgactccacaacttggcttgctcaaaataaggtggattctcttaagaacttaggctctaaatatacctggtctaataagtaggatggtgggaatacgatttactcaaagatttatcatcctttttctaatgaagattgggtggatgaaatgcctaatgatgtggttgatttccagtgggatgtgaactcaaaccattggtattgcctcattaaaagtcataggcatggaaattcgaaaactaaacctttaaggtttttcaatctctagattgctcacagtaaattcaaagaggttgttatgactaactttaataaacctatggctgagagagggttacagggttttttaagaaactacttcaactcaagcatgttttaaaagccatcaacaagaatgagattggagatgttgagcaggggtttatcaagctaaaagagagtatcaacttgctcttactagagctcaggcttctccaattgatgcctcagtccaggaggctgaaaagcatgctgttgctaggtatcaaattcatgttgctatgttaataagttttttaattcagcttagcaaagttacatggctgcagaaggtagataacaacaatttgtatttccacacttgtattaaaaagaagagagtagaattgaattgtctcgttttagaatgagcaggggaaagttatagatgattataatgatgttgttcaacattttttggactatttcaagggattcatgggaagtttcagttcagcaacaaagcctattaaattctcattgtattgatcttgggccttgtcttgatattgagatgtaattgtggttgatcagaaagattaacaaagaaatataaaaaaaaaggctttgtttagattcttggcacaaaagtctagggcccgatggctacaattcaaagttctataaggcaatgtggcaataaataggagatgaaatttcagaggccatcctcgatttctttaacattgggaaaatttctttcgagtttaatgaatcagtgatagctttggtgccaaaaattgagatgccttgtagagcggtggattacagaccaatgtgtgttgtaacactttgtataagtgcatttctaaaatgatttgcagtaggcttgcttaagctcttcctattttaatcggtcaaaatcagggtgcatttgtcaaggggaaatctcttgctcataaaatcctcatttttcaagacttgatgacttataacagaaaaaatacctcctcgaggtgtgctttgaagatagacctaagcaaagcctatgataaagtagattggtgttttttggagaaacttttagtgtgtttgcattttcctaccaggttcattcattaagtcagggtgtgtctttgtggtacttcttatgttttaatgatgaatggtagattgcaagggagtttccagggtgcaaagggtattcgacaaggagatccaatctccccttactgtttgttttggtcatggagtaccttactcgaatgcttcagcatggggctcttcaacatgattttaaattccaccctcagtgccagaatctgaagataattaacctatgctttgcatatgatctcatcatcttctgtaaagctaatcgagggtatgttactcatgttaagaagatttttggtgaattttatggtagcacagggttgaaagctaatctcagcaaatcccaggtgtactttaggggagtttcaagtgttgacaaggctatgttgcttcaggtgttacagtttgaagagaaaaattttcctcttaaataccttggggtccctatgaggcctacaaaatagaaagcggaagattgtgggattattctcaagagataaagcttagtcttcacacctgggcaaggaggcatctctcctatgaagggagatcccaactcattaactcagtgctctttaggttgcagattattggatgaatatattcttgtttcctcaaagcattgtgaaagatagacaagttatgcatgtggttcctttgaggcaataatggtacgaagagtgattttcacctaacctcttggactacagtgtgcttacctaaagtatatgtggggttgaagtttggtgaaggagctaagtggaataaggcaatgcttgctaaatatatttgagccataagtcaccaccatgagactttatgggtcaaatgaataaacaatgtgtacttcaaaggctaaagcatttggagataccaatttaaggtagataaaagctggtattgatgcaaattatgccacattcgagatactttttctcaacaagatattgataatgctagctgcactgggaagctcataattgatttgctttacaggagctttattaaccaagaaaagatcaggtatcaacattttgtgtggaacaagatgagtgtgccaaagcatcgatttatttgttggcagattgtgaatgacaagttattagcatgtgatcatctgcaatgggtgcttatgcaacttgatagttgcctttgctcggtctgtgagaaggctgatgagaaccattctcacctacttttcaactgtgatttctctcaacaagttgttatccagattcatgcttggatgggctgcaattggcccttgttgtacagagattggacctcctggattgaagatatgaacaagaatgtcaaggcaaaacttgttgcaactgttttttcagcaatagtttactacatttggcataataagaatgcatatttttatttaatattactcttatggtatgaatgtgattgttttatgcagaccaccaaacttactaatagaaaaaatccttgattaaatctgtgggtctctcgttgcttgtgtgttctatgcagaccaccaaacttactaatagaatggcgaccaaaattatggtctagtaaggaatttatggtggatagttaaaaaggtaataagggtattatcttaaggctgttatgtctccctaaagcaagggggaatcgggttttcgtaagaccttgaagatgtattaagcgtttttggccaaatgggtatggaacttgatcattgggcatcaatcgctttgttgtgatattttaagggccaagtacttgagagggaaatatttcctcaattgttcttataggggatctgattcttggttttggaagaatgtgatgaaatcgaaagatattttaaagaaaggcgcttgcaaaatgataattgatagtaaaatactcatgcatggaaagacccatgggtttgtcaccgtcgcgttttcaccccataccaaacagagtgtctactgagggttttaattttgtggcaagtctcctgtttgatcctagtactgttaccaccatccttaagagtgggagacctagtggacagggaagggactactggatttggactaaagaattcaatggtcagttcattaccaaatctgcgtatatgatccaagcattagaccgtgcaactcattgtgatgttgccccttccttatgaaacaggttgtggaggaatataattctcgagcgacataagattctgtggtggagtatattttctaatatgctccccatctgcatgattcttgaacatcgtatggctattaaagataatgtgttccctatttgtggggaagacacaatttgtcccaggccttgaggtggatcccgtggttacctttgttggatccccaccgaaatcacaaactattccatcaattctagtcgcaagtcg

SEQ ID NO: 266447 - DNA, 751 bp, Cannabis indica
taagataccagctaattatttttgagttatactaatagaatcttattatttaagatatattttggtaactttcaagtttatttcaaaaaactaataagctatcatcaatacattttaaaaaaaatcttaagaaaatacattgctacatcattaagtaatatttttttttaagaaaagcgtaccattaagtaatatcttaataccgaactaatatgcgtgaaatagaataaattctaaaattttaatttttttttctgcattataaaagtaacttttaagttacttatgatattgttaagaaaccaataagttactttatataagaaaaaaaaaaactatcattttatatgaaataatttgagatatattttaattgtctccaaaacaaattatttatatacatcttagtaaattaattagttatttttatgttataataatacattgagtaaccttcaagtttataataataatgtggtcattttgacttgtaacaacatatacatatttttctatcgtcaccataatgaaaatgaactatttagttgcttctgatacctaaaatgaagcaatcatgatgttactttttcacacacagtaaaaaaaaatgattcattcatttattagttaccttactttattgaagaaaaaaacttttttttttgatgaagaaaaactttttagttgcttaagatgccgataaaaaatattctaatgttggaaatttttttatggtgaccaatgatatttt

SEQ ID NO: 266448 - DNA, 884 bp, Cannabis indica
gttatttaataaaactcttattttttttcttatatagttatcataagggctacgtttatcttaaatggacttaaaataaaagacaaataggctataaaatagagaaaattacgcttgcaaataaaattttgaaaaaaacatcacaattaacactcttatttttaattgtggaatatacccttagttttataattatttttgaacaggtatatacgtaatgcttattattttatttttatatgtttttttttctcttttttttgtatatacgctagggttttttttttcttctaaacatgtatttatttactctctattttttttctatagactcatatattttcaaactacaattttttttctattttataatatcaaatattctctctctattttttaaaaaataaaaaatcctttctaacgacactagtaatcgtttggtctcaaaaaaaacaactaaaatttaagtttaaacaaaaaaaatatactaactaatttcattggttaataaataaatatttattatttaatatttttaaaagttactaaattgtatgctacataagtttactttatgaagcaatattgatcaatttctatatatttttcagctacacgaataattatttgtgtttaaaaattgaaacattatgatctactcttaaaaggaatcattttgatatgtgggaagtatatatatatttttcagaccaatattaaattattaagtaggtaacgttttagttactaaattgtattctctcttttatagaataattttgatagattttagaaaaaaaaattataaggaaaacttaagaaaaataaaatttaagttatactgttatttgtttgagctcaaaagtgatatattatgatctatt

SEQ ID NO: 266449 - DNA, 1613 bp, Cannabis indica
gaagagcatcagaaagtccagtttatcgaatgaatccaaacaccttgctcttggtgtctctagccaaaactgcaatgcacatgtgtcccctccaactctaacatcgcaatttaacttgatccagtcttaagagggagggcactaaatagtggggcagggggtcagggaaggggaagggataatggaatctttataatctacataagaatgagaaacatagttaatacactgactcattatccatcctatcattatgaaccttatcattccgcaccctccaaatcgtatcgataacaatggatgcataaagaaagacctcgtcttcatttatgcctttgctttctaggctctataaaaatttgacccaaacccacatacgaatactagtaccaatgattgggaagatatcccacggggaggatcgccaaagatggaaagccaggttatagtggaggaagaggtgctcaatggattcctcctcttctccacaaatagggaaggtgttgtcagtaatatgaaatcttttgaagtagaccgcccttgttggaagagcatttgaaagaacgctccaccacatagcttcgtgccctttagggatcctactattccataatttgttccaaagtgaaggggcaacctcacaatggggagatcgttgcagcacttggattaagtaagttgacttactcatgaactgagcacttccctccttagtccaaacccaatgatcatttccatggcctgaaggtttgccccctttcaagatggcaaaaatggtctcatgatcaaagagatgttgcatattttgggtgtcctagtcaccagaagcagtcaaaacctcataaaccataatgaacttagaaggtgggttatcagtcaactttgggtagaacacttggccatgagtgactcaagggtcctcctaaattttagtgtctttgccattgatgattactttacaggcccccttcctaagaatatcattagcttttataacaattttccaaaaccatgaatccgttgctttggctttgcacttgaggatatccatccccttgagatattttgcctttagaatgttgcaacaaagcgactgacatcctgttagaagcttctaaccccacttagccaagaaggcttgattcatttctttagtttttctgaatccaaggccactccgagatttagggaggcacaatttgtcccaagccttcaagtggatcccatgattacctttttcaaaactccaccaaaaatcacgcaccaaaccatcaatcctagaaattagacggttagaaagctttgtggtttgcatggcataaataggcatagccaatcccactaatttgatgagggtaccacgacctaccttggataatgtcttcgctttccagccttaaagcttagtagtcaggttttccaagataaattaaagttcacatccttttgcctagactggaacagggggaggccaagatacttggttatgccttcaggaccaccaattgcgatggaatttttaatttccactttcaagttctcagaggtattcttgctaaagaagatagaggttttaagtttgttgacacactgccccgaccaatcacaaaact

SEQ ID NO: 266450 - DNA, 1154 bp, Cannabis indica
tttttaacaaggtatattttaagagccaaaatcagtattatcaaaagtttagaggacataattactaattttttttatcatataactgatgacttttgtttttaaagggacagtggtgcctaatatcatttgataatatacaattactaatgtaattaattatatcactaagaaaatacatttaatgataaatttttagtcacgacattaattttttttttgaactaaatgtgatttatagtcacaacaaaaaattatttgtgactaaaatatagtatttagatacaagttgtcgctaatttaattttattcatcacaagtattgtgactaaaataaatttagtcacaatacttgtgatttttatagctaatacatttagtcacggattttttaatcacaacataagaatgatgatttataattagtcacaaattttattgtgactgaaggtaagattttttgtagtgtattgagtctgatattatatatattttaaaataaaatatctagaaactaatatttaattgttacaatcataaccaagatgatgttggtgtacgaaattaatatatgaaagttacagtatataagatctatttgcaaagcagaataataaagacatatcccttgtatatgtgaaacacaaaagagatggtaatacctccagcattgattttataagcctcaatccttgtgttgctttggattgggtaatcgagcttcaaattagctctctctactctcttagatagaactttactgtttgcacagagtgttggactttgtgccctaaataaaattctatttcaatgtaatcttttctatttaattaccaataaagaaataaatttattttcattacttatttaatgtgttatttggttcatgtgatcatttatttgtcaattcgatttataaattcatccaaagcctcaacacattgatattcttatttattctgttgtcaacacagtagaaagtaatcaagattgtgtgattaaatatattcctataattatcagtacacggagtttaactgataggataatctacaatgtagtttacttccacattggataagtgctatgtcctttccaaggcattggttaaagtacgcttgggttggatgtatagagtatgcatcgaaagggac

SEQ ID NO: 266451 - DNA, 561 bp, Cannabis indica
attaaaaccaattaactaagtctacaagcagtattatctcaactagtgtggggatcatggccctatgtaatcaagcttacaataagtagatccgaaatttatcaagtaaatgtcctaacttattaattcctcctaagtcctctatagatttagaatggaactattaattatatagaacactctattattaaaaatatatgtgatttgaattactcattattttaatccaaatagtcaaagatcctctatagatgatctacatcgaatagggacaaatttactgttctactctgtattttatttttaaaatacttagctacctataaatgataattcaataaactaatataattattgaaataagatctcaatcatttatctctattaagccaagctcaaaggaaattatcgtttcacttctaaatagttatagaagctatagattacatatatatgattagcgttcccactcatttgaactactatattctcaagatgtaagtattgagtcgatccataagtcagctttaccgaacaactctaagatcataaataacatag

SEQ ID NO: 266452 - DNA, 524 bp, Cannabis indica
ggggatagttgtaaagaccgcttagtttaatttggaaattagcagatatttagggtttaattataaaaattatttatggatatttaaattattatttatgttgatttatttgaattcagaatgcatttttatgtcatatagtgaaatctcataattttgcattttcggtgcccggtaacatgaaacgcggtgtatggctcagtagaatcacatgttagtattatagtatagtgggacagtttatttagacattgggaatgtcaagaatagtcgaaaatttagaatttcccaaaatacccttagtaccctttaaattagttttgtgtgggcaagggcattttagtcttttaccctcttagtgttttgtctttatgtggatcaattaaatgaagcgttattgattttgattaattagttttggctgaaataagtaaataaaatcattttatctttcattttacaaaattggaaaaaagataagaaaagaagtaaaatccatttttctctcaaactctctctctttc

SEQ ID NO: 266453 - DNA, 1436 bp, Cannabis indica
atagttcattatcacaagaattagttactccaaagaacttgatcagaaaataatttctacacgtgcatgcaagcatgcatggcatactctctatgcatctaatctattatccatttccactatatatgaaatatatctcaactttatgaggtagttaaagactaaactcaccaatttcagctgtaatccccggtccaaagaatgaagtgaatttagcctggaggaatgtttaagcatcaatatcatactgactaaaaaaaagatccatgaagtgcaagtaattatcactatgaaagagaatgataatttgatgggaatgcttttgtgattataatatagttttagttctacctgtctgcgctcaaaatctgacaactgcaaagcttttgcctcaaacactagaactagacagtatttaccatcttccgagacctggtacgagtaacagaaagataattgacaactcaacatggccccagataatataacgaagtacagaccctggtggtggtcatatcagaaacggcctgcaataggttgtaaagggtactgccttttgttttgaaaaatacagtcttttatagttattaaatttgttcttgcatgtgatggtacagtgaaactcatttttcatttgcaataaaagatgaaaaatataatccaaatgcataacttgacaatggaagatgcaatgcattagatgaagagtgtgtggatgagattaaatttaaatccatgtatgagacacgtacttcttcccggatcatttgcagagttggagcacttctccgtggaattcctccaccctgaaaagtgaaaccggtaattagaaaaaatgagcacacatttctgagaactgaggaaatagtaattttcagcagttttcccagcaagtaatttttctttcaaaaaccataaaaagtttttttcaggctaggctcccccacctaaccctgcaatatttagaaattagagcgatttaggtgctcataagggacacaaatgaattttgtgggagcaaacaacatatgtcaccacttgaaaactactcttgggttaaaagaacaaaatataaggactattgcaacctatttagtagcaatattaaaagaacaaatataccttccaataatacatgcttataactttattgaaaaagtattatagtatacatatgttacggatgtagtaatataccaaatgatgtctaaattgaaatggattctctaagtttaaaagcccaataaaattaagctcataaatatagttttcttttaggattatactaaaatgagtccctgtaaaaccaaaaaaaaaaaagaaaatagtcatgaacaaaagctacatggcaattctcccctgaaatttgcgtcgttcttctccatcagtcggtctccattattcactccggctaggtaagttatctttctcacttt

SEQ ID NO: 266454 - DNA, 617 bp, Cannabis indica
ttataatatacacgactatgaaaaaaattgagctaaaaaattcttatagatgccaaaacagttaggagttgcatcagtacactcattttagtgggttgcattgtataaataccctaaatattattttttagggttagatatttgagtttttgaaaaattctaaaatgcacttcttaaaagcgatatactgatacacccttattgattttggtatccgaaattattttttaatcaaattttttctcatatcatgtcatgtatactgtagttattgaagacatcttttaaaattttgaaaaatttaacacgctcaaaacaggattcaaagcacacgtgactactttatatgctgaaaatttaatagggcttttttcataaatgtacaacaaaaacaatataattacaaaaaatgtgcaaaaaaaatatattttaaaaacttatacatttttgaaaacatattatatgaaaccatacattttaatcattaaataatataaatcattaatgattaaactaattaccataaatagattaatgttaatatttgtaatattatttgttttatcttatctttatgtttattacattaatgttttaaaaattattaataataaata

SEQ ID NO: 266455 - DNA, 1376 bp, Cannabis indica
acactttccaaccatctttttaaattattagtgttcattttccaacttttgagaccatattcagtgaagtcctcataagacatctgtaatgccaaggtttcttaatattatacaatgaattgagattgtggatggataattaacttacactaatcgcatgcatttgaaagatttgaaagaagtgttattttacttcatttttcagtctcaatagaacaaaagatataatctttttcttggataacactaccaaaaaccctatacctattactactaatactacattaaccgaaactaaactaagaacactaaacatatttttgaccatataattatgaatgaaattattaataataagagtatacaagtcaagtcaatggaatatattcgtgtgttttcccatttttcattaccacctacccttttgttcatcgaaaataatctgtcacatgatagtgttggattgcaaatcgctagttaatggaatcaacaacccccggccgcctacttccattgctttttaaattttttttgagaataaaaccattagaatctactggttacttgttttgttgtaagtactttgataatggactatgagagtccatcatccaagtttatattacaaaaagagctataatacaccaaatcattaaatcaaccctaaatcattatagaaagttctaaccaaatctatataagcttttttatttatttatttatattttaaatttctcaaaagtaaaatttagtgaaacatagtaaatttttatgaacagagagaagaacgagtggacaccagtaagaatagttatggcaatcgaggctgatattgagcaaaagtaaggtgttattgatctgaaattgctacagttagagctttgatcaaaggaggaccaaaccattgaggttggcttgaatttgttgataaggatcggtcaccgtggattgataccatatcagagttgagaaacaagaaatgaaataaggaacatttgaaaattattatgaaaatgagctaagtcagtttgtaatttaattcttatagctactaagctaaggtgagatgaaatgaaatcatttcatttgttttaaataattttcactacaaaacaaaacacaagtaaccaaaaagaattattttagtgtaaatttctgacttttagagttgatgcatgaaggaatcttttctattgacagaatatcaattttttttgaattggaggggagggaatgaaaaaaaaaaaaaaatatttttttatttatttagtgtttgtattttaaaatattagaatatcattctaatagaatgttctttctactattttaatagaatatgaaaagagattattctaatgtaatatgaaaaaaattta

SEQ ID NO: 266456 - DNA, 1073 bp, Cannabis indica
agatttttgaagatacctcgagctccgccctaggagttaactcagatgcaaagtcggtggcctttcggcctttgaggaattaacttgatcggaaaattacccaaaggcaaaggaggagtgcagtatgcagtggtagcgattgattacttcagtaagtggacgaaagccgaaccattcgcaacaattaaatccaagaaagttcaggactttgtggtgaagaacataatctacatgttcggattggcgtacaaaatagtttcggacaatggcaaatagttttacagcgagtccttcactgatttttgtgcgaaccatagtatcatcaaaagtttctccgcagtggcgcatcctcaagcaaatggtcaagttgaagcagtcaacaagaccccaaaagatacaataaagaaaagactcgaagatgctaaaggaaactggccggaagaacttcttgaagttctatggtcgtatcgaacaactgagaaaatagaaactggacagaccccatttgctatggcatatggatatgaagctatgctgcctgtagagctcgagcccccatcccaaagaagattaacgtacaaccaagaagtaaatcacgtactccttgccgaatcacttgatgaaatcgaagaaaggcgaaccacagcaaacttaaagttgatagcccatcaacaaaaagtagctcagtatttcaataaaaagtgaagtctcggaaattcttggtgggagatatggccctaagaagagtatttctaaacaccaaagacagtacggcaggtgtactcgggcctaactgggaaggaccatatcaggtggtcgaagttgtcgaatcaagagcatacaaattgggtaagtatgatgaaaaaatgcaacttgttcaagtaccacggtattggaatggggaacatttaagaaaatactaccaataaagtaccaggtcggatgaccatgttaagtactgaaagaacattcgcttttaagtgattggcctcctcggcggactacgccctaaggttttgacaaaaatgaaaaagtactcaggtcggatgaccaccattcaaagtacaatttct

SEQ ID NO: 266457 - DNA, 3598 bp, Cannabis indica
attaaaaaataaataaaaatcattacatttatagcacgtttactacgcaatattcaaaagcataataaagtaatagaataaatgaagaataatcaaaaataatatttgtaatatgttgtttactaaaactgattagaaatgaaatatgatagtgatttatcttgtttattttatctggaaacgtaattgggatgcttaaattaactaaattacccttctgaattaaattgtttactttatcaggaaacgaaatcaaaatgcttaaattgactaaattacccttttgagttaaattatagtatatgctagttattttttaagatatattttaaaggataaaactgtcattataaatttaatattaaaaaataaaataaaaataaataaaatccattacccttaatgacattccttaaaaaattggtgggagaagttctccctttcttaaatttaataaattaaataaacaaatgtagggaatgattcctttccattgattcccattgcttattagtaaacatgtcattgatgtcatttgttaaaaaattagtgggggaagtattgtctttcttttatctcttatttaatcaagttctttgctttttaattttaataaagtaagtaaccaaatgtaagggaataactaccttaccattgattcacattacttattagtaaacatgtcattaatggtacaatcacaagaccaagaccaataagcccaaaacatatggtcaagtcatatgttaatataaaccatgacccaacattaaactctcaatgatctgacccacatctgagactaagtctcgccacttacctaacagactaagaagtggttagttaaactgaccacgagaatagcgatctccctcataaagtgggagagatttctcccaaaggagaacgagggatcattcttccataattgcctataagagccactcttaagcactgagagaggaagatcaatgtcagtcatcataacacttctcacttacacttcattctctctgaaattacatactaattatttcacaatcaacataggtggtaacatagttcagtcattcattttccttcaccttattacattattaacttgaccgtcagagtcccttcagttagcaacatcctggtctcccaaggtttcttggtaactttattattttttctacaggttgttggtgcctgcatatgatcatattcaattgattgtggattttagcatctacataaactacttcaaaccaatgccaaccaaaaggtgaaggggtgggccatcctaaagataagatttcagaaacgtgttaggctatttttagtctatttgttgtatcactgtttagagttaattatcttctttgtgatactttttggatagttttacgtctatccttcctttgtgttaggttcacagagttttaaaataaaatttgtcaactattggaagaacaagacaggatgtaaattggcagacttttgtgctgaaaaattgaaggctcgttgtggtgaattatcgcctccgggtagtcacagcgagatcactacaaaaatgggggatttttatcacctacaatcgtcgcggcgagacttatggtggtcgcggcgacgcctacgtacgggacaaggatattttcgtcttttctcaattttaagtggtaaaactgttttataagaggaggatctcgattttttaagaaaggcaatcagaaaagaaccctagaaaaacaaaagaagaagactcttggggcgagcatggcgacccgatcgagtttccgacctagtttctttctctgctctttaatttctttatgtttttatctatctctagtttatttatgggtttgaatgttgaaattatgaactaatttcctaatttagagatatgatgaatattgactgattttattccatgcgttgatgtgatttgactatttcttctttcttgttcttgtggtttgttcatatgtgcacaacttttcagttccaaaattaacacttaaaggaatcaacattctatcggttaggaaagtcaggattccataattgtaaatcaagtttccaaccatccatattattagatttccaaaataaaagttgtaagaatcatcttttttgagaaaatttcacgagttaatcaaagaaattaataatctgaacaagacttcataattactcaagtttcagattgatctactattgatcatccttgtgatataaattaggtctatatagtaaatgacatgtttgataaaaacatcttaattaatttcggtctatgtcgtatatattttctattatatacaacacattcacttagatgtcatattacattagtaatccaaatcgagattgcttgcaccgaataacgggcatcagtgaaccataaatcgttgattaaatattccataactttaatatattgttggttattttattcatggctaagtaattataattcttcgtacaatacaagtcacaacctcatgaatgaataaagaatttttctatatttatagataaattattcaatattagatattaataatttaacattcaagcatgtaaaaaatgttaaactttaatttataaacagaaatgtctttacagactttttaggacataaaccctaacattcagctctataaaacacctatcactaaaattcctgacatagtcaatggttggaattatctgaagagatcaactaatggcaaggcaaagttacaacatgcaaccaagaggaaagtccttaacacattaaacgttggtcataatagcttaaaccagttctgaaagaaaaatggaggatatagatcctcgcataactaatgaccaaacagccctcggacccatcgaggaactcgaagaagttttgttatacccaaattttggttgtgtaccagaagctgacacatgtcccacaaaagaaatatgaatcaactcaaagaatataataatgacgttacatcatcaaatgcaattaaaataactcgttccaactaagtacaagtttgatagaaatatttaaactcgctgactgcttagtcttatgcgagatagaataaaactattaaactaaaattggcgagacatatgtttgcctcgggatagacagagtaataaaatgaacaagacaagatatccaaagacctcgtgaattattgactcccatgacaataaagtgaaatttatgatacttaaccgtctcgcattttatacaataaaaaagtcatctcacaacatcaatacaaataaaggggtacaactagatgaattacttctaaacttagtgtttttcttctcaagacggacaagaagaataactcatatttggcaagatataacattccaagtcaggataaccgtaaaagataaatacaagaagcagttgggtagttattagatattattacatgtgtgaatatatgaaacgtggggaatgtccacgtttcattagcagttgtaagtgaatcaatcccaataaaaataattgcctacctatattactataaatagggtcaaagtctgtgggaaaaatgacgacaaaaagagagagaaaatcttattatttcaaatattgagattgtatttt

SEQ ID NO: 266458 - DNA, 1206 bp, Cannabis indica
atcatccaaatgtgcccagaataagcaccgagtaactaaaacttacaatatatgtacctgcaattcagtgtttccatcgaggttgaatgtttctgcaagctgcttaaaggtaaatgatggtcaaacataaacagtacagaaaccaattcctcggactattaaaacaatgcaaacatgttagacataaataaactagtttaagaaatgaaaattaaacgccacagtttctaatcacttacaaacaaccaatgccacggccataacaataaataatttccaagacttaaaattcaactacactagctcaccaaatcagttcatcttcttatatcaaccaatcaaaaacttcagccattaataacaaatctgagaataagaaaaaaaaaacatgccattacctcagaagtttgatccgtagctaagacagcacgagggacagttgaacgccgtgatcccatgggtaattttgattttcgaatgaccaaactgttcccagaaaagtccttggaagattgtgacttccgtggacgagttgcgacctgattaaaggaaggagcttgaaacaaagtgtttgcgggaatgccagacgaattaagcttgctttgaaccaaactttggttcaccaaattatgcccaatggaattgctcatattcgtttcctctccttgcttctgaagaaaccaattaaaagaaaagaatcgttaccacaaatcaagaaacgagcacaaacacagaatctttaatcacacgatttttgtttttatttaattcacaacattttcaacgaaattatatattttgaaaagacttttttcagattcaaaagttataatatatttatatcaactataaactgatagaaaataataaaatctaaacttaaaactattttaaaaataactcaatttttcaaataaactacgaaataacacaatcttcaaactccattatcgatttagaaaaaccgactccattcttgagcaatatcgagcttaaatcatcactgaaaaacaacacatataccaaaaaaaacgattaaagtgcaaaagcagagagaaattttcctcactaacctgtaatcggagctggaaattagattgtatataaaatcagattcagtgaaaacgatagagagagagcgagagaatcgatcaatggcgaaagaagagaagagagcttgagtttgctccgctcttcttgattggt

SEQ ID NO: 266459 - DNA, 679 bp, Cannabis indica
ggtttaatcgcccaaaccgaactgttttaaaaaaaaaatgatccaatttattttataaatacatttattctacattttacaacctacaaacatacaaattaattgttcaaaaactaattatcttattcttttaactttaatattaataaaaaaataatatattatttttatatattattagtaactataatacatgcaaaagaagagcttaataacttaatatatatgtatcacggtcggttttgattttttcggtcagtttattacaaaaaaaaaaaccaaccgttcaatggcggttttaaccattagcggtttttttagttttcagtttcttcgatttcgattccaacagtgttcggtaggtcagtttgaacgacttttttggttttttagattttatgctcacccctagtctagagaccaaggttggggtcagggtctaagtctgagaccaagttcaggtccgggtccaggtttggaactgggttttggtctgaattaggatttgaggtccgggtatagggtctgggtttgggtctgtgttcgagatttggggtctggtccaagttcgaagccagggtctgagtccccaaccctaaacagtttctaaatattataatacaagttaatacatgtcatttgttatgtattaaataatatgattcacattgtattaaaa

SEQ ID NO: 266460 - DNA, 573 bp, Cannabis indica
cttagcctttggcatatgacagtttttttatggtcatatctttctttcaaattttgccaaagcacaagagaatcttttacagttaaaattataggtccatggtccctgaatcgccaccttgaaacactgttaagggtaggaataaagagttgtataatgttggtcagaaaattaattttgaattgaaaaaatagtaattatttattttgtaataataataatttttaattaaataggaaaaagagaaaattgttaagataaaatttatcgagacaatattttttaagacaaaagttgttaggataaaagataccatctttctcctaagtaagacacggtacacacctatggagatttatctttttgggctaattatttatttaattaattcaatcaaataaatatttaaatttgaaaagtggttaaaaatattttaaagttattaagacattctctcaagtagttaagagattttctcataaatttcagcaacagaaattggttatagatattttttatttcaataattaaaaataatttatttaattgaatttaattacaataaataaaatc

SEQ ID NO: 266461 - DNA, 601 bp, Cannabis indica
aaaggaaactggccaaaagaactccccgaagttctatggtcataccgtacaacagaaaaaacagcaaccggtcagacaccatttgcaatggcgtacggttatgaagctatgctgcccgtcgaactcgagccaccttcccacagaagattgacgtacgatcaaggtaccaatcacatactccttgcagaatcacttgatgaaatcgaagaaaaacgagcaactgcaaacttaaagttgatagctcatcaacaaaaagtagctcggtatttcaacaaacaagtgaaagctcagaaattcttcgtgggagatatggtcctgagaagggtattcctaaacaccaaagacagcacggcaggtgtactaggacctaactgggaaggaccatatcaagtggtcgaagttctcgactcggagcatacaaattaggtaagtatgacgaaaaaatgcaactcattctagtaccacggtactggaatggagaacatttaaggaaatactaccaataaagtaccaggtcgggttgaccattttaagtactaaatgaacattcacttttaagtgaatggccttctgggcggactacgcccaaaggttcgagaaa

SEQ ID NO: 266462 - DNA, 680 bp, Cannabis indica
gtatgtaaaacacaaaacactaccacaaaacaagcttttagcttcctttttttgaacgcatttttataaaaaaggaagctaaagggtctgaaaatacccgcttattggaaaataattaccttaagaggctgttttttttaataaaaaccgtaagtataaaattagagtataccatttagaggcggtttagagtcaaacgacatagggtttgatagtttaaccctatgccgtacgttgttatagaataaccgacgacatagggtacacgtgaaatttgacacgtgtccctatgctgtcggttattcgataacaaccgagggcataggattatataaagaaccctatgcatcgtctccttcctcacgagccaaacccatcagcagagaccaacccagccaccagaaaagaaaaaccctcgccaaccaccacctccgccagcccatttctctcccatttcttaacaatttgagcccatttttgttacaaaatcttctattttcgatacttaatcctatacacctaaatttttttaatttttttccctatttaagtgtcatccgaacctatacaaaaatagtgggtataactccggccaccaacatttgttgagaaaacattgaatctcaacatcctttaaggtataaatatagtttctattcatttttataatgtacattgtt

SEQ ID NO: 266463 - DNA, 485 bp, Cannabis indica
gaaaaaagatacttgacttatgcttactacacaactgaccctaccgtccttcatacttttttaacacactctccaatagcactagcattttgttgagtagctcgagcaaacaagacagtgtcatctgtgaacataagatgagaaattgggatagcatccttagcaagtttaattccctgaatcttaccctcatcttgcgccctctaaatcagtcgagacaacacatcattacatagaaggaataagaatgaagaaatatggttcccttgtctcaaacctctcctcaaagacctgtgttgaagtggtttactattaagaagaaccacacaggaggcatttgaaacacatttcatcacaagatggacaaaatgctctgagaacccatgcgccttcaggatcgtctcgaggaattttcgtttgatcccatcacaagctttatgcatatttattttcacaaccatcaaactacctttgcttctattctt

SEQ ID NO: 266464 - DNA, 717 bp, Cannabis indica
atttttatctttttttttttttgaaaaatagacatttaatattttcttttcttaaaaacagtagacaaaaacttgtttaatattgattttcaaaagaaaaacttatagacataacccattttatactcaatttgaaaacttataaatcaaattatcaaaataaatatttctttccatgttaatatcttatgattgttgggtgtgatgtgaagtatatgagttgatgccatttctttctattgtttagtttttattatatattactccaccctactaccttaggaaaaaaaaaaaagaatatgaagaatatactattttcaatactttttttttatatactttcatgcctattagatattgtacattgtcttttcactttttttttttccttttaatgttcatatgcatatttcaatgtgttatattagttgtaagtctcatatagtgcatatttatctattgtattttgtgaagtagctcataagttgttgattttttttttatttaaaaataaaaataaaatagagctttcatttgttagttgaaatgcttcaaatggactactcttacatatcagataatttttacttttagtagaaatttcaagagaaaattataaaaatttactttttaatggcatcaataaataatactataaggttatgggttttttttttttttacatttatatgaaattttttatgccatatttttgta

SEQ ID NO: 266465 - DNA, 2711 bp, Cannabis indica
aggttaatttataatttgtcatcacataggaggaagaagaatagctaattagtgttaacaattgtgtaatcaaagcaattgaaatcatatccctaatctcacatctattgttaaatcttttatttgtttgttttatttaatttttcttagtatatttagattcaaaaatttatttattcgattgccaattataaataagaatttaattgattggtacttaactacagtcctcgtgcaaacgatctcacttatagtattacttgttaaaatgatacatatacttgagtgttggatttatcacaacattatacttacaccgcaatgatagaagctctcttgagcaaactttgccaaaagtggcctgcctcaacaaccattaccataaccaggcatgaccagaagcctagcgagtgttgacgatactgatggtctcctctcagccaccaccattataggatcagtttctgatcaacttcacggctcagtaaaaaggcaggggaagtagccattggcaatggatgtttccctcgtgtcagcaccaacactggattcctgagctggatagaatcgttatacctgacgacccttcgtgagttagtcactgtaaccgcatcgggtcttagcttgtttgcctggcttaatgcctgttgcacctcactgtgcctacttaattatgccttaatggaaggcgggcaactcaagcctgaggatgccactgatcgatcatccttcggagagtgagttggctagacctgagctttaggggcgagtgtgagtacgacgagtctttcaagagcatatgcgttcatcttctatgccttcttcgagtgttcgaggatgtaggcttttagatttagcaatacttctgaccaagaccctcctgacctctggccaaaccctaataggcagtcaggcaaccttccttctttttttttttttgcacaggttatccttgatgggttgcgtctatagccaccatgcatatatcattcttcagctctcattgaaagcaccaaaatatttaccgagttttttggaaactaaatattttttagagcttaagaaagtgataacaaaataaatagcaagataacaactaagagatttgtacctggttcaagcgttaactatccttagtccatgagtctattttattaggctcatgggccgataattatttatagaaatagatacaaaatggactgtaactcctttataccatgttcctcttggagaagagaaagcttagtagaaatattctagagatggttgtagggttacaaaaatgtgttattctaggatgaagaatgagtcttctctcccaaaaaaaggtccttctctctcctggtttcttagcggtatttataggccaatcttttttgcatgtcctgccttagatggatcatctttggagcaaaattcgactgttggattcgtaggtggaatttttcccacatggcatttatgggtgtcagatcgtacaggctgggtttcagatgcgtgtcatgccagggttctccattttgaatttcccttatccctagtcgttggatcatttggtcaggtacacaaggacacacatgctctttacgatagtgtgtcttgggagacaacctctgacgtcgtacatgcaaaagcctagttactgggtctgtagtctgacatgtataggcgaggcttccgtgggctaaaggcgtagcccagtgtagcatgtctcaaaatgcattggtccctctgggaaaatccatactcctctcgagagaagatggctttggttccaggaatagatggagactttagctaatgaataccctctgtgttgctagcagacagggaactccctatcacgtaaactctttctgaaaagttagtgcctttatcttcctggagcatcaaatgaggaggttgggcagctaataacttcttagcctttcttgattgaaatctgcgtgtcatgattacgaaaatgcagataacactggtatttacaacaaggcgatatgaccattggtaggtaaggagcctcatcatcgtgttgtgttaggtcgtggcaatccaatttgtgggactaaggacacatatagtccgaaggtttcaccttgcaaagttggtatctagacaagtagttggagaaagaggagctacaaagcacgtacgtgcactaccacagtgtgacgcaggggacaatatttgatttggtgtcagaagatatacaactgtcacctttagcgctagatacgacacacttggctaggttccaggaacatctggctaaggctttcccggactagactaacttgctaacatcctggatcactcttcacttctgatccttcttcattgtattttgattaatgagaatcccggagtcctttcctccttcactaatatgatgagccactaggaggcttctaatatataacaccttccgtgacattgacagacggagggaatatactagacatggataatctgatgtggcacccctttgcgattgccacgtacatttcatctgggaatacgaataacagaaacaaataaagttacactgataactcattttaagagactttattgtaaaaatttccaataagttttccttatatagtaaaattataaataatttaaggagataatatatagatatactgagcactattatgtgtcagaacataataaaattatagggacacgattttgtcctgtgatgt

SEQ ID NO: 266466 - DNA, 690 bp, Cannabis indica
agtgtgtttttagtcacaatatttgttgtgactaaaactaaattagtgacaacttgtaactaaatataatatttaagtcacaagtaactttttgttgtgactataaaagtcacatttagtcacaaaaaatttatgttgtgactaaaaagttgtcattaaaaatatcagttttttgtaatgaaaaaaaaaagtaagagaaaataatgagatagtaaataaattggatgttgataaaaataaatacaaacggaatataattaattaataaattgttgaaataaattttgaaagtaaattttatttttaaaataaatattttaaaatttggatcattattttaaaacatataaataaaaacaatttcacaaataatttttattgctctaactaagaaaaaaaaaataatcatgaataataattgttacataatgctagcgatttttttttgtttatttttattttttgaaataatttttgaatttattgttatttgaaatagtgacatattatatatattggacttttaatgttggaggagaaattagattaagaattttttttacaatattttgcaaattaagtttttataagattgagcccttaaaattgcatttgaaatttctgttactaggaagataatttttattggaaggtgttattcgtatttctggataagaatacgtgtaattt

SEQ ID NO: 266467 - DNA, 610 bp, Cannabis indica
acagctcatgatttgttaaaccataccattcggttgaacgatgaattatcttaattcgaagagaggtttcaccaccaattataaatagcaacattattaattcacgagtaattttatttaccacgagtaatgtgatcacgagtaattttatttaccacaagtaatgttacaattattattttattaatttatgtttttatattttgtgtgaattagaagtaaatgttgccacattaaagatactaattcttcctaattagtcaaaatatcatttacatcactcaccttctacacgtcacattttctacacatgtaataataaacaaaaatttgacattatttaaaaaatattaacaagtatgttagtaatttttacaacaacctccttaacaacctaatctagcagtaaccacattaactttgttaacaatcctggcaacaatcatataagaaacataattttacacaattactatattagcaacacttatacaataatcatgttaccgattcaatctcatacaacaactatatatgttacaaatatttatggcaacctaatcttatacaacaaccaagttagcaatactataaaaaatagctactttta

SEQ ID NO: 266468 - DNA, 731 bp, Cannabis indica
gattattaagttgaactttaaattgtatcaaacttacctctccataaattcgatttgcacgataatgaaagtaaaaggattatgattagttactagatgttgcctaagtccttcttgggaaaaaccctagtgataggaaaatttcagaatgatggaatggttgcgtacttagtgtaaaccattacaagattcatggatgacctaatcgtgatattaagaaaaggtaagactattaaccaaggtttgcatgtttgataactattctaagtgattaggggtggaccattctattgtcattaagataagaaattgtttgtttcaacaaatactacttttctaagaatatgactaagtctgaaaataaagtagcaaagtagaggaaactattttttttattccaaaaatgttcaatcatcttattctataagatggtcccactgcctctgctgtctagtaacaaccgaagaggacaataccatttagtgttcttagacagaaagtcacagtaccttgtcgtagtgggagggtatcaaggaactcaccctattatgacttggaagacacatgtgatgaaatccattgttagtttaaacaagcaatggattgtcagaataaggaactaagaagcaaatccaagagaattatggtgcagcaagggacttgggattttcttgtgattcaactctctttggtgttcaattcaagctaggttagcttctaagcatttcttc

SEQ ID NO: 266469 - DNA, 495 bp, Cannabis indica
tttactcactttaaattgagtatctgtttccctccttctcctgctaggattggaaattctgtattttacatatccatacaattgagtccttggatttccgaaatagtgtaaaaacgaagtgcttcaaatcattgctatttgactcagacctgttctaaaaaagtcgaggaatttttttaccaggaacgggacctatcacaagaatatttttttagtagggcgatagctctgaaaagacagatttcccatcttttctttaatctcgggcgaaacagcgacagaaccaaccagaagcgcaccttgtttcaaagagaggaggacaggttattcacatttcatttgatggtcagaggcgaattgaaagctaagcagtggtaattctgaggatttcccgggggaaaaatagagatgtctcctacgttacccgtaatatgtggaagtatcgacgtaatttcacagagtcattcggtctgggcggctttgctcatgagttag

SEQ ID NO: 266470 - DNA, 906 bp, Cannabis indica
cttaagatgtaagcagtgagtcgatccaatgctcagcgttaacgaacaagttaaagaacacaaataatacattaaagctagaacttaaccatctcaagattaagatctattgacctaagatcaactaagtgatattgacttagaaagatataacagtaagtttatgatatcttatccaatgtcattatcggtctagtccaatgtatactccatacatttgatattagcatactttgccaataccgtgaaaatgacataacacttatccaaggtgtaagtaaactttatcgttgattatcatgtcagtgtaaatccagtgtactgacaaatcatgagacttaaactttcaaacataaaatcatgattatattccactgtgttgacaacactataatcatgaatatgttggatttaatagaatttatacattaaacttataatcatgaaagaaatcatgtgaaccatacaacataaaataatttctgatcttttattaattagtaaatttggttatattgaaatgaattttatttagaacataaaatctcaacagatgtcatatttaactaacttaagctagttggaaccaagtataataaacttgagcattcgaacattaattctaaaattacagatacaatcccaaattttttaattagaatataatctatgcaaatcacagtaaattagtcatggattagtcttacaacataaaattaattggcaaaatgaacgaaatgcaaccgaaggaacaaatttgtaattatttccagaatttttttatttaaaaataataattcaagagacaaaattctatatcatagtttaggaagtaaaaatagtatttattctttatttaattcaaaaagctaaagtagtttgtaataatccaaatagaaccgccct

SEQ ID NO: 266471 - DNA, 657 bp, Cannabis indica
tgtatcagcccatgctctcaaggtataattcagctctgctctggttttctttctactattagttttatatatcatttgtataaatatatatgatctgagaaatggaaaatgtatgtgtagtagaggtgagcagcattgagtgggaggttcatacacatgtcagagcaagaggaagatctcatttttagtaatgtacaagctcgtcggagacaggtatatatgtatatatatatacaagcattactcactcattgtttcaaattttctcataaaattaatgatatatagcttctaattatattttcttttagaagagaaacataaataacccctttaattaacatatgtttaacaaagccgtttaatctatctatgttatatataaatagtagtatcatagtatgaacctcggccgcctgacttgctctaaggttaggtattagtagtgttaaaatgtgttttattggtgtaattaaatatgagattttatataatttaatataataaatttaaaagaatattatttaataatattgttcactatctttaacgaaagatctaaaatttatgataagtttaacataaaaaagtaaatttgtattatatttaagagattttttctaatatagactaaaaatagatgaaatttacatttat

SEQ ID NO: 266472 - DNA, 1021 bp, Cannabis indica
ttttttttttagaatttacaagtttttaaaagactcattataattgtctgaggtaatagttttgtaaaagagagttgatggaggacaggacactaatagtagaaatagaaaaaaaaaacctctataatggtttgaaccatatataatcagaggccgaccatacattgaaagagatatataggtgcgggtccatcagaacatggtaaagtatgataatagtaataatttgtcataggataggataggaagaggcctactatacgaattatgaaattattgagtatcaaaaataaataaaatttaaagaattatgaaatgaattttaatccaaaacaaaacaaaaaacaaataaaataaaattataattgggtgaagagtagagtgagtgagtgcaactgtggggcatcaaccaaagacaacaccatcttctatttttcttttttctactttcttccctaatgtcacaccttcttattcacacattacataataatatcttatcttgttttctttcaagggaaattagagtaaagacttattatccaattttgtaaagactgactccaaatgtattcaaatcattcagacgtgacactcacgtgcttataagttggagggtttagagtttagagtttagacatgaggtatctccaaaggaaaggaaaggatcttattttgctttatgatgttgtcgtagtaataacattttcaaagcactcaaacttccttataattgaagttttagtcatacgactaggtgggacttgagctttcttttcaatgaataattgagtgagtttatataataataataataataataataataataataataataataataataataataataataataataatagaagatttatattattgctacggataatgctgcctttacatatcagtcacccatcccatattttaataatcccaaaaaaacatatatagacctaactcgatcttcgtaaatatgtggttcatatcaaacaccataatttttttaaaaaaa

SEQ ID NO: 266473 - DNA, 1208 bp, Cannabis indica
tactcattaagagtgcatccatacatatatatatatatatatatatttaagtataacaataaaattttattatttatctaaactaaatgaaaatactaattagtttgattgaatattggatgtattgaacttttgaacacctcatccaacatctgatttgattcagttagaaatttaaaagtaacatctaatctgatctaatcacaattagatattcaatgtttggcaaacgattgtaattagatcgatcatttgtaatttgattagatcaatttatacacacctctaagtagcacgataatctccccccaaatgtggctaagcactattgtttagcttaactcttgagcaataatagctcatttgttggaagagttttttcctcaattcttcaaattttgaaataattagctattttgaattaacaaatgtgagtgctctaacatcatcttctttactctattatttaaaatacatcattaatttttttttatttacctcaaatttttacattatatcatacaatatatcaacttctctattttttctctacatcacaaaattattatattttaaaatatataatattaagttatatacatacatataaaataaacaaacaaaaataataaaataaatttagagtaataaatagtgtttctctacctagagaatcattcttaatttcttttaaaaaaatgtaaaataactcacttgatatattccatctttaattattctcttctttattaaaaaaaaaaaggaattatttcacaaatacacaataataacaaaaaaaaaaattataaaaatacggtctcacggaattttaaatatttttatgatttttttttattttatatacagaaaatacggtctttttatgttgcactcttgttaatttgttgttgattttttgttatctgtatgttattttttgttgttgttttgatgttatttatatgttatttttatgtagttttttttgttattttcgtattgtttctagagaaaaccgtaaaagtataaaaaattaaatataaaaatgtaattttttttacaaaaaatagtatcttatgtaattatttctaaaaaaaccttatatttaagtaaactaatgtgagtgtagtttcgtgaaatttacataggtacgtcctatcaactatcaccataaacaaaaaaaaaaaaaaaaaactaaatacaccact

SEQ ID NO: 266474 - DNA, 558 bp, Cannabis indica
catttcatctcttcagtttatcgccttctccccttcttccccttcatcttctttctcttcttcttcatggctaccagagttgggaggagctcaaatcttagatctggctgtgtttgggtaggtgtgatgggagcataggatttcataatttttccttagtttaaactaattttcggatctcacgaacagtagatctgagctaaggctttgtgggcatcattgccgattggatatggggtttgtatctatccatctttggcattaaaattacaaatctagtgaaacagcaggaagtctccatcttgggttagttttaagctcggaacacactgtgaaatcgggatctaatattggggcttgttgtctctgatgttggagcttacgaaaatgcaactgaagatgggaaaggatcgagacgccggagcttgggaagaaggtcgaagctagggaagatgggtggaatggacaatcgaaggggaactgggaaagaagaagaaaaaacaaattaattagttttaattattagtaaaaaaaaagaaaagaaaaaaaataattttt

SEQ ID NO: 266475 - DNA, 633 bp, Cannabis indica
aatattatatttttttaatatattttattcatttaatttatttcacgtatttatagatatagatgatgtagaaaaaaaaaaagaaagaaaaaaaaaatatttagttaagaggtaaactttagctaaatgtagaaatgtactatttaaaattttgaggtattatagcttatttattggaaaaacttattttaagagttttgaagtataatttagttttgtagttataatacctcatcttttgagagtgttttaaacataaaaatataaaatttttacaaaaattaatactttatctaattacttatcttttttccttcaacaaaagtatccaagttacaaaagaaaattgtaccatgtaaagttttagttgggataaataactattctaaatgtattttagttaaaatacaagactataaaaatatttttgacccaaagtttctaagctttcactaaaatagagaaaattatatatctacccaacccacctttataattgtattaatataatatatggtctcaagaattaagctgattgtttatcaaaaaaaaaaacattaattaggctgattattaagcaacatccaacatcactttcagaaatatataatatgaggttgtgagatatgatct

SEQ ID NO: 266476 - DNA, 1233 bp, Cannabis indica
atttgagtggtattgggccattggggaaaggaaagagcggttggttaagcctaaattgttaggcacgtttgatttaagtaataaaaaagtttaaaaacacgaaatatgaatgaaataaaatttaaaaattaaattattatatatatatttatattgcattgaaaatattttttttagaatagtaatctatcaaaaatagtaaaaaaattattttattaaaatgatgttgacctaatacattaaaatacaatcaaataaatataaaaataaaaattaattcttttccattctattctattacttccagctaaacccaacctaaaaaaaaaatgattgtaggtggtggcttatttataaatgaatcaagatataattgcttctagtataaggtacctttgctccacagatggttgaacccatgggcataaaagaagctctaagctttattaatttgaaagggtggccgattgcagagtaagaaacagatggttaaaatttaatctatggaattgttgattaatgacattagaatgactgtaaattgttgttttttttgagttgaacatatttctttaaaaatttgtaaaattttcttcaaatatgcattagcaaggactaattgttttgaagctcatcgtccttattgttggatgataacttgattaaatgaactaacttatgctgcttatttttttttttaccaaaaaaaaaaataataataataataaagaaatataataactaaaattagattttttttttttttttgctttattaaattctaaaagttacgaattgagtggccttatttagatgttctcgatttaatataaaaaaaattggaagtagactataaaaaataatgggtgattctacaatgcacccccttaaaagggatgtactgatacacccttaacttgtttcggcctcgagaaaatttttttagtctaattttttttcatattcatgtacgttataactatttaagataacctacaaaattttgagaaattccgaataatttacaatatagaaaacaatgttcaaacagtctattttacacgcgtataaaataaaatagtcacgcgtgcaatacactgtttgaacgtagttttcggcgtgttaaacttttccaaatttcttaaaattttgcaggatgtcttaaataactataacgtacatgaccatgagaaaaaatttgactaaaaaattatttcgggtgttaaaacagat

SEQ ID NO: 266477 - DNA, 1015 bp, Cannabis indica
atgccgttagataggcacttttaatatataaagatataaaatttatatctttaattgtactaagttttttaaacttatttattccaatttatattcttaaaaactatatctatcaaataaaaataaattatattttaaatatgatgacaaaataattaaaataaaaaactatatgaaattttttttagaaaataaaaataaaaaaattatatatgatttagaaaaaaatatgaaaataaaattaaaataagtattaaattaacataaaataatgtgaggaaaatttaaaaaaaaaataattaagtgtaattttaaaatgatttaattttagttttttaataatggagtgtacttattattattttttggatgcaattagaactcctttaatgttatagaagtaaataaaaaaagtgtgcatttacaaattttgtatcatttgacacaatatttattatatgccaagtttgtattaaattttggtgcaccaatagagcacaatttatgctaaatgaactatatttaatttttattttacttatttgcatatctaatatcttatatttttcaaaactaactacaacctccaacgatgtggattatcgcgaggctataatcaatgtcaaaaaaataaataaataaaaatcatatattttatgagtttttatagcaaaaatatgacttttaaagaaattatgtatgggaattttttccatatatatgtgagaaaacatctggaaacttaaaaaaatataaagtatttaaaaaaagttatatattctcagcaatgacaaattgaaaattaagcgtttataaaatttcaactcataaattattttgtagtgaataattaatgtgaaaattacatgaaatatgagattttgtaaaaaagttacaaaaatataggcatttataagtttgccacctttctatggtatttttttactatttaaaactttttatggtatttgatatgccatatttttgtaaacctattatcaaaatccatatttca

SEQ ID NO: 266478 - DNA, 1044 bp, Cannabis indica
agttgctaagtctaaggagtctcgaggaggatgttcggacaggcctgaacaaccgaaaggtggttctgagctagtcaagagtgaactcgagcagatgcgggcccctactccacctttgccagtgcttccagagggcaagaaaggcaaggagatgctcgcccactatatgaaccaattggttcttgtggttagtgagcaactggccggcgttgacaacgactcttctctggagctgctaatgggtggagtcttaaaggaattcacaagggtaagtctttcctgaaaatttcctttaatccttattacttcgctcaaattctaaagttttttctctttgcaggccagtctgaagttggctgtacatactcccgggctaagtctgctgcttccaagaacgcagctctgtccaacaccatgagggcggaggtggacttggccaggaaggacgctaatgacgctagggtggaacttggagctgttcggatgaagctgggtgaagtcaacaagaagctttttacggcccacaagaaaataactgagttgactacggatcttgaggcttctgaccgaattgaagagatcatcgagaccttatctgccgaagtaaacagccttcaagatgaaagaacatcccttcgagcggtccttcgtcggctggaagaggagaagaagtctaaggaggaggagcttacatctgaggtgacaaggccgggagagaaagttcatgccttgtagacagctggtctcgagctcttctatgacttttcgagggctaatcctcaggcaaactttgactacttgggtgaagccaaagacatgtacctcgagttctgcgcttcccaagtggcttatagtgaaactaaggcggctgcttctacctccggacgaaatgttgatattcctctcgttcaaacaacagatcccccagctcctaccggcccagaagacccgaaccaagagcctgggactctagctgtttaaatacttcttcttttatccttttattttttatatattttttttcggccataaggcctttcctaa

SEQ ID NO: 266479 - DNA, 1342 bp, Cannabis indica
acttttccatttttttttaaaaaaaaacttaaacaattaatatttaaaaatagtatctgttagtacatcaatcaatatcagctttttaaaaataataatttttaaatacaatatcaaccggttaccaatttataaagcctaactacccctactttaaccccagccttcagatcatgcaacaacacaatcctatggctactatacaatcacggattgtattcccttatttactatcacgggacaaaatcgagtcccatagattatatcctagttattggtccaaacaacaatttagttgcttcattaatctcacaatgatttttctcttaaaatctcggtaaaagtttgtagaaacaatattgggatatacctttcataatctaaatatatcataggtatacttaccaagccccatatggagggagttacattgacgtccaagtccaaccagttcagcacacaatggtaaaccatttttggatcacactttgtcaagagcacttttagagccttgcaatatctaacattaacaatactagaggttgcatttatagttaataaactaagccagttcatacatggtcccacattagtgcattggaatgcgtgtagaggttgtttaagtacttacaggcatcattcatgaaggattacacataaaggctaaacttaatattatatttgcagggctattcaaatcagatgctgattgggcaagttttcctgatgataagaaatcaacaggtagttatgccgtctttttttagaggcaatctcatctcctggtctgcgaaaaagcaacatgtagtttctaaaagcagcactgaaagtgagttcaagtctctcgctaacacaacaattgagatttgatggttgtgttctatactttttgagctttatgtgacacttccagcacctccaataatttggttaccaatcaaagagcgactcctcttgctgcaaatcctgttttccatacaaggtctaaacatattgaaagacattaattttgttgggggaccaaatcattgctaaagaggttgaagtgagatatgtcccttttattgaccagatggctggcattcttactaaagctctaagcaaagacatatttacttacttaaaaggcaaactcaatgtgcgttccacaccttttgttttaagagagaatgataaagctactccttcttgtgataattagttagcaagttgtaactaactttcaattacaatagttattttagtaacttttattttctgttatttctttaattgaattgtaattgtgcttttataaataaaggtccctacattaagttctgcctcttttgcaagctttttt

SEQ ID NO: 266480 - DNA, 645 bp, Cannabis indica
acttaaggatggtttttatgggttccgggcccaccctgctaacgaaggggtggtcccgtataacaggcaaactcacgttaaggagtatcgccatcgctttttcttctcctccggattccgggcagtggaccatccggagctccttactgagtgggtgaggattcctccttatgaacggactgcacctactcaggcctttcttcggagggcccaggcctttgcctcttacgaccgggctgatcttgacgtcgggggtctggtcactacggagaactgcaggaaggcaaaactcatccttccgcatcaatccgtggaggactctaacctttcccgggttatctgtcccaacgtgagggcgccggtcgcggagaagaccttccgggacgagatcattgccacggcagagaagaagtaccaggagtatctctaccggaaggcccaggagaaggcgtactctaaggcccaggcagcttccgggaaggcacttcgcgtggggagcccggtggagagaaggagtcaggcgattgccgggaagccccttcacattggggattcaacagagagaagggctcccaggccacagccttcggctcaggagccgaacactggggctcctggtgccagcacttccggcgccggtggtaa

SEQ ID NO: 266481 - DNA, 5129 bp, Cannabis indica
caagttcttccaacttactcaatgcttcacttgtgggcatgaggtcggtgagcttaagacatggcgagaagacttgtatctccatggccaagtgactttcatattggatggctaagggatgtgcaagatcggtacatggctaggtgactcccaagttaggattagtcgaatgatctcggaatacctgtacatgttgacttggtcattacttggctgactcttaaagctagtttctctcacttcttgagactaattattgattaattttaaaaactagtcttgtttttttggggttaacataactccaaactaataattaagctttcaaaattttaaaatatttaacttttcttatgtgcaatcaacagttattgtgaaaacaaaatgttaagctatttaatattaggaaaaaaaaagttatagtggtggagttgtaaattagagattactaaaaagattataaatgtcatccatttaaagggaatgcaaaagagattaggatagagagtctcttttggcaattttcttatactaaatctaggtaattaagcaaattaattaataaatataaaaaataattaatatatatgtactgcatatgggtactacgtagggtagggtattattaattaagtttgtaaatatatatatactacacgagcaaagcctgtcttaatttttctttgagctggttgtgattcaagcagaactcatcgtccatctgcaaataattacatgaagaatttaactttgtgttggattagttggactttgaataaaaattggactaattaaagctaattattcaaatcaaatcagtgttatttttcttcataaagagaagagaagaccatgcattatatgcaccgaccatacatgcatatacggttactggtttggactaaatgtattcacatcacaatatattatttttttcaaatttcatgtacgtatataaatatatcatgctgatcacacactatatatatactattattactatatatatagttatgtttgtacatattactaatttattaaatcatatgtaactatatccctatttccaattaagatatgtaaaatatataattgttgccaaaattatcacctaataaaagttatgttattaatctagaatacataagcaaatattttgctattgtttatttatgaattaatatgtatctcgatcacattaatttctgaattatttactcatttgttcttttgtttgttcaaaactttaattttggaaattaagcctgaattcctaattttgtaacagcccctgtacttatatgtacttgttaatatttctcaaaattaattaattatgtttatatgtgtatgtatatagtagtataaggactaataatattaatgattaagatttttgggataagttaagtaacaaagtagatttcgagttaaataattaattacctgagcaacaatagttatatcaattgtagaagtcccaagaggcaactcagtagcattaagaattgtgaggtgaagattttctattttggcaagtaagttagccaaattgcaccctccatattgcttttcgcagtagattcttatcaaaacctccttgttcaaaactctcgcctcaatttcaggtagtggaaaaaataagttaccacagctataataatcttgatcatcatgatgagacgaagaatcttcttcgactgctgtagatactaccagagatttctttatcataatgactgattcatggttcttggttttcatttcatgttcttcttccagtgtctttactcgttcttcaagctgttttacataactgatggcatttcccaacacagaagccttgtccatctgtaatgataattaatcctccaaaattaatgttctttgaaaatctatgtctaaaaatatatataagactatagaattttatcaattaaatgagattccaactcaaaatgaattgattataggtagagagagtaacctactcatgttcttataaatagtactttaacattaattatactatcctttctagaaaaggtctggtgtgtgatttaaacttaatactattgagggtaaatagcggcataagtacccaaaatttcaagtttgtaagtgagataatcttaatgtttatttttagtggcataagtacccattgtttgcaaaactgtaattttttctaaaaactgttattttttttaaatagaccacatataaggtccaaattctagatcattggatctagacagagaaattatttccatatgttcctttaatattataaattcaaaacgaagtctatacagacaaaacgggatgaaaattacagttttacaaatattggttattaatgccactaaaaataaacattaagtttatcccgcttacaaacttaaaactttgattacttatgtcactatttaccctactattaatttataagattatgggtttatcaacaccagactttgtaaaccacacttgctaaatttaaattagtaattagaacaattattacaagtagtgtacttaccttctttagacctggaacaacagcggaaagagctataaacttctgattgagcttctctcgtcgctttctttcagctataacatggtcccgagcatgtaatggagacctaccattaatcgaagttctttgatccccttccaccttattattacaatttttatcatcatcgtaactactaccaatatagtaattcttctcatcagaacaaggcaccaacgccattgtgttcgagttcgagttgttgaagcaaattaaggccgcagaggaagaagtaacagcagtagggtttggcacaggaaattttgtggtcgtgtaatttggttgatgatgatgaacagtactactagtcctattactaaggaccgaatttgaggtgtacttgttgttctcatcattatcatcattgtgattatcaattgaatagtctagagtacagtgatccatattgtattggtcacacatgaaattacttaaggcatcattcatttcctacaattaataattattagtaatcaaaatctagatactcatgacaacatgcatttatatataatgaacatacatatataaatatagttggtagaaatagtaataataatttagtagaaaggccggccggcctcttaccagttcatcagatatccatttcgatgataagatttccataatcaatcatcagatctctcagcttctgatgactgaataaaaaaggattcactaattaatggaattgacaattaataacacagtttattataaattgaaggcaagattgggacagatctaaagcttatcattgttaattcagatattaaaattcacaaacgtatacatcaaaaacatagacgaatggcaatcaaagaaataaaaaatatatatttttttttatatgtatatatataaggaacttaaatcaaattaacatgggcttgaaaagaataaaaaaggatcaaacttcaacaattttatgaccaaataattaaaacatgtttggtagacgtacgtgattttgattttgtctttttcgctgcgaccttcaaattaagaagacgaagacattacacactgtgatcttttgttaattattgtagtaggtgaaatgatcagaattaagaaacctttagtggcctttatatataataataatggtgctaaacgcgcttaaaatggttactaattaaccagctggtataatcacaaagctataaataaatgaaggaattaataatcagggcttacgcggtccacgtacgtacggtgtgaactattctcgtcttcctctcccttgattattattgttcgtatatatggaactatatagctagctagctcttttcataagtcaacatgttactctttttcaccaattaatacttggtcaaatatcaaatctaaatagtacagcattgatttattaaatgaatatcacaattacatacctacatatcaatcacatatatatgatattaagaaatcgtagtcagttaatttcaggtaaaaatttaaattatgtttccaggttgaacaaataacaatttcaacttataagtaatgtatatataatgaattaaaatgtatatttccaaagatctctctttctagatgacttatagtgagtaaaatcacatgtaattgttgacaatatttaattgagcattattattgaatactattctgctcatcattagacacttcaaaaactcttacttttagtcacaacaaaatttgtaactaaagataaaaaaattgtagctaattataaattatcattattctattgttactaaaaggtccgtggctaaaagtattattagtcacaaaaattacaatttattgtaaccaaatgtgtttttagtcacaatatttgttgtgactaaaattaaattagtgacaacttgtaactaaatactatttttagtgacacataacttttttgttgtgactaaaagtcataatatttagtcacaaaaaaatttatgttgtgattaaaatattgccactataaaagtaacagagaattattttattaatttatataaaacctgatatttatttacactaatagtaatataatccttaagattgtgctagataccaataataattttcagtattaatcaatttaattagaagtttgtctgtagctatatgaagatagttttcttaacttattttaagtcttttgattttttaaccctagtcttattttattaagggtaaatattatttatgttttacaaaaattaccaattggatcatctgttttgttaagtgacaaaatggaccatgtattttctaaaatggtacaaataggaccctaaattgatttttttgtcaaaatgaaatttaataataatccgatctaaaggtattataacaaaattatttatatttattatatctgttcgtgttaagaattgtcttcaagttggttatattaaaaaaaattgtcaaaaattaagctcaaagtcctatttttaccattttaaaaaatacatggtccattttgttatttaacaaaatagatggtccaatcggtaacttttacaaacacagggtccaaaatggtatttacccttttattaat

SEQ ID NO: 266482 - DNA, 444 bp, Cannabis indica
aagcaacagagcaatgtaacagtggtatttcaaaaggtatgaaccctattccccctattctgagatctgcaagtgtagcgaggaatttagagaacttcttttaaaagttctcagcaggataggaaggtgaagatagatttttagaggtacatagaggatgagattaactattggaaatcgtctttggtgtgctatgtgcttggttctaatccaccattgcacatccttgaaggttttgcaagacgaaaatggtctgagaaaagtggaacaaagtaaagctattagcatatggggtgttcttgatcagattccattctattgagcaaagagatgaagtgttgaatggggatatatttcttcaataggaaaccggtcattatgaagccatgggacccgaattcaaagtgttaagaaagaagatgtgaaattagtacctatttggat

SEQ ID NO: 266483 - DNA, 516 bp, Cannabis indica
acctccgtccaaaaatcacagttaagtgtcacggtggactgttcacgtgtacacacttgtacacgtggtaaatttttaatggtccacataatattaattttaaaaaataattataaatatttaaaagaattaaaagaaaaattaatttcataccaatgttgttaagatccaaaattactcaattaaagtcatctaagtgtttcctcaattattttgtatcatccatcctcaaagtatacaactttttcttgagatacaatttattagccaatgatttcttaaaataaatgctgaccttttccataagcctagagttaaatcttgatctgaaacctctctgagaatgttgagtttagagagaaagagagaacgagagagaagaaagatattctttattattgaatgaattacttacatcagaacaagaaaaaacttatatacagtaagaagaacaaagcaattagttacagaattggtaaactgactactagcaaaacagaaaactaaccaactaat

SEQ ID NO: 266484 - DNA, 1230 bp, Cannabis indica
  modified_base (1199)..(1199): a, c, t, g, unknown or other
gatttgttgttcacgtttcattaattgaaggtgtggtaagaggatgcggttggcagcaaacggctgtatatgtgaaacttgggaacattttatttcattggcatgactagtgcagccattcttgcatttaaatttaaattatatgtcaaggtaataaatatatatattatttattaaaaatagtctcatattcttaatatgtgaaaaattaatactatatataacatacataaactacttctctaattttgaattggttttaaaatagaaactcatatacctcttaatctcaaattctaacatcattcattgctttttgcttgtttattaattattatttctatgttggtttgggtacagggactgtggactggtatggcatgtggtatgttgtgccaagcattcacactcatgttgataataatgtgcacacaatggaccaaattgcaactggctgaagagaaacccaagaaaggagaatcgatattagcttgagtaattgtcatgcattaagctgttatcgtcccttataagaaatatctttgattggcaattccctgatcttaaagacctaaacccaatgctattttttttttttattttttaccccttgagatacacttagtataagtttatgggaacgtgatagagattaaataggacttaaggtgtagaaattttaaaaaaaaaaaaaaaacttgtgtgtgtttgaaagtttgtcctacattactcatgtggtttttatattataattagttgctaccaaaccttaagcttattatagggctttgccaattgaataaatgttgttttttttttataaacctcaactcaaataaataaatgttcactcaaaaaaaaaaacctcaaataaataaataagtaatgatatatgtacacataatttatactactaaattattttcgaccaattatatttcacaaaatgttacacattccacacaaacacattattatacaaaatagtttaaaatatattaagagaaaccttaatatatgaaaggagaatttatggcgcgtttactaaactgtaattggaatcaaaattattaataagaaaaatgtatcggtttaaaataaaaaaataatcggaaacaaaagcacacttattacttaataatactattgaagtattgacaaattttgtaaaaaaaaaaaaaaaaaaaaaaaaaaaaaanaaaaaaaaaaaaaaaaaaaacaaaaactagt

SEQ ID NO: 266485 - DNA, 571 bp, Cannabis indica
tgggtatacaatacaatttccactcaaaaaatatggcaaatcattttccacccaaatatccttttaagcgattttcctctcacaacattaaggcctatgttgtgaaaaagtgtattgggtgaaacatgtagatgtactctttaacaggagcctatgtttgtctttttgattaatggtctttatttttattttattttattttattgcataataaatagtgggcttgacttagttagcaagaaaaaatagattattttagaacaacacaaaattacaaaaatatgattatacgaaattttaaatattttaatttaaaaatttgtttacagaaaatacaattttttaatacttttatgttatttatatgttgtacttttgttattttattgttagtttttcattatttgtatattatttatatgttatttttctattactttcatgtagttttcttgttatttttatagaacaccgtaaaatataaaaaaactattaacataaaagtgtacaaattttaccaaaaacagtactttatatgtggtcatagacataacttagtggttagtttcac

SEQ ID NO: 266486 - DNA, 906 bp, Cannabis indica
ccctttctgcagccagagtccttacattcgggcagacgaccttggaaagattaaagtcatccaccgactgattctcgaatatcagcttggccttccgacagttctccgtcgtgaccaagtccccaacgttgagggccttcttgtcataagtggagaaagtcttggcacgctggaggaatactcgagtaggtgcggtccacatgtaaggagggatcctaacccactccgtaagaagctccgggcggtccatggcctggaagctggaggaaaagaagaagcggtggcgatactccttcacgtgcttttgatggttgaaagggactgggccctcgttcaaagggtgggcccgaaggccataaaatccgtctttaaatttgtcccccttcttggggacagatacaagttcataaaaatataaaatttcagccggactgggcgaaccccagctccgggcagcatacaaaataaacaagcctgaaagcaggcggtaggcttgagggattagttggtacggcgcaaggccaacaaaaactaaaaaatttacaaaatagtcctgaagagggagcatagccccggacatcaaatgggtctggctccaagctccgaagcccccataattgtgattgggtgtctcctcgtcccgaggcagccggtggaaggtcccggaggctgatggtttgatgcctgccaccaccacgatcttttcaagctggtgagcacaagtcaatgtggagtggagctcatccgcctccgaactgttagcacgagacttaaagttctcctgggccacgggaccctgcatgacctcctccagggtggccagttgaacctcccccttcctagaagacttagaaccagacacggaagcagacattttagttctaaaaaaatcaagaaaatccagca

SEQ ID NO: 266487 - DNA, 416 bp, Cannabis indica
agtggaactaacttatgtctatgaccaatgttaaatgataatttagcccctatgttttacaacatgaaatataataatatcataagcttaatattagtgaaaataattacaattaagatagactaaaaattgggtaacaattgttaatgagggttaggaagaaaaagttttaaaattagagtaaaatatatgattacaattagactcagtgtatcgttatattttattttgtaaatattgagaaatatggcttcttagtaacttttgttttctttgtaattaaaatcccacatagattaaaaaaaatacataattagtatacttctaaattataaataaagtattcttatatttattttaattcgtacatggctaatttatcactcgagattgcccaattagttatattttttttt

SEQ ID NO: 266488 - DNA, 517 bp, Cannabis indica
tcgatctactaaaccaatcaagaagaacattagatggcgcgtagtagacttaattcgacgtggggtttaaagttcccaaaatataacgcaactaaaatattttagatattaaaagtgtcgtcatttttattacacatttagtcgaatttcttctttttttttttgctaaataaatgaaacattccatcatcaacaatctgtacatcgtatgaacctgattaccaaacaaatcatctcaaggtttcaaaaccaacaattattgaaaccacactttatctttaaactttaattactgagcatgtttgctctggtgtattcaagattggaatgggaatggagattagaatcacaatgtttagttggccttttaacttttgtaatccttttacattgtaatgagtattactaccacttgtatgaattctcattacatgagtatgactcataaatgaggattacaattaccaatatattataaaaagacttttctacatttctctctcttacctctttatca

SEQ ID NO: 266489 - DNA, 693 bp, Cannabis indica
aaaaaatgactctcgatttggacacatgtgataagtgcacctggaatcgagaatccactctctattcattgaagaccctgagatagagaacaactctccgtctgtggagcagtcgtcactatcttcagcgattgtagcagagtctttcccatgatgatggtgttgaaagtccttcttatctccattgtgagatttgttgaagccttgttgctccttgctactttttgcaaaatcattgcaagtgtccacactttccacaaaagtaacacttcctcatgtccttctctctagacttcgatcatgattgagaataatggtgtttactcttcgaacttattttcttgggtgatcttcctcttgctaaatacacttcttctttcttggattctatctccaactgtaattcaaaaatctttcgacttaagtgtggcaaagaatatcttccaacacaataacatccttgccatacttgatggctaccttaacttcttgatatgcgattagaagtgatctcaacaagatgatgacctggctttcttcatcaatcttgtgatttatgttagccaaatctacaataatctcattaaatttatcaatattctcatctaagaaagggacgaaatcattctaaaatcgtataacctttctagcaaattaatcttgccagcagtcaatggttttaagtataattct

SEQ ID NO: 266490 - DNA, 648 bp, Cannabis indica
ctgctacaaagtaataatatgatgagataataatatatactacgtaaatatattttcaataattgattgtatatgaactctattatcatccatgctagagctttcgacatgccaagtcatatagatatataaatgtagtgattcaattatacgatgactgtatagtcgtcttatatatatactataggtatatatataaaatatgttcatttgtatacgtgacaaaagcaattattaattaattattcttcacatctaacttttgttccccatttgagagccatgtttttcacaccccccctcttgaaactctaagtgctcaatataaaattttggactaattaattaggttattatagttgaaattttcatgcatattgcatatttatcaagagaactagttaatattagctcacatatataaagaagaagaaggaaaaatacatttctcaataataaatatttaatatataaattagttgaaggttacttattatagtcatagtagtgtataataatatgctctatttattaatatatatttttattacataaaaaaatttaattattttcctgttaaaattaacaactgtcacattacgtctttgctagggtttctcgtgatcttcagcttttgacctagggcca

SEQ ID NO: 266491 - DNA, 2292 bp, Cannabis indica
ttacaaaatgggcgacctttgtgtgattttatttcccatgattcatttgactaaataatatttcaaattttacaatatttgcgatttgtatgcgatatcttttgatatttgtaagatgtttttgcaattttattttctataatttgccaaagcatgcgaatttaggcgatatattcttacaattgtgcaatgtctgtgcgaatttatctaaactatatagaagggtaggcacgaccaaattggtagacacagaagggtagtttatctttattagcatttgatatttatttggacagatcaaatgctaacattgtttgaaaactcaatgcatttaagaccttataattagttctagtagtttttgttaatatgcgattaaaaggtaattttttccaaaatttataaaatatgtgcaaaaatactagtgtcataaactagtcacaaaaaatatactatgcagtcaactatcaggtcaaattctggtaaaataagtccacacactacctatgtttaaaggtgggtataacatgctcaaatgaacgatccaacatgcattgcttaatgtatttaatgacatacattccacaattgccactacaaattaataaattggaaactattagaaacaaataagttaagtaattcctaaaggactacaaaatggcttccaaattctttttgaaacctatgttgatattatataaatagaaaatgggagatttatcttttttccgtctgcagtacaacttaagaggtagctcttctataatgcatcagcaggagttgattgagatcacctaaattaaccataagtacataactgtttaattgaaaataatcactaccccccaatacggatgtaaataactcggtataaggcttcaaatatgacttcatgttctcctcagttgtggcactgatatcacagtcatatactacaatctcagttctcaatatctacctcaacagccacctaatggtgcttagcaggaaggttcaacacaaagtagatatgatactagttctcccaacacgacaagtatctatggtctatccccaccacataattaaaaatcgcctgatcccatttgaatcctgtcaccatcatgataattctagtacatttaaaataactatggaacatatgtgcccaaaaccacacatttttgagtgtacacatcaggaaagagcttgtgtcttcttctcaacaagtgcatcatggggtcaatttaatgcattgcaaataaaaaaaagttagaaaaatgtctcacaaacgtcgtacataggtcgcacaaagatcgcacaaaactaattattagagtgtaaaattacacatctattgcataaacatcgcacatatatcgcataaaaatcaaattaattacacagaggtagatcgtataggaatcgcacacaaattgtacagaatttgcacacattaaacattggcacatttagcaattttttttgcaagtttaagcaatgtatttgtggttcacaaaccacatcgcaaatgcataggttagatatttcaaaaactcgtaaacatgtcgcataaatataaatataaatatatgtcgctcaaaagtttaaaacaccaaatttgaacagttaagaaataacttacaatatcatcaatccattctctttccaccatcaacttcacaaaccaagcccgattggcactgccagtgtgaacatccctaggatggttgtagtccgtcaagtaagtaatccacttttgaaaaaatttgtacagtcgtgagtctgctggcctcaaagtatctactttaactggcccagttcgttgtttcttcttcccttttgtgcagtcatttaagaaaattggcttctattttctcctagccctagaaaattctactccaggaggtgccatcatacccttgcacatcctaaaactgtgtatcactgatggcaatcatagcagcatccactagagtagaaggaaccttatttacattgggttcccaatcttccagatacacatcatcctcatcacaatcgtctaccgattatgatggttgtgtcggctctaatagctgtgtcggcgttgatggttgtgatggttgcttctgtaataaacttatcacagtcccaatttgatcgatgataagattcttcatctatttctaactactcttaaatgtagtcttcatctcagtttgtgcagccagaatcacaagttgtgggtcttcgaccttctctaatctcttcgccaaccctaggtagtgttgggttttgtgccctaaataaaactcattacaatctgat

SEQ ID NO: 266492 - DNA, 601 bp, Cannabis indica
ctcacccatgaatggttttcacacaaattaaatctcttatccttgtattctcacaatcttgatttatctcctcttccatattgaaaagggatgagcttttaatttttagagattttattacaatagaagaaaaatcaagatacattacaactctattgtaaaataatacaaggattagaataagagattgattaaatatatattacaataaaattatatatacactatatatattacatatatatacactatatatattacatatacatataatgaaaggtagaagagaagataacttacacaatattatcactcactcactaccttgagtgtagaatagtggagatcaccatgacttgaacaagatattacacctttgtcgaaaagcttatttccccctatctttaaacactaagggaactctctaggaaataatcttgggaattatcaagccttacggttttctagcaaagtactttcttaatagaaaacttctcttctctcacactcaaaatgagcaccaaatacctccttttataatgtataggtgatcacttagaattcaaatacacaacacctcatttctctcatataaatgagt

SEQ ID NO: 266493 - DNA, 1037 bp, Cannabis indica
gttttgcatttgattgcttccaaatcctctagcgggactgagacggttaacatttttctcaaactggcatacgtattctgaggggtctcccgtcccgttatactccggtaacttaggggctacataacgctgggggcctccacgcgcaggatgtggttcccaaagggtgaaagggttgatccctccattcgagcccattcgctgtgtactcccatctggctttttgcctccaatgctaataatttgttccacatcatttcctgtaacctctccgtctctttactcgccatcgatggacttccaacaactgttggttccatggttcgctttcgaggtgttgtgcagagcgcctccgcttcagttatctcttctacctcgtctctggcccttatgggctgatctcgatgatgaactggagcctcttgaattgcaaagtttcctttttctccagtttcttcatgcatgcatcgggtatggttgcctgagtggtcgttattgttaacatggttctctttctcggtctctccttccacctggcgatcaccggtttcttccgtgtgcgggggtcgttggtacccttcgaggacaactttcatctgtccgttttcgctctcaagcctttgaatatgttccttttgaagggcgatttctgtaccctgagttgccattctcccttcttgttgtttcagcctttcgaggatctctcgccatggcgggattgggtttaatatgtcttcgccggtgttgccggtgtctgctggtgttccgaggacgttatctgggttgtcttgaggggtgagatcttcctgttcatttgccatttctctcttgttttttgatcgattatcttacaaaaaggtctttttactgagaaaaataaaaagtttcccacagacggcgccaaactgttttggtcgaaaacagtaaaaatttcttttgtgagctctttctttttccagttcctaatccctttgtttacgtcctttttcttttctttatatgtacgtccttctcttgcatggacgatctatcatcct

SEQ ID NO: 266494 - DNA, 1364 bp, Cannabis indica
ttgttaagaatgtcataattgtgtatataaacctataatatagacattgttattcaaatgttttatgttataaacgattttttttatatagagtttaaattttatattgatgattctaatttagggtgggtattggtgtagtttttttaatttaaaaaagattgtttaattttttagtttatttatttatatatttttgaaagttaacgggagatcaaacctatcgttaaatttaacagaatattcttttatttttaaagtatattctgttaaaccaagaaatgccgttaaataggcacttttaatatataaagatataatacagtcttaaatttatattccttatttcgtgcgttccaaatttgaattaaaaatctatattatcactcaatcaactccttccaatattaaatcttaacaactgacttttctccattgactacttatgactcataatttctccttctcaattaattaatactaccaactattttgtgatacatgttttaggaaattgccaagaaaagttgcacatatataattaagctttattagtgtttttgttcatttctatttacatggttttctttttttttttttatcaaaattcatttaattaaggggtaatgaacggttctctttaaattttttttttttttggccaaattctcactctttactcctaaatgttaggtgataaatgagttttctaaagaataaaaaagttataactctcaactatgaaattaattatcattatttctatatctaattatgcagtgattatactccatttcaacgagtcaattctaattatgcataacatgcatatcatataaaattgtttagatttatatatatttatagaataattctatggtacatacccttattttgttctcatagtataggaacatttttgtaatcattgatgtgtatgacttttgagtgtgcacattaattaatatagacttacatatacccaataaaaatattaaaattttaaaatagtattgagcctaggaaaaaattcttacacctataacctattatttataggtatcaaataatatattttaaaataatactaaatcaattaatattaaacatattgtatctttctttatatttgttatattttattttttttaattatataaatactaattaatatgtaattaattaactataactaaactaagagaatttttttttcttttaaaatagaaataaatttataacatcatactactaataaattttatatttaataatataaataaaaattgattttttttttttaaaaaaatacaactaataagattaatcaaataatacaactattttaaataacagctaacaat

SEQ ID NO: 266495 - DNA, 1053 bp, Cannabis indica
tatataatattctaaacttacatgcacagtcacacacacacacatatttataaatatattttcaatcccggcctttaagctgatcagtcattcatggagaaatatcagataataacttttcaatcattattttatcttgtgatctttctgtttatcatcgttgttaatgcatctactggtataatatataaatcagtcttattaatttgatgctcatccctttctttctgtaattaaagctttgtcaattttattatatattgacatattattcttggtgtgcatgatatatatggcagataataagttggaaaaacatggtgttaagctttttgtatttggagactcgtatgctgatactggaaacagtaagaaacacacggtatcatggaaaccgccgtatgggattacttttccaggcaaaccggccggcaggttctctgacggccgtgtcctcacagactatataggtatgtacatataacatattatatatatatataattaagtgtatatataagcctttatatatgtgtagtattaattgtgtttttgttgcttaaataaatcattaagcttcgtttctgggcataaaatctccggtggcgtacagagagataaagggggtagagaaatggaaagtgagtaagtatggaatgaactttgcatttggagggacaggagtgtttgatacaatggaaaaggaaccaaacatgtccacccaaatcaatttctttgaagatgtattacgtgaaaatgatttctattccaaacaagaccttaactcttccctggctttagtctctattgctggcaatgactatggtgcttacctttctaaaggtaccaataacattaacaacatggaggtcagtagttaacctatacttaatcttatatgtttataatttatactttttcttatatatggtttaatttgttaacatttctatatgtaatatttttaccatggtgcattttaaatagagaaataatatcacaactagcttcaatatttaatattggctaattagtaatttttccccgaacttt

SEQ ID NO: 266496 - DNA, 828 bp, Cannabis indica
gttgcaattaaggttgcagcgctacttgcaataaagatttctatgtagaattccgtaaaaatgttttctttaaaaaaaaaaaaaaaaaaaactgttttgaagtgtaaaaatgaaaaaccccttattttttgaacatacaattttaacaaaattaaacatttcgttctacatataattttttctttctatgaatttattttttttaattttatttattttaatttgttattcgagacataaaataataataatttattttattttgttattagtaatgtgaaaaaaaaactagttttttttttttttttatgttgtactcttgttaatttgttgtctattttttgttatctgtatgttattttttgttattgttttgatgttatttgaatattattttcctgttacttttatgtagttttcgtgttatttttattaaaaaccgtaaaaatgtaaaaaaaaaaaattaaacttaaaaatgtaattattttataaaaaattgtattttatgtaattatcctaaaaagatttatatatatataacttactattcacaatattgtagtgggtagatttcaagatctaaaaaaatcatatataaaaattcaaaatagatagttacttaatgcaagtaacaaaaaaaaaaaaaaaaaacaagttcaaagaaattaactcattcaattaaattgaaaggagaaaaataaattttcttacattagaagaaagctatgggaaaaataaattaattaataaaaaatatatactatttttgcctatatataaatacacgatacactaaattttacttttatattcatcagaaaaaaaaaa

SEQ ID NO: 266497 - DNA, 1397 bp, Cannabis indica
atataataaaatattatatttttagataatgtaaaggttttactcttaataaatgctaccattggagatgctctaagggatactttatgggttcaacacattttaatttaataaataatataaaaaactactatacaatcacaactcaccatattggtgttggacacctttattaacttgcttaatgagagagttagttagtgagttgtcaagtgtgagagagtttgttatttctattattagcaacttgtaagagtcttttacttattactgaatcttatataagctccattgattgagctttgttctaactttagtttcagttcatcattaacggtgttcaatttatcattctcttttcacttttactcttctaaaactaaaatggtatcagagctacaataatcttaagttcaatttgttttctctttctgcattttcttctgtgcttctctattctttgattaacatagccaaaggacttgtagtttagattcatcatggaacgaatcaagaagataatctagaaaattcgaatcactctttcaatctagattataatcctcattttgatgatctaagaagtccttaatttcattcaaaggcttatcatctaaacattacattagtaccaaaactcctcacttcttgcgagaatgatagctcatggagaaggtctatgatggtggctctaatggcgagaaacaaggtaaagtttgtcgatggtcaattaccttagcctggtgaagatgatgaagattgtgagtcgtggtgttgatgtaacagtttgatcatttcatgtatcatacatgttgtttcgctgaaattgctaacagcattatgtatcttgagaatgcgacctcgatttggtcggagctacaagaaaggtttaaaaaaagaaatgcacatcacgtgtttgaggcaaaatgtactacgaatattcttcattagggatcgaacaatattactgcgtatgatacttgattaaaatctttgtgggatttaattcacgaatatagaccacattctgtttgtagttgtggtgctaggaaaatcgatcagtaatatcaagaagaaaatcgtgttcttaaatttttggttggattaaatgactctttttgtctagctagatctcaagttttgatgcaagatcctttgccacgaattaacaaggtttatacctccactattaaagaagaaaagcaaggaggtattatctctattcaggtcccaggagagtttgcagggagtatacaatccttcaaaccagctagtgtatgttcatattttggaatatgtgatcatatcatggctgtattatcgttttcatggatatccttcagtttataggctctctagatgatttctaaagatatgttatatctccccaagacaaa

SEQ ID NO: 266498 - DNA, 842 bp, Cannabis indica
atagaacttatatattaatgtataaaacatgtgaacaaagcatataacaaggtacttactcaggatttaggctaatctaccattgatcaatattataatatgaattaagtctttatagtaaatgacatgtttgataaagacaacgtaattacatatcgctccttgtcatatatagtctctattacatataacaccttcacttagatgtaatgctacatcaataatctgaatcgagattacttgcactgaataacagacatcattgaactgcactagcaaccattgattaaagatttataaattttaatatatttctgactgttttattcatggctaagtgattttagttcttcatacaatacatgttacaacctcatatatgaataagaaattttccgatatttatatataaattattcaatattaaatgttaataaattaacattcatgcatatatcaaaatgtttaactcttatcataatcataaatattttaacaggtttttttaaggcataaaccttaacatgcgtttggttttgggtagacaccaatttaggtcattacgcgtggacactaatgtgtgtttggtttggggttagaacgccggtgtgggtttcttcaagagttatagagagaataaaggagttagagagagaaagtgagtgagagattttgaaaacattaaaatgctaagggtactttgagaatgatgttacagaattaagcattaaatggtagaatgtattaaggtgtgagttttttggtagtgggtggactctaatgcaagctttattaaaatttttcttctttaaagctccaaggatcaatcttgatggacatac

SEQ ID NO: 266499 - DNA, 583 bp, Cannabis indica
cattagaaaacttatatacatttctgtatatatagtttgctattattgccgctttgttaatcatgtgtgattttgatcaccgcgtaaaaaaaaaaaagtgtcacattcatgttaagcgggtcgtgtcgtgtttgacccgtttttattttatgtcaagtcgtgttgatccgtttttgagctgcgtctaatttccttgaccctatcgtgttcgtgtgtcatgtcgaaacccgttttgccacccattcctaaaaggctgaaacacactagaaagagctgagttgatgaatgagataaacataatctgacacaacaatgggaagtgacctaagttacttattaataattatatctctctaaaagcaaacggggacaagtatttttaaaccaatatcttgataatcaactgctattaggcatctgcctaaactctatatatatatggttaatgattttttatattaattattaaattaaatcaaataaaatttaatatttaattatattaataactgggtaaataccgttttggatcttgtgttttgcaaaagttacagattggaccttgtgttttgttaaatgacaa

SEQ ID NO: 266500 - DNA, 1695 bp, Cannabis indica
atttcaataagtcctctgttaattcttttctcacctaacgttccttctcatattagggatattttttttttcacgacctttaatttgtaggacagacttttcattagtaaatacctaagtttaccttaatgtttgccacgttctaaacatcactcttttgcttttcttaaggataaagttacctctgtgcttcaatcctggcattcaaaatgttttcccaaggctggtaaggaagtactcctcaaagctatggtgcaagcaatccttgtttatgcgatgtcttgtttttgcctccctgttaatctttgtaaggaaatcgaggctgcaatggccagattttggtgggggtcctctggggattttaggaaagttcattggaaaaactggcagtctgtttgtcattctaagtttgttgggggtttgagttttcattctctcattcattttaacaaagctattcttgctaagcaggcttggagaatcttttctcaacctaattcccagttaagtctcactttgaaagctagatacttcccaaatacttctattttggatgctaagtctaggcataatctttctttttcttggtgtagcattctctggggtaaggatctgttagtgtcgagactaatatggaaaatatgtgatgaaggggaaatcagaactttggcagatcattggcttcccacaaataaatttaagcatcccatccgtgatttggattctagtcaaaatactatgtcttattttattgaccaacctggttgctggaatctggataggctcaacacctatttttatgaatgtattgttaatgatatattaaatgtaccaatttcagggattgatggtaaagatgacctaatctacggaaaggatagctctggccttttcagtgttaaatcagcataccatcttgctctttctggtagggatgttccttctacttcttcctttcaaagttcaaaattcttttggtctaaagtctggcattgtaaaatccctcctaaagtcaaacatttcatatggagaattgtttctaattctgtgcttatggctgtcctccttttccagagacatattattccatcccttatgtgttctttttataacctgcaacctgaaactgttacgcatgctttactagaatgcactagagccaggaaagcttggaaggcattatacattatacattttctttctaatattttctccaatatggataagggttctactgatcttttgttattctttttctaggctttgtggaatcagagaaaaaatgctttgtataagagaactattatcccttctaatgaagtgtttgcttggtgtagtaattttttgcttcagtattttgatgcacagcagaaatctcttgctgctactggtgctcaagttgaggatcctccagctttgctcgattgttcatctggttcttttcatgttcatactgatgcagatattgacaaagaaagaagaggtttacagtttgagtgtaatagcctttaataagtctaaccaaagtattgcaggtattgtcaagccttttcgaggatcggtttctgataactctatggtatagagttaatttttaagcttttaaactaaagtattgtgagaagagtagtgaaaatgtgtttatttgcttaattttaattagttctagtgttattttctatttagtaatctaac

SEQ ID NO: 266501 - DNA, 985 bp, Cannabis indica
ctcagaatcgcaaatggaactagaaccgaattaggactaggacaaggaccaggacctaaacacaaaccctaacccaggtcaaaacccagacagagacctaaacacgaaccgagactaggactcaaactcgaacctagaccgggatccaaacccacacaataactgggacctagaccgagaatcatgatagggacctgggaaacagaactaggaccgggacctagtaccagacccagacccaaacatgaacctcggaaccagctcgtgactcggcaccagaattggaactggactgcgacccgagatggggatccggatctggacccagggcttatacaaaacccgtagtcggtgtctggatttgggacccagccctggacctgaaccatgataaggaaccgaacccacactcggacctgaaccgagtcccaaaccaaaaagtcgacccgaacccgtaccctgtgacccaaaattggaactgaaaccggtagttgaccgagactggaactatgacttggacttggaatcataactgaaaagtggacctagatccataacggtaaccggaccaggacccagactgcaaatcagacctagacccgaatttggagccggacccggttcctaaaccaaacttggactccggacccgaactcgaacctgaactcaaacccaaacatggaaacagacaagggacacagaaccagggtcgggacctagaaccaaaccttagtctcgatcccaaacccaaactaagaaatgggacctgggacctgaaccagaactagaccgagaaccgtggcagtgatctagatcttgactcagaatttaggtaacgggacctggaacacaccaccagtgggtgtctagatctgggactcagcctagaaccagaacccagacgaagaattaaacccgaacaaagacctaaacctgggaaccaaaattcgaacctgaataagaatcgccgaaccaagaccctaga

SEQ ID NO: 266502 - DNA, 536 bp, Cannabis indica
ctcaatcccgtgataatcttgatggttcaagacttagctcgaatgcagatgaatttttagagtatactgatttgaacaatgatagttaggttttttttaattatgtcaatttttatttttaaagtttatttaaagacaacttcctacttttatttgagataatataccttatattgtaatggacaaattaattttaatgcttaatttcttaattttaatgttttatttctaattaataatacatttatgaaataattattatatataaaaataattattataattaatttaattatattaaataatcagaaaaattatttttttaaatatttaaaaatattaataccgacggaacaatgattggggtccgccggtattaatgcttctgcgtgtaaaagtgcagacattaataccggcggatcccaccgctattaatccgccggtattaatattattaccggcagaataccgttttcgtcgctaataactactaatagcgaccaattattaccagcggataattactggcggattcc

SEQ ID NO: 266503 - DNA, 917 bp, Cannabis indica
agctgccttctaacttagtatctatagttcttttaaatacatacttctttcggagtatcaaaaagtcgttcacaaaatttttctgtgtggccgagtaccccgcaaatgaaacagaaagtgggaagatcctcatacttgaaagtgacatgacaaaccagtcccccttgcatttctaattttttcttttcttcaacggcttctccaatggaatcttcactcgaattctcaaataatcccgccaaactccggagaaattgtttggatccgatttgatgaaagttccaatgtaatttccaacccccctaatgaccttttcagacatgaagccaatagatagattgtgcaattgaacccaaagctcaattttattcaatggtattgttctgggattaactccatgtgataccctttccataatcaaaggcgccctatcgaacgtccaaggacttccctcaatgactctctctatatccacctcatggtaaaactggaaaagaaagaggtttggatcgagctctttcacatacagaccacgtcctggctgccatagagtcgcaatcttgttttgcattgcttgaaaatcaatagatctattagttagaaaccgccccaccaaaagccatcgatcatcgatttctgcaagcccatcctcccctgcctcaaacaacaatccctcctcatcctcatcatcaatcgtaaacccagcgtagtcctctgataaattctgaaaccttgtctgactgttgctcattgtacacaaaagaaacgataaaaactcacagaattggaacaaaacaaaacaacacttttctcactgaataaccatgtcaatatgacaagactgcatgacttattagttgtatttctaactttcctttttaaatttcatgtcatttaataaattaaataataaaata

SEQ ID NO: 266504 - DNA, 790 bp, Cannabis indica
ttcccgaaccatataattcaacaattaaatattaataatattagaaagtacaaaagcagtaaagtagcgaagccattagcagagaccatgattccgatggaagcagcagcacaaataacttgccctaatcggagtactaagccactcccagaacctggtctccctaccaactgcttcatctcctcttatcgagctcagcaaaattatgaatatattaactaaaaaaccagtatgccctacgtcccagaccaatgccctaactgcaaccctagattttgagtatcaaaaccccaaattcctccattttcagccgaaatccccaagaaaagatctatggggctcaaatcagatagttgagtacagaacaaaggaaaaagaaaaaaataataataaatttactgagctagctagctttgttgtatgggtcatcttctaaataacaacaaattagggactaaaaagtaaataagaaaagttgtaattaatttgtacgtaaagtttagatttcggttgtactagaactgtctgtcgttagttactgtccgaaaaccttagtccatttctaaattatttgatagtttctatttaatttctgtggtgtgcagatggaagtatcatttgacaaaagttcaacaataattctattagctaaataaaggtttagtttggcaattttttaatcacaaaacaaaattaaaatatttgtttttaaaaaatacttttatttttcaattttaaaaacaaaaaataaaagtgtgttttgtaaagcttattttcatttttattttat

SEQ ID NO: 266505 - DNA, 815 bp, Cannabis indica
caacccacgaaatcttctctagtagatgtgaaatctgcctcttcttcaacaacagtcacaatcctcggctttagagacagaaaagccctcatcgccgcctccctatcctctacctccgctctcctaagcgttcccacacagttcacggccaccgcctcgtcatcctgaattcccagcctctctctcgtcagctcgcctagccgactcagctccgacacgacgttaaactcgaaaggaactcccataagcctcgcgaacttctccattctctggcttatctctttcatcacagacgatccggtaccgccgccgccagtggctgccgaggcggctgcggtgaccacgacggttagcttcagcttcggcgtctcgtcatttcgggtggccaaggcttcgaggagggtaggccattgagtgcaaagcgtgttgcttatgtcgattatgtgaagctttggttctccgtctaaggcctctaagattgctccattggacgccacgtgtccgaaggtggtccacggactcacctcctggaacttgagaattaaccttctagcgcagtcaaaagaacgtgtcttgtcggccactgacgtcagtgtcttgtagcagcggaggccggaatccgtggccttgcagaagagggcttgcaagaagtaagaccccaatttctgatcacaatcgccgtaaggggatgccaactcgttaagcatccaaagaaggttgtggatttttgtagaatccttatctgagatcgcttttgcacactccttgagaatccttggagcccatttcccggttgaggcggaaggccatggctc

SEQ ID NO: 266506 - DNA, 937 bp, Cannabis indica
agggcctgctccgcccaactcggctgaaattctctattttacgaacttttatttgtccccaagaagggagaaaaactcaaggatggttttttcaaacttcaggcccatcctgctaatgaaggtccggttccttacgattttcaaaagaatgttaaggaatatcgccatctatttttcttctcctccggcttcaaagccattgagcgcccggagttgctgactaaatgggtcagggttccccctatgcaccgcaccgcacctactcaacttttcccccagcacgccaaagtcttttccacctatgacaatgacgggttgaatgtaggggacttggtcgcgactgcacattgtaggtttcaaagagctagtcagtggatgaatttaacttgtctaaggttctctaccccaacattcgcaacttcaactctgagaaggcgctccaggatgacatcatcgcctccgctgaggaccgatacaagaagtacttctttaagagggaacaagagttggcctacatcaaggcctaggctgctgcagggagggcccttcggattgaagtcggaaaagagcagacgacctcccggcccaagtttccattcgcggtccctaacaccggggctccgtacgccggcactttcagagctggtaagtctccactgattgttcatcatgtccctttcattcaagattactctaaccgtaggccagtagagtttgatgaacgaattcataggtttaggattcccccttttcgatggggtgatcatgccaagggtttttatttttccaatcttggtcacttcttaggccggtcccgaatggggtccagtccacccgtacccattctcttggatcattctgcctatttatcttcccattggttcttcccctcggacaactttttaggggacgacgacaccagccttttaatgcatac

SEQ ID NO: 266507 - DNA, 1059 bp, Cannabis indica
aactacattgacatgttttagcagaaaaaatttcaagggatacgatacgatcattgtaatagttcaaggttataaaatttttaaatagcataattttattaatattttctaaaaagaaataagtaaaaatacaattcacttgagcttcatatttggcccctcctcggatttttgtctggttccgccactgcttatcacactaccaaataatgcctccgtaacatgtaacttattaaaaataccctcaatataatacaattgtagaaattgccccttttattaacttttgttaaagttaaccatttaattagtgatgtggcatttcagtaaatggtaaagtactgactctaatttaagaaagaaaaatgaactgacatttaattacaaatccttatatatatactaagtattaataagatacaatgcatgtttacttagagttgtattagagttactaatagaatgtttagaaagtcaaccaattcaattataacctaccaatctaatctcaaccgatccagtagaattggatatccaatcataactggatcagatcggatgtaaattttaaaaatctaatcggatcggatcggtcgttagatgggacatccgatccaatggataatcgaccaaaccgatccaattatcatccaatggtcatctaattatatttatgtatttttaaaatacatttataattttatatattttatatattttatttaaaaatatatattaattgatttgatatatacttaacgcatgagattaatgaaaaaatactttaaatttaaaatattaattttcatctttctaaaactaataaaattatcaatgtgtattgaataaattttatttttttagcaattttattatgagatcatgagaattaggttagactaaagtaatgtttattatgtatgttggattattaagttttaaattatatatttttatatatatttttctttttaatgaaatcaacttaaatggtagttgaaatagattggatggattcaatctaatccaatagaaaaccagtcaatgcatccattggtt

SEQ ID NO: 266508 - DNA, 831 bp, Cannabis indica
tccttcatcatatatttttttaatctactttatttatttattaagaggacaatggacatgatctctgattctctggcacatggagagtatgtaaaggatgtaggttattgtgtaccattattattcaataaataaataaattaataagagtagttagtacttagtatcttcccctgatcttcatgagactaattatctcacggtccaacttttcacaagcataatacaaacccgtgtccaagatctttgaacaattcactgcgtataaacatattttaagttaaatacgccaaaattgtttcctcaattaatactcatatttatatacatattttttttcttagtttacttgagcaatgcatatattatatatacacgatctctatgaaaatggcaccctaatttattgggtaaatgtctttttctccattcttttacactgagcaatgagcatggagaatttcattacccaaaaaacgccactaaccagaatacttcaatctcaagatagaatatgactttttaagctagcatagcataatactcatgaacagaaaataagtgaatgtgacatttttttgaatttgatattatttagtccatgaggttggtggccagttggagtgaatgagtgagtgagtggccacttcttttgacttactatactgctactgctgggtagctcgtgccacgtgctgcttgcatgtgcttttttacaggcttatgtaaccagtgaatggagactttggtgcgtagtgattttgatgatgttttccccttgggccatgctacatggagaatatgatgtcaaataataacttaattggctta

SEQ ID NO: 266509 - DNA, 753 bp, Cannabis indica
tgcacagaaggctatgccgaaaagtattacaataggaaggatgttcaacgagccatgcatgctaatactactcgaattccctataaatggactgcttgcaggtgatcattattatatcatatctttagtttatataaaatgtgaataaataatatggtttttgtttttcttaagaaaaaagcttttagaaaacaattcatttgatgagcaaatttttaagtgattagtatgactttctcttctctaatacattatcaaaaattttactttatttaacaaattttttatattataatattatccatcaagtttatttttaataagctaattaggattttgtcctgaactttgacatgtactaaattatgcctcttgaacttttctgatagttaaaaatctccctaaactattgtgactgttgttgaatttaaggacttttgtctaatttcattcaatttaactaattcagtgattgtccatgaactaaatcatgctcctcgtactttgatatctatcaaattatgtctctcgaactttgacatgtgtcaaatgatgcttcctgaactttcattcatggtagacttttcttactaaaattagacaaaagtttaatacaacagtctcaatagtttaggaaatttttttaacgatctttaaagttcagggaatatgatttagtacatgtcaaagttcagaacgcaaaaattctaattagcctttttaatatatcttatttattattgtaaaataaat

SEQ ID NO: 266510 - DNA, 1330 bp, Cannabis indica
atttatttatgtttacagagatacaagtaaacacaatatataaaaaaattatagctaaatactaaaacaaagaatttgtacatttaattaagcactatttatgaggtaaattttgaactatttaaactcatctatttgatatatttttttgatattttttttttaactcttaacgatttttctttacttctacaactattttacattggttattgtgattgctcttaataaatattgttcacgttccctttcttaccagatcaactttctgatagtttttgaaaaccggctaatagttttaattttaatttttctatataacaatgtacatcatatttatcaaacacatcccaataaatttttgagaagtactttagaataatttaacgaatcaaaaatgagttgttaacattttgttacttgtgtggctctcgtttattttatacgcgtgtaagtcaacaatttgaaccttgctttttgtatcgtaaattactgaatttttaaaacttcacagtaatattttaaataactaaactatacactgtcatgcaaaaatattaatattacaaatattcaattatcaaaaacacaaaaggagtacattggtaaacccctaaaaaaaccctaatacaatgtatattgtgtaccctatacggtgtaaatatttgtactactcattcttggcattccttaaagaaataaatttttgaagaagatgatttcaatgaagaagatcttagttcataagaagatagagaaaggagagacatcagactgactttactgcattttctctcactacaagaatatcacttttaccagcacagttcgctactgcgctggtaaaagtaacttttaccagcacatttcgcaaattgcgctggtaaagagatcaaagttttaccagcgtacatttgcagtggctaaaatctaacttttaccagcacatttacgcggttgggaaaagttttttttgccagcacttttcattttatgctggcaaaagttctaataccaacattgatttgccaacccccttttgccaacacatcataggtaaattctattttaccagcgcaataccaacttttgccagcacaaaaatgtgttggcaaaagtgacatttcttgtagtgtctgttggcattaaactcacttaatgtcaagtcagtagtttcacactacaaaaaattgtaatttttaatgataactttttagtcacaacatattttttttgtgattaaaagtcacaacaaaatgttacttgtgactaaaatatagtatttaattacaagttgtcactaatttagttttagtcacaacaaagtatt

SEQ ID NO: 266511 - DNA, 1503 bp, Cannabis indica
attattcttttgtataataataagaaacttttctatttgacaattatttaaatgcactttatattatgcttattttcacttataaaaataaaaatatgaaaaaagagtttatttttttgttgttgcaaatttcattcatttttttaggcattatttcaatttataaaaaagaaatttacattaggacctttgatattaaacaaaattaaaaatacaaaataaataaataaaaaataaaagaaagtaagaaaataaaaggcaaattagttgttgttgtgggcatgaaatattttgtgatgagctgttatatttcttggaagagatgatcatgtgattttctaatcataaataatgacatgacttgtttttggccatatatacacacatacatacccatgtgaatatatatatatatatatataaatatataatagaaaaaaaatatatattattgtggactgagatatgttggaattttatagtaaggtgatgtttggtttaacttaaaaaatttatgaaaattggtattaatttatataattaataggttcatgaattaatacttattatacatcacttttcattttatattttcatcaatgggtggaaaatggaaatattctatatgagttatttgttgtgatatttggagcgatagaagtattttatcttacaattttgttataatcgtatttttttttatcaactaaaaaacacgtgatgatatattatcagactatatattaaataagctaagaaaatatgtcactacatgtttttgagctgacactacttaacatgcttaattaacacttaacaactaaaaaatagttcaactgcaatcaaatcgtaagataaggtacttttattgtcattttttttttattagaattatatgtttaacaattataaatattgaggggtttcgctgcaaatatttctatttttttttattattttaaaccaagcaaagccttaataaaatattttaagagagattttaaatatgaaaagtatggcagaagtttcaaacgtatgtaataagtctttatgtcggtttgatgtgttctgtttttatatattttatttatttgtttctgtttaaacttgtataattaaaactcatttaaataaataaataaataatccatgcatggaccactctaaatataaaatattgaaattaaattgttattaattaaatgggaataattccaggctcatacgttaactttattagctgcatatttaattaattaaatttgtactttacaaaaaaattaattagttaatttagtaaaaaaaaaaaaaaaataggactttgatatgtatcaataagaccgttaaaaattcttcataaactattgggattattagatttaaagatttttgtttaattttaataagaaaaatttaatatggatgaaacttcagagagtataatttagtatatgttaaagtttaaagacataatttggtagatattaaaatttggggagcatg

SEQ ID NO: 266512 - DNA, 775 bp, Cannabis indica
aatattttaatatataaccttttgtaggatataatttttgtttttttttttttaaatctattaacaaataaaatgataagtagatactaaaaaaaaaataactcgaatacttaaaaataaaattaataattttaattttgattagctcttattactagaacatttaattattttgttttctaacttgttggttaacaaaatattaaaaaacaccgaaataaaaacaaatttgtgagtttcttaattttgtggttagaaatgagtttaatgtgagtgaacaagaataaatgaaatatatttttatttttttaaaaagaatagactcatagtacaattaataaacatttcttgtttgccttattactagggctgcacatgagttgggttgggcagtttttgggcggtttggcggttttttaaatcacaacccatacctccccaataaaagtttgggttgggcggttttttaggggcagttttatacgcttttttgggcggtttgggttgcttaaaaatcaaaacttcctaagtatattgtcacaagaaaaaaaatatttaactaaaaatttatacctgttaataacaatgcataaaagtccttaaaaaattcatatcaatctttataaactccataacaaggcataataataatccatgaaaatttcgtaacaattcttataaagtccatactactccataacaatctagaaaaggtccttaaaaagtccatacaagttcataacaatccaaaaaaaagtccataatttaagtccat

SEQ ID NO: 266513 - DNA, 450 bp, Cannabis indica
tgataactgggtcaggaacgttctcgacaaagtatgactaactatgaatccagcctgtaatcagtactctagtcatactgatgtggtagtagttaattcatactatcggaaatcctagcatatatctgttagcatctcggtgcaactctatgtacacctcactaataccctgatatgctaatctgttagctattgatttgtctaacatatatctgttggcatctcagtgcaactctatgtacatctcactaatacaagcacactaaacatttatacatatatggaactattatactagtcttatctttattccaaatgcaagcgtgttggtaactctaagtggaaactgctactcgacaattaaaggccatttgatcttcctctccaccaaccttgctaagaattctaatttttggtctgaaaatgatgaggaaatccttgttttccctt

SEQ ID NO: 266514 - DNA, 4120 bp, Cannabis indica
ttcaaaataaatgtatacttttcaagcaaaatcattatgcaatctattgtattgcactatgtcattcttaaattttgtaatatttttatttttatatattataattaaccacacatatgtaaactttacaatattattatatgttaaccaaatgaataatcaaatttataatatactaactatatgatgagctaatgaagagcattggaaaaaaagataaaacaataattttttaaaagaaagaataatttttttatgttagcatgtgcaaagtttgtgcattttgataaagtagaagacttaaattagtaaattaaaagataatagtttacctaaacaataaattttcaattttttaaagatgaaaagaaaaatggttaataatttctgacaaatgaatcaatttgaccaaaagtgttgggtggtgaatggtgatggggtatggtatgatacttatgtaaaatgttttgttgttttttaacacaattatttcgttttctcgtaacttggtcggttgtccttacagttaacataaagatatatcattgagtattgtcttttatctccattgagtcgctgcaagttcgaatcacgggtcatcaagaagaaaaggttttgacttgccaattgcctctgtaatctgtatcccagcaaaaagatcaaaactttccaagaaatggtttgagaagaggcacataaagagtatctgccatctggggttgctttgtttacagagattgaggttttttccaagtgggtttttgttgtaatggaaggaggagataggattgaagagagtagtagtgtaaggttattgagccgtaggcctagtgggagtagtggtggtggtggtggtggaagtgagtcaaggtgggtagatggaagtgaagtagattcacagtcacctccttggtctcttgttgatggtaatgaagggcgagaaggatttggaactttgagaaggagacttgctaagaagcccaagagagttgattcatttgatgttgaagccatggaaatttctggagctcatggtcaccacgccaaggtaataatttccacttttgtttgatgttatttggagaaaccaatatcatggtcgtttggggttgtttttgttttcatatgatgaatctaatttatggacagcttaaggttttgtaatgttgaataaattagagtatatggttcagttactcttgactattatgaagttttaacttttaagtgcttttattatgattgaggatttagcttttgagaagtcaactgaaaagttctttgattgaatatctctgataaatgaagcaattttgagtagactgaattagtatgtaaactttcaggaaggaagaattctaaaatcctaatctaggaatatgatcaaacaatttatttatgctcatccaaaacaaaacaatatcatcctatttaaggcaacaaaaacaaaataagagaaacattgttaccttgtgatgatgaccatgaattctcatgcttctccttgtgctcatcacatatcttcaacaacctacattcaaagaagacaagaatgcaagaagtgtccatggacactactgtcccttttctctccaaaccacccgtatgccatattcctcacacacactaagagtgtagtcaaattcccataccgaaagtgagagagaaatggcttggccaaaatttgttgagaacacatgttagtatgttatatctatcctattatgacccaatgctaataccatgcaataccaattatatagttatctttgtatgctaatatcaacaatgagtaagctactcttaattatgttagtccaaataaatattctaacagttagtactttataaatgtatataatagtataacaacataaaagttctactttacttcccactgatattttggaaggaagcagctcaaacataaaagcttaccatttactaaactgtttaagctgaaattccaagcattcattatttcatttgttggaaaatcaagttctaggatatgctgcagtgaatcaaacaatgacaatttcaactgacatttcaaagctttattacctcaatgacacaggaaatttcaacatggcaaactgttgctttagcattccaaactcttggagtggtatatggtgacatgggcacaagccctttgtatgtctttgccgatgtctttagcaaggtaaaaattgactcagatgttgatgttttgggggctttgtcactagttatgtatacaattgctctcataccactggcaaaatatgtcttcgtcgttcttaaagccaatgataacggggaaggtcagtattatctctaatatctattggttaaaatccatctgaccaatcatgtacatactgacatttttcatggttccaataataggaggaacatttgcactgtattcactgatttgcaggtatgcaaaggtaaatatgcttccaaatcgtcaaccagctgatgaacaaatctcgagttttaagctgaaactgcctacaccagagttggaaagggctttgactataaaagaggctttggaaaggaaatcatccttgaaaatccttctcttgctgcttgttctgacaggaacttccatgattataggagatggaatactaaccccagcaatgtcaggtgcttaattggatattgtgttatttgcaacttgtaaatataggggtgcaatgcaacagtgcctacctaaaatattctggacttgcctcttttttggatcaggaaatgctgacacaaaatttaaaccggtagaaagatttgtttactgtaactaaaatattgtagctttaccataactaaggtttaagtctcacttgtggcttgtgggtttgtgttaggatcccacattgaccaagtataggactacttgggtaccctcctctcttaggctagcttttgggaatgagttctacccaaatggttgtatcaagtagtattagagccatgcacccttaagtgggttcgacttcttgggcatcctctcttaggctagcttttgggagtgagttctacccaagtggttgtatcactttgtcaacaaagctggtctaagaaattgctgcagttcttttatcataaaatatgttattattcatgattaaagagggcatataactccatcaaaaacaggctttatgaattatattcttctgcagcccaagcattgatatgcaatatcgtttttgtttgaatatggtctggtgctatcatttaacatcagagatttgtaataacaaattatttcctcttttatgacagtgatgtctgctgtgagtggtttgaaaggtcaagtacaaggctttggtacaagtgtgtatcttttcctttcactatctgaggttcattttcattcatttcctatgggcaacacctaacaaatacatactaaaacaccattcatgttcatatgattttacttacagatgctgtggttggggtttcaatattcattctgatcgcattattcagcatacagagttttgggactgctaaagtcggtttcttgtttgcgcctgtactagctttgtggttcttcagtcttggttgtattggggtttacaatcttttcaagtatgatatcacagtcgtgagagcacttaatcctatgtatatctttctcttcttcaaaaagaacagcagccaagcctggtcagctcttggcggttgtgttctgtgcattacaggttagtttcatgtacattgttgctctgtatcttaacatctaatgctcttaaaatcatcatttacttaacatgagcaaacataagtctttgtttgagattatttatagctatggagctatattaaaagggctactactatttttagccttgagtttggtacaatgctgaatagagttttccttttccctttgaagcaaacaataaagctcgtttatgatgtgttaaagtataaaagtatctgacccaaaacgagtagctcaaatggtcagacatgtggtttgcaatccctcctaagtacctacatagcaattgctatagtttcctggtctccccagataatgtagggttaggcgggaatcctagtttaaaaaaagaaagtacaaaattagtttggtgggtctaattacaaaccc

SEQ ID NO: 266515 - DNA, 1992 bp, Cannabis indica
attggtgttcaatgatgattaagtggaacatgaatgttgtctttaaaatgacataatgatgttaccagttagaggatttttctgattttcttttggtggcgtgctaggttgcttctttgctttaaaggtatggaatgctcaacaggcaggagctgcagcagttttagtagctgatgatagggaagagcctctaataactatggattcacccgaggagagcaccgatgctgatgggtatattgagaagatcaacattccatcagctctgatagagaaatcatttggggataggctgaaggagggtttgaaaaacaatgaggatgtcgtggtgaaattggattggagagagtcagtgccccaccctgatgagagagttgagtatgagttttggacaaacagcaatgatgagtgtggtgctcgttgcgatgaacaaatggattttgttaagaactttaagggtcatgctcaaattctggataggggaggttacacaatgtttactccacattacattacttggttctgccctcaggccttcattcttagcagtcaatgcaagtctcagtgcataaaccatggaagatattgtgcaccagacccagaaaaggattttgaagaaggatatcaagggaaggatgtggtgattgaaaacttaaggcaactttgtgtgcatagagttgccaatgaaagcagccgttcttgggtttggtgggatttcgttactgactttcatatcaggtgctccatgaaacagaaaagatacagtaaagaatgtgctgaggatgtaatgcaaactctaggtaaatgctaaggttcaaggttcctgtctatcttttctttttaattgtatataactagtaattggtttaatcttattaatgcagatttacctattgagaagattaagaaatgtatgggtgatcccgaagctgatgttgataatgatgtgcttaaaattgagcaagcagtccaggtcatatctcaatacctcttctaactcataaccatagcctgccatcctaataccattttaaatgtgaacatgtttaaaagtagagatgtgccaatagattacccttggttatataattcaattgagttaaaccatcaagtacctttcatctcactctcagttatgtaatgcttattatattcaggttgggcgaggatctcgtggtgatgttaccatcttgccaacaatggttatcaacaatgttcagtatcgaggtatgttaccagtaaatctgtttcatactgtctagtgtttattacttgaccttcatcgccataacctaacatctaaacttcaacttttacaatctaatttaatttcatcgaacacctgccaccttaagcctaagcttgaaatttcaatgtcctgttgactgaccctcatgtcgggtcatcctcaccattataacttcatatcttttcatcttcacttccttatctctgtttgaataattaatattctttagctttataccttctcactgtttatgattttttctctttacaaaattttccagtttggaatctttgttttactcaattttcaattcaactctctccaatacatatttgctgccaagttataatataatatgagatgattcttaagctcttgattttttttcctttgaagggaaactggagaggacatctgttctaaaggctgtatgtgctggatttaaggagggaactgaacctccagtttgtttaaatggaggttgatatataatttcgggcatgcaatctttttgcagtgttgtttttacatgtggaaaatgtactgattctttttctcttgttcattctcctttaatttattcaaacagatcttgagacaaatgagtgtcttgaaaggaatggtggctgttggcgtaacaagcactctaatattactgcatgcaaggtaaagataaagattttaaatttattgttagaattaaaaataagttgcatctttaattatttatttgtttttgcttt

SEQ ID NO: 266516 - DNA, 4681 bp, Cannabis indica
ttttggacattctagttctttgaattttcctttgagatgtttgatttgttgtctcaacttagtagttttacttttgctttaggtctgtaggatgtttatcttggcaatacagtcttgaatgcttacatacctgtttgtccatgtgagaatttattcatttaaatgagagaactctaatccttgatagttttgcttaaattctgtcaaaatctgaatgttggtcagtgtgtgtttctgatatgttcatatacttttttttataaaaaaaatctaaattttgtacaaatattcttttcaatgcaattttgatttgagttttgtgtagtacttattttatgctacaattatttgtaacgtgaatttgttattcaatagttttctttgtcatgttttgtgtgtggaatgaagtgaaatccattattttaatgagtattggattgtattgacatcaggtacactggaagtggagtcaaagaatcacacgtttgttgattcagtgcttagaatcttctgagtacatggaaatccgaaattctctcatactgttgacaaagatctccggtgttttcccagtcactcgaaagagtggaattaaccttgaaaaaacgggttgtagtgttttgctcctttttgttttttatttctatttgatgtgaaggtgttgtgtgaggtggctctaattgtgctggcattacattgtatgatgcaggtaagtaagatcaaaagtgatgagagagaagatctcaaggtgttggcaacaggtgttgctgctgctttagctgctagaaaggtgtgtttcgtttcgattcgtttactttattattattactgcattcttgattgcttaaaaagtaaggttagtggcactaagttctctttcactttgcagccttcatgggttacagatgaagaatttggcatgggataccttgagttaaagcctgcaccatcagttgctgcaaagtcaacaattggtaattttttagccataaaaagtgcttctgctattaatttgtctcaaaatgaatatgttggaagtaaaaacaaatgtttctgattcttctaattcagtcagagatcagatgatgaaaacaagaactgttgatgggagaacagaaagacaagaaaatgcttcaaacataaaatctgattcaggaattgtaaagctcaaaggtagctcgttagtaaacgggacagatgctcagtcatcaatgcctttggctggtttatcatcggggacatctagatcacttgaaaatcataaactagccgaggattccacgaatagagacgaaattatagcaaaagtcaccccaaagaccagtgcggaacctgaggtagcattttagttttttgtactggcattacttgtactttatttcataatctagcatattaggaaaccataagtctactagtatgaatgtattttatttatgttcaattgttatgtccagtgttaatcagctgtgctgcacctgaattgttcgcaaaagaactaaatcaaagaaaatgcggggcctaatttagcgcatttgaatcaagacatctttttataatttttaataataattaaaatgtcagtttgatatcgcatttttgatgtgttatattatatatttaagaaaagaatctgtttctttttgataacagcataaaatattggtggagcctaggaacttgaaatcattaatgaagaaagaaaaaaaaaagtgtactttctctgtttctcatgtgaacttttgcttcatacttttgataggtgagaactcaaacaaagcggactgtgcaagcaggatcacttgtgaagccagtgaagcaagatcttacaaaagaagatggtagatctggaaaatctgttgggagagctttaggttcttcaactagtgacagagatatcacatctcatacatcagatggaaggctgggtggggctactaatgtttcttcttcagtctccgtcaatggaaacacagtttctgcttcaactaaagcctcagtttcatctacaagagcatcggatattcatagtagtgacttaaagcaagagagtgcagctgctaaggcttctgattctaggatctctgcattaaaggacgatggtgctgaagcctcggatgctccacgacacacctcgtcacggcctgtgcattctcccaggcatgattcgtctactgcttctaaatccagtgataaactgcaaaagagaactagtccttctgaagaagctgacaggctaaataaaaggcggaagggggagagtgaagtgagggattttgaaggtgatgttagacaccctgatcgtgagaggtctgtcgatgctcgatttggggatcccgataagtttggagctgatgaacaaagtgttcatagagccactgataaacttttagatcggtcaaaagataaggccagtgaaaggcatgacaaggattataaggaaagatccgagcgatcagataagtctcgtggagatgatttagttgagaaacccagagacaggtcaatggaaagatatagtagggagcgttctgttgagaggggtcaagagaggaacaatgatagaaattttgatagactttctgagaaagccaaggaggataggagtaaagcacgttacaatgatacatctgtagaaaagtctcatgctgatgacaggtttcacgggcaaaacttgcctccaccgccacccttgcctcctcacatgattccccaatctcttactgctggtagaagagatgaagatgctgataggaagtttggaactacaagacactcacaaaggctttctcctagacatgaagagaaggaacgaagacgatctgaggaatccatgctttctcaagatgatgcaaagcgtaggagggaggatgattttagagatagaaagagggaagatcgagaagggatatctatgaaggtatgtggcagcatttcaattctcttttgtacaatgcttttgttagttagattccgatgaatgcattgttttagaataaactcatcaggagattgaattgtctcatacaattagagttcatttggtatattgtattacaccgtattatattatatagtattttatgcaatatttttatgtaaaactatgtggtattgatttttataggcatctaaatatatagtatttttgtataaattaaaatgtaacaatattatataaaaatataatgtataatccaattaaatataatataatatactacaatacaatctaataaggtgtattaaacgagcctttactgttttcatattgattcttgggatacatttttcatttatgtggtgcactataattcttgtaatttctaaaaaatagattactagaaactactgtattaaattgctggctgtttgtgtaggtggaggacagggatagagaaagggagagagaaagagagaaggcaaacctttcgaaggaggaaattgaggcaaatgcagcttctaaaaggcggaaactaaaaagggaccatctgcaatcagcagaagctggtgagtatttaccggttggtccaccacctcctgctagtgtcaatatatcacaatcatttgatgggagagataggggagatcggaagggggctgtgatccagcgtgctggttacttggaagacccagtttaagagttcatggtaaagaaatggccagcaagatgactcgtcgcgacattgacccgtatccttaaaaaagtttttctcattacatatcacagcatattatcatatttattaatctgtttttattttagtgaagacactaaatctgagcttttgcgctagctgtcgtccttaacaatctcttatagaatatatgaccgtgaatgggatgacgagaagaggcaaagagctgagcaaaaacgaaggcatcgaaagtagggttggtaaaagcttgacctgtgctgcatttttggtgtaatttattcatctatttgtgcttctcaatctcatgtcatgtgttgtaatagatctttttcttgtaagaaattttggtgttattcatccttaaaaagaagtccatttattggctataaatagtatagtttatagtggttaaaacacatgtacagtactgtaatttgttgcatcaaattattataatttattttccatgctcggctttgtacatcatgggatgagaagaatgtccccattaaaaatgcttcatttagagattgcaaacaaactagtgctgtgctgcccttaacattgtgtttttatacaagtgtacatgaattttggtctttgctcatgttttgtaattttcaacacttttcttttttaacagcttacaaagatttagtaaataaacaaatagtccatcttgatcttatgagttagtcaactattgtagtaatatgtggctcatttcttgatatatgtgcacacacaaatgatgcaagttttttctaacttcgaaaaataacaattttttctaaggtcacctttttttgtaaatgagtttgaagtgttattagttcaaatcataattttattttttaaaaactaatacaaataaattgttttaaaatgttcattttttttttcttcttcatctccaccccaatctcaccctaaacttactactttccctctatctcctcagatttcactcacctagtataggtaatcttgaagaagatgaaaagaaaaaaatagtaattttt

SEQ ID NO: 266517 - DNA, 4469 bp, Cannabis indica
aaaaaaaaaaaaaagttatagcttatagcataaagatcttggttcgaatatgacctctctcttttcctattcctctctcaccactatagctgtcttggtattaatctttcttatttatttatgaaaaatgccatttatagaccatcatctattttatattaaataataaaataaactatgtattttttaaaattatacaaataaaactatgaactaattttttgtcaaaataaaacttaaataataatctaatctacaaatattatgacaaaactaattatattttctgtatcgtcgtaaagttagttatctcaaaaaataaaattattcaaaattgaactcaaagtcctatttttatcatttaataaaataaaaaattcaattaataacttttacaaaatgtcaaaatagtatttacctttatttatttatttgagaaagttttaacattaatcttattagaactcttgctcataaacaaatatgcatcccttatttttgtggcgatttgttgatttttatatggggaaagggaataataataaactttcccatcaactaattttaacttaagaaagaaaaaaaattatatatttccaaattattgtttctagatagataggatgaggaagagatctaatttcataattgcaagaaaatagatgctaactaatttcacaatagcaataattaaagatgaagaaaaatcaagacagaagaagaaagctcactcatacaacacaccatcatttccttcctagaagaaacacaaagaccaaaccaaacttacaaacatccagccaaagttaatccccacattgccagaaatatcttatgtgggaggagttgaataaacaagcacagttgatggctaacctctaaaccattcccatcttatctccccaattttaatgcctctttgtgttacatgacatcatccagtggtattccgtagtttctattgcttacgcttgtcgactgtcgtttgctgcagaactgccactggtacttccaccaacacggttcggttctccaactctggcagccagtgcaagaacttcaggtgacatttcccagcttccactttttcttccccaactcgatcgccttgggtgtccaccgcgctctgcaccatcatctactgtagtccttacatcaggggacacttcacctaactcaccttcctttacattcaccctctcgttgttgttgttgttgttaagttgtccctcgaaatgatcagccccagctcccatgtctccccatactgtttttcttcccatttctatgtcatccacggcttttcccatgtttggactcataaaacccccacccccagatcgaccaggaggaaaccctgcttcccttggaaccattgccctgaaatggtttttggatggaggggtgctggtgcagaatatctccttgaagttatcaacaactcctttgttgtacgggttggctcttctatcataccgatatcggaaattctcataggtagtctgcaaaagcaaatgcatgtcactagaaaaatttaaagtttcagcaaatataaagctacaatgtttgacaaggataagtctctcacctgatttgtgctgatgagatataaatggaaagctgtaagaccaccaacaaaccacatggatatgaaagtgtaaatgattagcacaatggatgctggagtttttatcattgctttccaaattgttatgtcttctccctccataattctccttatgtagacccagcagaatgcaaatacatatatacaaagaagggtcgttgagaagacaaacatgaagaagaatctataatttcgctgcaaccaaattaatgattgtttagattaggcttcactccatgtcacaaatacaatattcaaaaaatgataaatggcaccaaataaagttgtaactctaaaaattttcctttacaagcatgcctaacataaaattcagaaaaagatctcaggcgaaacaaagaactttttgatgttctagattcaatccatgatattaattggagaaataatcatcttcaatagaggcatattgctaccatttcataaaaatctagtagcactcacacacaaatactaatgtaattatttcattgcaagagcagtctaggtagcataacataattctacataaagaagcacataccagccctatacactgcccaacccaagggcaatggtggtcaaatcgttctacacagttattgcatattgagcagtgagagcagcgaggaggtcggtatagcatacaagtgtcacaatacttgatcttaacagtcattccattgacctctacttccttgacccgaggcagccgtagttgtggagtttgtccagccccaacatccatactcccatcatagccttctggctcaggagggtgagcattgcggggaataataccaggatctcttccagaagttaggaggagaagaactaatacctgaaaccagaacatactaattatcttattaatctatctgctggcaacagttattggaactaaatgttacaaggtacaaagaggaagcttattgagaacaatgacaatatattctaagaactgagaatcaaaaccaattcacaaatgtaataaactgaatccttaatataataaataccatcagccatgcctaaagtcacattatatataaagtggattaatttgataagcaaactacgatcatgacatcattaagcaaaaccagctccataaacataattactcattgggacatttcatgatgggcaatacacacgcacatttagcaagggaaaacgggaatacttacatataaagtgaatagaacagcaacaaccattactgatagtccccagtgatgaccccagtcatccatgagatttttggcgacaaagatgcagaaaatcgtgacaggagcaacaatgagaaagatggtcaagcccaatgatctcacatcaggaccaaagataaaccttaccttgaagaaaaaatttctgccaataaataataaataataattaaaaaaaaaaagaagaagcataggaatccttagtaaaaaaccataaaaccacatgtcattatcatttccataactgcaaagaacaatcattgagaaacatcactttacttctaaaatgggagctaattatcgataacaaaaaacccagtaaatatttgaaccaaaaggaaaaaagcaataacaaactcacattgctgcctttccaagcttgataaaccctcaaatcaccggaaccaaaggcggatccggagcccggatccgaacgctgaggcggaggcaccacatacatttctacacctttggttctcacaaacccacaaaagaaaatccacactcaaaaatatcttcaaattcccaaccttttaattggatcctcgagattcaaacaatccaaaaccccaccccctccccccaaaaaatgaagctttaacaaaaaagaaaatacatcgacgaaacgcgccgcgcgtccgtccctttcgaccgccagcccaattgggtatcctgttcaagctcggcggcggtggtgcggtggctatggcttacaacgacgaagagagagagagatagagagagaaagggtttcctcttttgcttgagagggttagtttctagagagagaaagagatatgctaagactgtgatgggtttggggattaagttttatgcccgtgctttacagggatgtaaaatatgacgtggcgtgatatgattggactgtgggactgagaatgtacctgtagtggtgggcgaagccctttctccccaaaacccaaacagagaatgtgagtgaggagccctcagctgagctctctgccctggacttgtccccatctaattctttgccctttttctcatgtgaaattaccataatatccttaaccctctttagcttttgttgtattaaattaaaaaaacacttttctttatccttaaataatacttttctttgaaaacttgctttacttgacttaagatctttatttttgcttatataattgtccaaaatctttgagcttgccatatataattaagtgattatcttggcaaaaatgaaaaattaaatttagaaagattcacaatagaagtaggtccctccaaaagaatacataatgtattgtgacttgtaatttgattgaaagtcatctttttgttttgttttttttttttcttttttggtctctttttgatattatacatatttattttgaaagacttcattttatactaatttttatatatcatattaaattaaactaaactaatagttaaattttaaatacaaattccatgtatataaaaatttagtattttcttagaaattatattcatatactattttttaacttttttttaaatttataatttgggttactttgatgatttctaaatgaattttggttgcgatttaaattgttctattaattgctatgtaaattttcgtaaaa

SEQ ID NO: 266518 - DNA, 1712 bp, Cannabis indica
ataccagaaagttcatgcacagaagacgtcatgacgccaccaagtgcacagaatccccgatatctgacagaattagaactaaaatcaccatatagataccaaaataacaaggaaatgcaataatatccaagtcattcataaataatcataattcaaaaggcagtcttcaattagtaacagtagaaatataaaagagctatattctgacttacaaaaacataaagaggattaaaatgcaaagcagcaccaacatgtctcggtagatgaatttatcacaatatagatcaatctagactcttatgagttctttaaaatgcaacaagttaagatcttcaattaataacaagtaacaaggtaccattgcaaaatctagtcatcataaactgaattgtttagagccatgcatttgtggtatctaatatgagaccatcaaaacattagtggccacttggaaatgattctaaagcctctcataatccactttattaaacttaaaaacgtaaaccatggaaaattgattgggtggggcagacttaaatacagtttcatattaaataaaggagttccaatgagacattaaggataattggaatgaacttgagttagtgacacacagttataaacttaaactctaccataactggtagccttttttcaaaagctacatcaatccctaactagctctgataatttaaaaacttgaaaatatttagatagcgttgaatacccaattgctcactctttgaatttcgtaacatcaggaagcttttgctaacttcaactcccaaatcgcatcccaattcccaagtttccaacttcaacaacatcataaacgttacagaaccaactgacccataataaaattatcgtaacccaaatcaattaaaccccaaaattcaaataaattaactcatcaaaaacaccacaaattcacgcaaaccccaaaatctaactcaataagccaacaaaaaacacgaaaattttcaacccaagctacaattaaaaacacaaattgcccccccaaaacctgacattaaattcaaaattctcacaacaaactcgaaacaaaagtacaactcaccaataattgacacagaaaatgaagacaaacaaagaagaaacccaattaaaccccttttctacactgtctaacaacaaaattctatgcaaagctagggtttcaaaggaattgaaaaatttaccctatttcgctgttcttctcctcctcctcttccttcgactccctcttagtttggttttgtttggctcgtttctcagaaaataaaattcgggctttaaaaaaatttcttagttaaattttctcgagaaaattttaactctaaaattggaattttctgagttttaaccactgctcttgatacttctctaatttctccactcataaaatctcaatccaccaattttattattgaattttttttgacatgattgaattattattattattattattattattattatattctcgtttttactgtttcgttgaattttcttaattaattaatataataataatacgtgttgattggattataaaaagaggatgaatctggaccgttaaaagatagtaactgttacgggcaggggaatgagctgaccgcgtggctaatctcctccacaaaatgagtgggtcacccaaagtggctggatgagattgaaggtggctgatgaccgaattgtctgaggat

SEQ ID NO: 266519 - DNA, 3092 bp, Cannabis indica
agtataattacatcttatataattattggtattttaaataagtgcacacacgtggcgtccctgttggacagggcgttacactagtgattaaaatccattgtgagtttttttttttgatgaataagaatcattatattgctcaacctccaattacatacaccaatttcatacatcaactacacttcaaacatttacataacccctgaatttcctacctattgtgtacatcttcccatgaaccattctctatctatagctttagcctttttgggcattacatgacatattctatattgcaaatctattttgattttctgtacagtattccgaatacaccataccttttgattccaaagagcatcatttcggaccctccatatatggtaagccatggcagcaagagcagcatgaaaaatactcttccgagttgcagataacttcgatttatctgtccatttagctagctgcagcaaactgtttgtcgatgttttccattccagccaatctttaacactttgtacacacatgttgctgtaatgacaagtaaagaagaggtgttccaatgtttcggatccattactacacaataaacaagtctcatctaccaagggattgaacttttgtatttgctcttttgttctgagtttttgcaacattatcaaccataaaatcaccctgtgtttcggtatagtctgcctattccaaactagcttactccagtttacatccacatgtttgttaaacaatagatcaataccagtgttgatatcatacctcaaagccgcaaaggtttgttgatcaatcttggttgtgagggtgttcttgactgctacaattctcttccagtaccagctgcaatcaattggtggctggtactcccaccaattcttccccatcaaatatacttcattgatccatttgacaaataaattgtcttttttggtggcaattgcccaaacatatttccccattgctgcagtattccaatcatgaatgtttcgaaatcctagtcccccagccttctttggtgcacatatctgttgccatgctactaatccaggacctgagttggttgtcatgcctttccaaagaaacgctctacacatgctctctacatcctttagcaatttcttgggcaatattgtgatttgagcccaatatgagtgaatagtaattaacaccgagttgatgagtgttattctccccatataggacaagttcctcgaactccaaactttaatgcgtgccaccatcttctcaaggatactattacagtcagctggagatattttcttggagcaaattggaataccaaggtacctaaatggaagattggcccttgaataccctgatacttctagcactcttttgacctcttcatttttcattccactacaaaacactgctgtttttttcttcatttggctctaaacccgaagtggaagagaagagctttaacccttgtagcataaagagaatggatacataatcaccatggcagaatagtaataggtcgtcagcaaaacacagatgattaagctttaaagtagtacacctatcatgatgtttaaatccaggccgagtgctcacaactctcatgattctcgacatgtattccatgccaagaacaaataagagaggagacatcggatctccctgtctcaatccccttttagattcaaaaaatccatgcaattcaccattaatcagtaaggagaatttcggggttttgacacataccatgataagctcaatgaactgttgcggaaagtggaaggcagttagcatttcttcaagaaagttccaatcaactgtgtcatacgctttcctcaagtcgattttgatcatgcagcttggtttacagttcttcctcccataatgtctcacaatatcttggcacactagaatattatgagcaatgtatctcccatgaacaaatccactctggttatcagctatgatctcaggcagaattcttctcaatcttgaacaaataacctttgtagcagccttataaatcacattgcaacatgaaattggccggtagtccttcacactatctgggcatttgcttttaggaattaatgtaatggttgttgcattaatttctttaagcaatttcccagtgtttaggaaactaatcactgcatcctccacttcagttcccactaaatcccagttatcatgataaaatgcactaccgtatccatctgggccaggagccttcaaactcgggatagcaaaaattgcatctttaacctcaagtctagtatacggttgattcaagatgtgcttgtgttcctctgagagtaatggaccagtcgccatcacagttttgctcaccctcttccgatttctcattgtgctccccaatagcttctcataatactggagaaaagctttttgaacttctctcggatcttctaccctggtgccttcttcatttttaattgcattaattctgttttgagctcttctacttttcagtgcagcatgaaagaagctagtgttttcatctccacttttagcccaattgagtttggccttttgagctaaaaattgaagatgagccttgttgaaatgagaatgtttctccctagccgattgctctttggttataagatctccattggttggatcttgatgtaaagcctcctgtatttccatcaattcttgctttgttgtggctgatattttttgtacctcattatacccttctcggttgattaccttgaatatccctttgagcttttttaacttctggaccacctgaaacatttttgtgcctgtagtagcttgctgccaacaatcccgaactttattcttgtaatctagagccgatttccacatactaaaatacctgaatggtttcttgccagagcatgcttccttataaaaggatattagtatgggacaatgatcaaactccccttcaggtagaaacaccacttctgaatttagatatgcatccgtccacctagagttcaccatagctctatctattttagagtacgttctgtcttcaggattctgcttattgttccaagtaaaaaaacaaccagaagatttaaacaagtaatggattgtcaaga

SEQ ID NO: 266520 - DNA, 1823 bp, Cannabis indica
atagtatttaatataaaattatttattacaaaaaaaattattatttaaatatgtatatatatgttagtgataataatattgttattgatgcagtccgtattaaaacagacaaaagtatgtataagtgacaataaatcaagtcactgatgtttattttcaatgacgacaaatcaagttatcactgatagtggtttttagccacaaagcatcagtgacgacttgtcactgctaatgctcatcaatgacaaaaaatgcacctttcagtgacaagttttgtcctcactaatactcatttttatgtaatgtaaataattacaatgtacacccttaaataaaaacattataatttttctacgtattaaaaacagaaatgttcctactgccaatggtcacaaaacacaccttaacaaacaaaaaattcaatatttgggagtgttgattaaggagcataaatttgattatttattacttggaacatacatatttataacacttgagtacacaagttttcgaaaataaaaacagagtacacaaagaataataaaacaaagaaataaaaattaggatgcaagaaactcattgtttacccttaattattacaattcataaccagtcgtacttaaaaatgactttcgacttcaatataagaatcgtgggcacgtaatattatatcatcttaaaatgtatttagatttagtgtgggatagttagctcctcttcatatatgaccggttgttaaattggttaattaaaagttaaaacaaactgaaaataaataaataattgagcaaaaagaaagaaaagaggaagaagaaaaacaaagaaaaggaaaagggaacaacatagctatcattaaaaagtagacaatgatgggtttcgaatcatgtaaaaacatgcagaccaatgcccaccataaccaaagcaaacaataacccatttaataaataataagataagaatatgaatatcaaacccacacccaactaactccttaatttcttctgtcactctctataaattaaaaacttctccttaactgtctctactcacaacaacaccaaatatctaagcaaagatgcaaaaacaactattgcaatgcctcttcttcttcctcctatcactttctttcttttcttcattttcatctcttgctttttccctgaatcaaaacagacaattcaatgaagccaagaactatgaaggttcttctgacctagtggacctccggtaccatatgggtccagtccttgcttcacccatgaacctctatataatatggtatggacattggaatccaacacaccaatccaccataagagacttcatctactcactctcatcatctcaggctccttatccttctgtctccgactggtggcgaactgtccggttctacaccgaccaaaccggctccaacataaccggtaacatcatcctatctggagaatcgtttgactcaagctactcccatggaagttacctaagtcgtcttgatatccaatccataatcaacactgcagtcaccaattcaaaccatagagctcttccactcaacccacacaatggtctttaccttgtcctaacctcttcagatgtccgagtccaagatttttgcagggcagtttgtggtttccattacttcaccttccccactatagttggggtgactgtgccctatgcatgggtgggctacagcggttcacagtgccctggaatgtgtgcctacccatttgcttggcctgactactcgaaaatgccacctcccggggctggaggagtcggtggtggcaacgtgatgcacccaccaaatggggatgccggtg

SEQ ID NO: 266521 - DNA, 2624 bp, Cannabis indica
gtgtaattgtaggagcagttcttgagatagccaatcatttcaacctcccaacaacctcttcatattgcaaaagtatagaaagaccttctgagcaaatgagaaacatgtatggagagagtggatctcattggcgaagacccctttgaggcaataccgagcccgtgacagtactgttaatgagaaaagagaatgtagttgtggtcagacaattcataattagagtaatccaacggatattgaaccccattttccccataacagcagctaaataagaccattcaactcggtcgaaagccttgctcatgtccaatttaagagcagcatatcctttagaacctcttttactgtgcttgatgttgtggatgagttcaaaagcaacaagaatattgtttatgatttgcctttgaaggaagaaagtactttgcgtttcagagataacatgaggaaggacctccttgagtcttaaagccaatatcttcgaaatcaacttgtaaataacattacataaacttattggcccaaagtccttcatagttattggcttcttgattttgagaattaaagtaatcaaagtcttgttgaaagaggctggagatgcacctttattcaaaacgtctaacactaccttggtgaccaaattcccccacaatatgccaattgtgttgatagaacatggccgacataccatctattcccggacttcgatcacttcccatattcttcagtgcataaaaaacttattccttagtaaattcttttaaaagagatttattatggaatgaggtgattgttgttggaatggtagataagacatgtgaaagagcccactgatcttcttccccaacagtgaataactcatggaaataggaagaaacaatatcagtaataccattctttgatgacaccttgttgccatgatgatcatgcaaaaatttgatctgattgttggattttcgcatgaaaaaaattcgtgtttcgatcaccggatttaagccaatcaattctagaacgctgcttccaatattgctctttagttgacaacaattcatccaaaacagcttcagccgtgaggattttttgggtgtgatcaggaccagttgctgcagaattatttagcacaatgacctgtttttgtgcttgctttatttattgtttcatacgtccaaactttctagtgtgccattgctataaattttcaacacaattatttaaacactgtaccaacaatacaacaggatcacaatgagaatccatctgccaactggactcaatgatttctgaacattcagccaaatctcttcaaaatgaaaccgagatcttcttcttaaattaccagactgatcttgttgagaattgaacacaacatcaattaataaagctctatggtccgaactataataatccaagtgaatgacagccggttgtggaagttgatctttccaaaagttattgataaaacaccaatctaatctttctttgagagcgaatgaatttttcttattcttagccaatgtgaaatcatctcccgaataaggtagttcatttaaaaaacatttatccagtgtgtttcgaaattccttcatctgcaactcgtttcttaaaggaccaccatttttatgttcattagaaaaaatctcatttagatcaccaatcaacaaccaaggatcttgtggagagacatcagcaagtcgttttattagagcccatggatactttttattatcagtttcaggaaaaccataaacagctgagaagtgccatcgaggaccattatcaaacatcaaatagcaatcaaaatgatttgtattcattgaaagtagagttacattaacatcatctttccacaataacataagtcctcctttcaaaccaacacgagggacttcaagtccattactaaactttaaagattgcttaaagcgagaaagagaattaaccgagacttttgtttccatgagaaacaaaatatgaggaatttgctcgtggacaagcaaacgcaaacgacggaacgcactcgggttccccaaaccccatgtgttgcccttaattttgcccaaaatacgtggaccaatgcgactgcgacacgtggatttgagaaatatggttctgagataatttagctaagtctttttggatcaagagtatcaataagaaaatacctcctggagaagatatgagcgctccacgtactcccggaggacaaagctgtggcaaagcacctccgggaggcaccagaccccatttgaatagtcacctcacatttaatgccgcatgggaggagacgtattgaaactgccataagcattaagtctgacagcgtaagcccttttatgcagctattacgctatgattaataagcctagtgacggctactttatgagggatcacatcagtcaagaagggataaaggattatatccacctaacccctaagatacctagggtataggtcatgcatttcccattttatatctgctgggaatgtgtgcccctactgaaaatacacagaaagacaagaagttcggttctagggatcaccccagaaaaacactataaataccccccaaacacattaagacaggggtcgagaattctgggtttgtgagaattaaagagagaaaaact

SEQ ID NO: 266522 - DNA, 6279 bp, Cannabis indica
attatattgaaatgagttttatgtagggcacaaaacccaacatgttcctcttgagactatcccggaggccgctccatctaggacatccaaaaagcccaaagggaaagggaaggcaaaaattctacctcccactgaggcattccacaactccatttgggaaatggactagaaggtaaactacttccgttcatactagaaatgtatgccactaaagtcagactacgtaacatattgagattgatgtggcataggttggctgtcacaaaggaatcagcatccgcgagcacgaatgggttcagtgcctggagctggtcccatatctcaagaagagcgcacatctccttgagagcttaccgatgagaaccaactacaagaaattgggattctacaagctcaagaggtattctgatgctcactgccccaccagctacaccaaacgttgccttgacctcagggagtattggttcttctccactggtttcccagtaaagagggtacttgcactccagctcagcttgtagatcctaggtaaatgctctgacacttgcagttttgatctttttctttcaaaaatttttctgtcttggttcaagtgctgattgggcttacgtattactttgtttcttttgatagaccctatacgtcagagtactaaaactgaggaactggccaagaaggtggtccagcacaaggccttaactgaaatccaattaaaaaatgagggcttggtcaccataaaactgctccgtgaagttgggctgattgctggtttccaaagcattaacaatgtcagcaacaggggccaaagtcagactttaagagaagccaagggggtgatagccaattggccaaaattattatggaggccacaaaggaggaaaaactcctggaaccttattggacgctttgccacctgaatcccttaatagaagtagaggagatcctggagaagtatgctacaacatacccggatgaggatgctccaggatccagcactttgagaagaggtaatagacccttccacatatttcgtacccccaacctccatcgcatgtcccgaattgaccaagggggattcaatacatatttcttcaacttagatcgtcttaagtatcccatgaaggacatcatagacatggtagatgagatcattaggagccctcgtaacccgaagatatctccaaatactgttagggtggaccctttcgtgatcatgtctcttcccaagagaatatggcagctttattggcaaagatggcatagtctttttttactcatgggaaaccttatagctgctcactacacggtcacacccacaaacatatttttagcatgcggttgttatgtttataaatactcctgaagcaaagatgttgaagtctttgagtgaaaagattaccaaatcctaaccaagataaagaggaccaaagggaaagggaagggcaaggccagggcctctaggtcccgtaaattgaggtttccctctacctcatcttctttagatgttcggtaaattccctctcccgtgaaggaaaatactgagtttccacgttcccaagctccctctggagaagacaagactcctgccataactatggagacttttaaggagctagttgtgtctgaaagtggcatagcccaagtaggccatctcggacaacagaccctagtggaagctttactcgtagtagttgtggaagggaccactcaggataacccaatgaacaccaacatctcggatgagagcttggatggactcatgtttcccaagaagggtgtttttgtgacaccaaagcctaagacttctcctccaccatctgaaagggacacaaagaacgctaagtcttgcctaattaagcaacattctttaggaggggatagtgagcttcggggatccaccactccaccaccactaaatccatcatcataaacatcaattcaacaacaacaataataacaacattaacaacaacaacaacaccagaaacaacagcaagaacaaaaccaacaacaactacaacaaccacaataaaaacaacaatgccataatcaagagccatgtttctttgaaaggaaaatcatccacttttaaccaactgcttggactcgtcacctccttgcccaagattctcgctctgaacttcaagtttctattgaagcctactatccttggccatgaggttcagacaaggctaagagaggcagagaaaattttgtcgtcaagagaaagagaggatattactccaaaagagagctgataacctctcctccatgaagagggaagaaatcatcaaggaaatttgcacttctgccccagtaggatcactgattgccaaggagacactatgcaagcaaatggtgcccaattttgtcgtcaagagaaagagaggatattactccaaaagagagctgataacctctcctccatgaagagggaagaaatcatcaaggaaatttgcacttctgccccagtaggatcactgattgccaaggagacactatgcaagcaaatggtgcccaaggttgggagagaagtggcacctttttctgcagagattttggacgatgtggtgggcaatgcaagtgagctgaattcagagaagtgggcaacttacagcagcagcgatgcatttaccttagctcaggcttcgaaaaattaggttgtaggggtaagtattgacttcttcgtcttcacttttattgtagtgtgttgttatcttatgttgttttgttgtaccaattggccttgactgcggagaggactttgaaagaagtaggggccttgatcatatagctttaataggcccatgccaaaaatgaatccttggatactgacaacagggctttacactctagtctagaggtggctaagtcttgggtcactgctgaaatggacagggtcaaggctgattgcaaggctaaggttgagcgagcagataatgaggccagagccctgtactacaagatgcactaggaatacaaggctaaggctaatcaagacaataaggtagagctagatctacttaagtctcaagtgtcatccctcaagggagagcttctctaagtgataaaggagagagataccaatgattctcaactactgattcaaggtgatgctctcaagaccacactccaagaggtcaacacttggaaaaataaggtttgggagaaagatcaggtgatccaaggcttgttgggcaatgtcgaggatctaaagcgggagatgaggacttgtagaaaatgaaagctttattttcggtcaagtatgatcagcataacataattctacagggtggtcatgcaaccagtaatgctcacaatagaaacataaagaagttgcagagggaggttgctcactaaccaactaatggtataaaagctttcatcgccatgacggccatgtaaagggccaaagagactactgagtaatctatttgggattctaccaatgtagaggctaaggctgagaggctccgtcttcaatctatggatatggcttattcaatacttcttcatagtttgtggaaataaaaccccactatcctcaagcatcttagagctgacgaggtagaatttactcggagggtgcatgccatcgataatgacacttatctcaagaaatatgaccttcacagtggtggttgacgagtttgccgaggaatcatctagagacttagaacctgaactttctactcaagttgtggtttcttctaggaatgtcgccaaggacctccaggacctctccaaggataaactcgacagccctctggctctagctcaagatgtacctctagcttagacccaagtccaaatccaagattcatcctcagttccagatcaggcccaagacccatccaaggcttagttttatccttaagctttcctctattacttaaaccttttttgcggagatagttaattaagccttaactgcgaggttgaatgtaataattttacgaaactactcattttatttatgtatgtttatttttcttgacatgcttgtgtttgctttattgttgtgctattacttgttcactaggtcattcaatagattgccttagggttttttgaaacttctggttctaacggccaaagcttgatgttgttaggctttttaactttgaaatcacttgttgaatctaggaagtgtgcaaattgcaaatcccttttcttagatgtcaaccacgtcaaagttctctttggtgacacttgtaaactttggtgagttaatcgtacacagaaagactattagcttattcctgaatagccataagagtcaaagagcttagctctcatctacgtgtttcccaataagctgccttaagcagaatgctatagaaatctttgacatttagatttagtgaggaaggaggtaaatgtttaatagagtctaggaaaagttcctcgagggaaataaggatggacacgtattaacacttaggttgtgcttcttcaatccaaagtaacaaagatggattagcactagataggtttttctcaaatttgttataagagaactgttgaaaacgtgaaggacttcagcaaagcttctttttctcactccttgtaggaaacctatcaatatgttcaacagaccaaggcaactgcaataggattcaggtgatgttcccttttcagggaaagggctaaaaacatattgcatgtgcttttgtggaaaccaagttgaacatgcaatagacttcaagtgggagttgaagatgtattgagattcaagcgatatttccacccaagaataaaatacaagtaaataatgaatacaagtaatgagtgggtaatgtatggttttgagggcatatagctaggtatactacctcccaagtgagctagaaagtttggacgtctctaaattcttggtcacttgtttaaaacatagcttgtgcaggagacaaaaatgtgaattcttgtgtaaatatcttctatttttatttcattatacccaaaggtttatatgaagaaagaagatttacatagaattacatgaaacttagaggaatatcaagatttagataccctctgcctattggtagtaacgaaacaagtgatcagcattccatgcacgagggatctctgatccatccattctcttgagttgaaatgttccatttctgactttatgttgtatctcgtaggatccttcccaattaggtcctaagacccccactcctagttcttgcaaaatcgggaatactcctctcaagacaagatctccaacatcaaatgtacgacttttgactttaaaattaaagtgcctagaaatcttgccttggtacatcttgagttggaattgtgactgttcctggagctcgttaattaaatctagtgattcctagagcaaggtgtgattctgagttggatcataagtgtcttgtttgtgagagggaaccgcaatttctactgggatgaatgcttcacaccaataattcatcgaatacagtgtgttccctattgaagttctctttgtggttctatattcccaaacgaatcgcgaaagctccttcgcccaataggcattacaagcttggagttttttcttcaacgttctctttagaatcttattcacaacttcgacttttccatttgcttatggtctggccatgtttgagaagctcttcacgattccatgttaaacacagaagtcagtgaagtgatcactgtcaaactgcttctcgttatctgagacaatcttgtgtggaagtctaatgtaacgccctgtctaacagggacgccatgtgtatgcaatttaataaaattcttcttttatatactatataattatactaaaagtgtgggtaattaatttttttataattaaaattcgacatataaaactattcgataaaagataagtgatgttaattacggggtccccctgctttcaaaatattcataaactggtttaattgtgtttttacaacataaattttgtaatcccaaaatactttcaaaatagagcatcctgtttactgggccatgccactgcggctgatatgtatattgctgctacgactcatggctgctcaattttagccttccctttaccttcaccataaagcacttgtgagtcatagagactcagcaagaaaagtaaaataaacaataactgataataaccatcaatttaaatatcatatcaacacgtttacacatttacatattatcataatcactggtactttagagagaacccctttttaccactcgttaactacgagctgaatatgttactatggttgcccggtgaagcaaacgataagt

SEQ ID NO: 266523 - DNA, 1942 bp, Cannabis indica
gaggggtatttttgagttttagataaagtgttcatatattttcaatgttaatatgtattaggtatatgtaagtatagaaaatcaacccaaactatattaaggctacgtatgtttggtataaaaaataataattgcacacataaaataaatacgatatatatatatgaaaaaaatatgcatatataatatatccaaaataaaaactaacaaaacatataactataatttttttacaaaagataaatcgttaatgtttgatataaaaaaatatagtataaataatgatagaaaatcacctgagagaaaaagaaaaggatagaaaatcaatataaacaaatttataggttaattactataaaatagtgaagaaatagaatttcttcctacatacatttacaatagaaattttgtgtttttaaattacatatcgctcctaatttgtaaaatttgacaaattactattcacactacaaaaaatcttactattcactcttatcacagactatgtcatttgctcgcttatttttattcggatctcaagcatttttgcaccatctggataggtgtggatcgaaaacatgctagggatatgactctgataccatgatgagaatcatgaggttccatctcaaaaccagttggtgatgagtggagtagcccatgttcttatatatggctcaatacttttacatttaatcacaataaaatttatgactaaaaataaaaaagttatgactaatcttaattatcatttctacattgtgactaaaaagtttatggctaaaagtattagtcacaaaaatcacaatttgttgtgaccaaatgtcattagtcacaatacgtgttctaactaaaactaaattagcaacaacttgtatctagctaaataaaataaaataaagagaaaaaaaaaatctatgcaagttaaattctgaataactcaattgtatatataggaaggtaaactacgaaacacaatacttattaattttaaatatcataaattctataaaattaaatattaaaaatgaaattgatataaaatgatttttcatttatttatacatagagtaaatttgtgattatttttggtattgcatagaaaaattataaattatttatatatataatatgtaataatgtacattataattataaaaaatatcttctttatttttgagaaattctaaatatattacgatgtggaaaataggatttaagtagcaatacataataaccacacttacatacaagtatattattattataaagcattacatttttttttcttgaaagcattataaagaatacatagtttagcccaactaacacaaattctctatttatatgagaatttagctttataaaacttatttttaacgtgtgcgattagcacaatattgtagggtaacatttataagtattaaatatatatttaaatgtatggagaaagtttgcagcgcacctcatttgaacctgtttggtacgtacatatgtttccactgaattggtaggtcgttttattaattaatattgtataaatgaatgagtacgtactactttttgaacaaaatatgtcaaattttcaacaaataatttgttcaagcttgtctttcaaattccataaagccatttcttttgttttgagagttatcatcatattatcaacaacttcaaaaaggcacttcaatccattctaaggtttcacacttcaaatctcttatgacataatattatatataattaaatcagaatgtacaaaaataaaaaaaatactttttcatttataattttatgtgatttatttatttataaaaatgaaaaataatatatctcaaaatgaaaacaacataatattaaaatgaaaataacttttataaaataaaaataacataatcttaaaatagaaacaacataattaacctcaaaatgaaaataattt

SEQ ID NO: 266524 - DNA, 3240 bp, Cannabis indica
cttaacataacaacaattagagtaaaactcaacaatgacattattatctttggaaaattttgaaatgctaataagatttttgataataaagggatatgtaatgtgtttttgagatgaagagatttacgagttgttaaataacaagatccaatatttttaattgacaaagacgagtcattacctactaccggcttttctttgcctttgtaggagttatggtgttggagatttgagttatctactatgacatgattcgaagcaccactgtccaagtaccaacttgtgtccaaagttgtcaatggagaagtaacatatgcttgtggttgatttgattggggagccgagttgagattgtcatcaggaccattgtaactgatgtcaaatcttctgtagcatctctgaacagtgtgtccaaccttgttgcatagttgacatattggtcgatttccttgattggggactcgacctcaatgatttccgttgcctcaattgtactaagtggatccacgacctctgttcctttgatagttgcttcaatttgcttggttggtgttgggaaatggaggtttcttggattgtaccatattaattgaagctctagagatatccaaggataaagcagctgcttgagactcaatgcagatctcgtgattctgaagtaagagttgcatttcttgcaaggtaagattgtcatgagatgttagattaaccaccacaacttcatattcagggcccaaactagcaagaacataaagaatgagttgatcatctgtgatccgattcctagcagcacataaaccataaacaaattcttcatcttgagaagatattcatcaatttgttaggaacctttctttgtgttttggagctggctcatcagatgaatcaatcgagctttggaggtggtgccaaacaattgttctagtgtatgccaaagctcgtgagcagaggtgcaattaacaacatggcccagcatatgttcagatattgaggacattagccatgataaaagaaactaatctaaacgtatccaccaagtaaatttaggattatttaccagtgtggtttgctccggtgcgtaacgaatttgaggttgcggtgtattttgattgagtagaacgtttttaagatcatgagccgtaattgatggtaagacttgagatcaccagaaaaagtaattattgcgatccaagggaagagggggaacatcgtatttggaacatcaaaggtgtttgtaggtgcaccgacaccagagaaggtagtcatggatgaaccttgggcgtctgataccaacttgagaataagaacgagagagagagagagagagaaagaaaatcgatgtattgagttgattactttccacaaagtacaaagaaaattatttaaagtcagtcaagagaactaaaatctagaaaagcttgaactaactctcaccaactgaaataacagaaaaccaaaaataacagaattttaacaattactaacaactaactaggactagtcaagtgtatcctcaacatacatgatattgtgtataagactgttttgctgttcttgaaactgtgaggttatactggtagaaagaagaagaatgatgttgaaaaaacttgattcatcaaacacaaaatctttaatttttaatcgactcatttgaaatagaacataactgatggctttaaaaaccaatacaattatcaagagtaactttgaatggccttaaattagaagctaaaatgacccttttccttgacgctttcaatagtgtccctcagactcacttccaagggagtgaaactaattcccaaacttttcgccttcaaatctgatacttggaactttggcttcagaggctcattatgttcatatctgtaaacaatgcaaacacacattaattcctttgtatcttgctaagctttagttatttagtttatattatgaaacaaagtcaagcataataacttacttgtcaggaatggtcaaagaagggtaaatgtgctgcaaaatcttgaatgactctaaaatatgtgcaacaggtccagacacacaatatcttccactagctgaagcaacttcaaatgcttgaatatgtgcattagtaatatctctaacatcaacaaatggataaacttgattgagaaccttttctgttcctgcactttcaaatttatgataaaacaatcataaagtagccaaacatgtttaggacagttattaaattaatgtaccatttagttgatttagaatatgctccatggttgcattaacagtcggttgtaagagaggaccgataacaaatcctggatgaatggtgactaaatccatcccattttccttggcgaatttccaagcggcatcctcagctagagttttcgaaagtggataccagcgctgttgaaatgcaaattaacacttttttttttattaaaattatttccaccaaacacattatttatctaatttctaaaattctatcacggggttaaagcttgaaaagctgtagattaccgcaaatttaaccgaagtatctcaaaagaggaggaattatggattcaagattgaataagaaaagagtatatataaagtaagaaataggcagtgataattagtgaaaacatcataattaaactcccaagctcatattgaagagatcattaagcttaaatgaagagaatcagtctgtcaaaagtatggggagtagacaagaatagagaagtagtcaaggtaagaaatagaaagtccaaggcaaaatcagtagttattagtaaaaggtgcattgttagtatgtccgattcatttctcacacagtaggcttgagaaaaagaaaaatcacaacagaaaaaaaaaatgcagatatgctgaaaaaaaggggaaaaacataagatagcaggctagtataagaaaaactggtgattttggtggctctaattcagttagtgacatgtgtgaaagaacctatgtaatatgttgtaatctaattggcaaacattggtattataaacaagcatacgaactccattgttattaagttctcattctcatggagaggtaggcatatatatttatccaaactaacctaaaacttggtgttttccttttcctatttcattctttcattgaattcctgggccattttagtttctgtgattattaacttggcataacaagatatgaccatattatacatgagagggattaacactacaacagatcaacacatatatgtgaaaaattcatatacct

SEQ ID NO: 266525 - DNA, 4933 bp, Cannabis indica
cggtttttttatatttttataatggtcggtcggttttcggattagaaccataaaaaccgaaaactgaattttggattttttgtgtgtaaaaaaccgaccaaaccgactgttgctcacccctactctcatgtgcctctaatacataattaatttatcaaccatcccattatagttatgaacaaatattgggcagatagttaatgattgtgtttatggtattaagcttataattatattagtccaagatattaattctaacgatgtatacatacatatataaaatggatgataaagaaaaatctaatataaaaagcataatgcgacccaaggccaagctatcatatgcttagacagatcctctcctaccgctcatattttctcgatctacacaccactccaggtccatgaagcaaggtacatctcactagtgtttccttttgctcccaataaaaagttcccacaaagtttatctattgtgtttatgattacgttcttctatatttttatatattttttttcgtattttatatttttggtattattaaaaaaaaatagacattttcacaattttaatttctacgagggccgcaagtactacaatagggcccaggtaaggttaaggcctctaggccggacttaccggttcattctagagaaataaatatataaaaaagaacgttctggaatttcctttcaccaaacataaaacttaaccctaacaaatactagctttccttatccgcattttctccaaagaaaaactcagataagcaaactcctcactcttcactcacctcgataaccacttcgttcttcatcgctttgaatggcttcggctaatgctctttctccggcgtccattttctgctctcccgtgaaggtagtacatacattttcatcttcttcttcgcccgttcttcatttttcttttgtttatcgggaaaaaaagtagtttgacagccaatgtgtgtttgtctttcggaaatttggttgacttttcttttctctccttctttcccggattgtttctgcttgttgtagtctttggttggtggtggggctgggtttaagggattttagctcaagttgtttgaagaattcaggagtgttgagccttgtatataattctaatctcgtttcttatgggaattctgagaattctagtctaaattgctctatcttaatattagataacagtattcttaagttgctgtttttgtggttctgggtgtgtatgagttcagaattatctaatatgtttcattgtagcagggtttgagtaggagggttagccagcagcagagcagtaggttgaactacaagcaatctagcagacgatttgttgttaaagctaatgcgaaggacatagcctttgaccaacactcgagggctgcacttcaggcaggcattgataaactcgctgacgctgttggccttactcttggtcctaggggtagttaccttgtctttgctctattttctctcctattatatcatctcttttttctttagtattagaatttaacctgtatttgttttcttttaatcaatttttgtagggaggaatgttgttttggatgagtacggtagtcctaaagtggttaacgatggagttacaatagctcgtgccatagagctacctgatgctatggaaaatgctggagcagctctcatccgagaggttcgttttatttgtaaatgtaattgttaaactagtatgagctgtgttcttggttgatttgaaatatgctgacttattttaattatgggatgtatttaggttgctagtaaaactaatgactctgctggtgacgggacaacaaccgcatcagttcttgcgagggaaataattaagcttgggcttttgagtgttacctctggtgcaaatccagtgtcccttaagagagggattgacaaaactgtgcagggtttgatagttgagttggagaagaaggctagacctgttaagggtcgtgatgatatcaaaggtaatgaaacttcattcacttttctttatttgcttaagtggacaagttaaacaatctaattggaaaaatgtacgtattctttaatttgtttatctttctcattgcagctgttgccaccatttctgctgggaatgacgaacttatcggaacaatgattgctgatgcaattgacaaggttggccctgatggtgttttgtctattgagtcttcgtcttcatttgaaacaactgttgaagttgaagaaggcatggaggtttgtgtttattaactttgaattgtactttggtattattattttttattccaatcgctaagtacatggtggtttctgatttttttgcttcatttgatttgcagattgacaggggttatatttcccctcagttcgttactaacccagagaaattgattgctgaatttgaaaatgccagagtcttggtgaccgatcagaagatttcagctattaaggacataattccattgttggagaaaaccacccaattgagatcccctttgcttataattgccgaggatgtgaccggggaggctttggcgactcttgttgtgaacaagttgcgaggcatattgaatgttgctgccatcaaggctcctggttttggtgaacggagaaaggctcttcttcaggatattgctattttgacaggtatgcagatagactgcctgctgaaacgcttttcgtgaatttgttagtgtacataagttcagtttgcgtatggtaatggacaatttgttcatgtgtgttatttcctaaataccaagtaattgaatcgtcacgtctcaattttttatctgtgaatcttgtaggagccgagtttcaagccagcgatctgggtttgcttattgagaacacctcagtggagcagctcggtgtggcaagaaaggtgaccatcactaaggattccaccaccctcattgccgatgcagcatcaaaagatgagttgcaagctagggttgctcagttgaaaaaagagttggcagagacagattctgtttatgacactgagaaattggctgaaagaattgccaaattgtcgggaggagttgcagtcataaaggtgggagctgccacagagtctgagcttgaggaccgcaagcttcgtattgaggatgccaagaatgcaacttttgcagctatcgaggaaggaattgtacctggtggtggtgccgctttaattcatctctctgattctgttcctgcaatcaaggagcaacttgaagatgctgatgagcggctaggtgctgatatcgtgcaaaaggtaattatatatatattattggatattgttttcatatataattgcaagtggtgcattgttttgcttaagctgaccctgaaactaatttgcaggcattgttagcaccagcttcattaatagctcaaaatgctggagttgaaggtgaagtagtagtggagaaaatcaaatcaagtgaatgggaggtcggttacaatgcaatgactgacacatatgagaacttggttgatgccggtgttattgatccagctaaggttacaaggtgtgctcttcaaaactcggcttcagttgctggaatggtgctgaccactcaggccatagtggtggagaaggctaaacccaaggcacccgtggccgctccaccacagggacttactgtctagaaaatatgaagtttcttagcgagatttatctttccttctaggcgtggagagaagaagagagttgaccaatgtggtggtgcattcttgaatatgctcgctgaaatggaatatgttgaatggaatgtgccagcttttttgtagggagagacataataatcgattgtttctatcaattgtaatgttaggtcttgtaatgttatatctactttgttcgttaccgattgcctcaaaaccgtctcacaaaattgtcctctactggctctgccaactttttttttttggttattttactttcattaaatgcataatcacttcaaataaatattagaaaagggaatcataaaaaaaatttatttacagcaattggttttatcgctatagttttatcgttacacaattgatgaatgaaaaagctcagcactgacagtgctcagcttgtctatttatgatcaaatgcccatcattataaggaaatgaagaaccaatataaggattacacgtatagaatttgttacaacaaaaaggcgtaaagcaaatccctattctaaacagtattggcatagggatattctagagcaaagatattttgacagcagtgtggcagaggtgtgactaatttgccctcgttgcaacagtaattgcttctttgaggactaaaaacctcctatcatctgacgacataccagtcagtcagtatcagaaaaaccaatgagagttagatgatcattaggggttatgtgtaaaccatataacagacataaaaaatccaattctgagccgtttcatgctgcagattttcaaaaaatctaatttttaacttaaatccacccaaatctcacacaaagcttcagaatacctaaaaacattataatagacataactaacaaaaattaataccatcaaggctcagaatccaaattcattattacagggctaagtaaacctagctcaaacttgttactgcccaccaaacaatcataagatagctcacacaaacttaaatcaactttaaaaactcaactctaacaataccaggatctaacagtagctagaactcaaaattgcatgtgaaaacctaacttttacttgaaatttcaaagaaaaaaaggaggagaagcttatcttgagctgaattctcccttactcaatgaaatcctagctagaaaccccttaattggtaagaatttgaagagaaaaactaattttctcttttggtttttctttggccgaacacaaggagagagaaagagggtttgggaatttccttgactacttttttttttttttt

SEQ ID NO: 266526 - DNA, 7016 bp, Cannabis indica
tttattattttttttgtttttttaatttaaaaaagatatatttctatttattaattaaataaataattaattttttaataggttgagagggttttgtgagtgtagttcttctttcgtttatattgcttcacacttgggttcctccgttttcactctctctcatcttccttttctagggctgatctcttcctttctctctcccttttgagctttgaatctctgatttttgagtttcagacaacaatgggagaagagaagaagcccaaatctggaggtgtctggccttccattaagccctttgttaatggtggtgcttctggtatgctcgctacttgtgtcatccagccagttgatatggtcaaggtaagctcttgtatatgtattgcttttacagggtttctgtaagttgattttaaaagttcaaaaagaagtgaaaaaaaagaactcattttatttactttgatttttttttttcgttttgttaaatttgtttttttggtggttttttggatctgggatttgtttgtgtgatgttttttgttgatgggtttctcttgtttttggttggtttgcaggtgagaattcaattaggtcagggatcagctctcagtgtcaccaaaaacatgcttaagcaagatggtattggtaccttctacaaggtttgtagctttgaattttgttaattgttttgtatatgttgttgatcttaatgagtattcaaagttacagatttggggggttgtaaattgttgatctttttatttggtgaattgttgttaaagtatggatctttgtttagatttggaatctggaacattgaaatgaaaaataagttgaattatttcacaattgggcctcaatggtataaatatttttacaattgggttttaaaatttatcttcagtgtgagaacagtataatgctaatactattctggatatttaggctcaatttcgactctttgtgtaaattgtgtcttgaaaatttacaagctgaaggattaattttggctcttttagttgtttgggtttagattcaatattaaaatgtttatctttttcaattgaatttgtgctttacttaaaaagatcttgcttttgagcagggactctctgctggtctgctgagacaagctacctacaccacagctcgtcttggatctttcaagtaagtgatttaaagtgtccatattcaagtgaaatataagtagtggtagtgaatttcatcaaagtaagtgatgatcatttgaattgatttgttaccctgtttggtgaaatttcaggattttgacaagtaaagcagttgaggccaacgatggaaagccccttcctttatatcagaaagctttgtgtgggctaactgctggtgctattggagcaactattggtaatccagcagatttggcactcattcgtatgcaggctgatgccactttgcctgctgctcaacggcgacattacaaaaatgtgttccacgcccttgttagaattgttgcagatgaaggggtttttgcactctggaagggtgctggccccactgttgtgagagctatgggattgaacatgggaatgcttgcctcatacgatcaaagtgtggagttttgcaaggataacttgggtctcggtgaaacagctacagtgttaggtataactctctaaaaacaaatcagatattttctgatatctttctatgtgatattggcttttgctatttgaaggctcagattctatactttctcattattttaaaaatttggttaattttttgaaacaacactaaaagttcatgctgtatgtagttttgggggatatatctaaactgaacacttttattctctgtctgtcttccattaacttagcttatgttttcaaaatacgttgttgtttcgtccttttgcatcaccgtttttgagcttttttttaaattgctttatggttgatgtagtagattctccttaaagcatgttcatgtatatatatattctattccactatgttcactcctttctactgttacctttaataaagctgtatttttgaggttatgaacttagtaacattagcggataaaggattccgcaaatgtggcagatacatcactgtttgctgaactttccctttcacttttgtgcttaaatattgctttatgcttgtttgtgttcatactgttttaaatatcttttgacttttggaaaatattctattcttctttttattcccccctcaattaacacctgctttgtttttgtctacagctgcaagtaccgtctctggattctttgcttcagtttgtagtttgccttttgattatatcaaaacccagatccagaaaatgcaacctgatgctcaaggaaagtacccctacaccggttctttggattgtgctttgaagacccttaaggctggaggacctcttaaattttacaccgggtttccagtgtactttgtcagaattgctccacatgtcatggtatattcactctctctctcttaaaatttataatcttatatatactggctgatgcgtggtgaatgtttctttcgaattgaaccttatcagcttattcgtattctgagctcctcaatgagccactgtcactatcttaatggttaggcatttgtctgatattccaatctttttttatgatgcacagatggtatggattttcctcaaccaaattcagaaggcacaaaaatctattggcttatagagaagttatgaaagggatggagatttttgtcaggggtcgagtccaaaagtcgaataataatgtgtcctagttcttgttttgagccaagtagaaagttcataaaaaagaatttgattcacagcattcatttctcaagtttttttgtggttaaggccacactatacctttggaattttcttttactattgacaagaatagaccctttttaacatgaaatggtttgttgcattttgggcttgtctcatcatcccatcctcatggaaaaagctctatgcttttgttgttggccttatcttaggaaatgagaacaatattatttaactttgtcattattttaggtcccttgtgtaacatttgattatgtgcaaggagacaataaaattttcctgtggtctcatattgtttgtcttctcattttggtttcctatcacaaggcttgtttggctgatatattgacatgttttctcacatgtcaatgtttgattggcttataagcaaatgatgatagccaccaaattcagtaatgatatttgttgtcatcatagaatgactttgaatctgttcattgaacaaccatgaacaatttacacataaaactggtcagtcatggaggatgctttcaaagcgaacttctcattcattatatagtatttacagtaaaactatggcaaaatatgcacactaacgaaaagcgtggtcgtagtcatggtagtgaaagactttgtggatgaagtgagacaaccattttgaagctgcaaagcaaagaagtgctattgaaaccatagcagactttgcaaccatggattttaggctttgtttggttgctgcaacaactccaagtagagctatggagactacttgcaacacaacttctaggacattgagacccttgtatgctgcattgcaactgctgcagttaaccacatgagtccaatacctgaaaagaaaatacaaataaaagaattaagacttattttaactagttgaaagagaacactagtgtgttaagagttctcccacaaatgaacttatagaagctaattaaatttgaatagaccttaagtggttgggtgagtatgtgagtaagctttacacaaaagaatttcttaggctggggcatcgtggtaatatgccccgtctcaccacaccacaccaccctatttcgccatccctagcaatgatctgttgggctcccacattgaccaagtatgagaatagttgggttagtttttggaagtaagttctacccaagtagtatcgaagtcatgtactctcaagtgggactgatatagctaaaggggcgacttgtggactaggcccatagtgggcaccgcaagcccctgtggatgtagcatccaaaaggggtgtattattagaatcccatataaactatataggcaccctcatttcttagcctaacttttgggagtgagttctagccaagtagtgtatcataatgttaaccattttcatacatcatataggaagaactgaataagaatacctgtccataagctgttctcttggaggagttggtggaagagctccactgaatttgcctttccagtcaacttggccaccggcatgcttgttcagccactttctgaaagcaatcacaagagcatccgactttgttggcacaaaacatgccttctgccactgggcagagccaacgtccattatcttacgctcctaaacagagaaatcgagaatcaaacagttataactaacacagttagccatctcatctaataataaaaacaaagacattgttttccacctaaaacatgttctagtttaagcaatagagcttgtcaatttaacttgtagtttttcttctttggacattacagagggaaaagatgattataattctaagcaatgccatttctcatttacttaactttcatcttaatcttcacaattggacaattgggtttacttcatttatgataagagtatttcataagattttgaaggatgaaaagtattgcacaatagaggattaagatattggttagaaggaaaattgtatctaaacataaaagatttaaaagtacctcaacatgtagcagatgcaaatctgaatccagaatcaaattctgaccaacatgaaacatccatcgcggcacaattttgtcgatccataccccaaagtttcttgggaaagtccatattaatctgctcttacctggactaactggtatgcaaataaaaactaacaccattctcttctgtactgatgattccttaacaaaccaaagacaaacaatagaattaaattaccaatcaccaaagacttgtcatgattgatcagtatatcactattaccttcttggttccagttgaggaagcagccccattatcttgctttgttgatccaccaagaggcaaagaagaataaaaaacacatggtgcaaaaaatttgttaattccaggctcccgccttccattaaaaccgttagggtgaaaattctccacagccatttccaagggtatgccaccttctctatcagccttatctgttgtgaagttaaaggtggcaatgccatttttcatatcaaatcttttcctcatgaaataaactgaacatacaaagatgaatacaaaaccgaaagctcttactctttctctgtggattcctcattagaccataatgagcataaggaacatgtgcagggtccatgagattttctatcaagacctcatatctgaaaatacaaagtgaaaaatatcaagtttcctataatgttcaatcattgtcatttagagcatcttttttcacttacccgtatggaatatctctgtttcccatcgaattagtaaatgatggatcatccatttctgcaatgtatggtggtttttgctttgttataatatctttgtattggggatcagtgttaggccaaaaccagacaatgccattctgcacagtgcttggataaacagaaacacatgctttcttggaagtgtgaacctgaattaaataatatctttcaagagattaataatcttccttacttgtattcttatgcatagcatcatcaaaagcttgctatgttttctagtgcttggataaacagaaaaacatgctttccattgatgtcatgagcttcaaatgtacgaataagaagacactaataacacacagaagtagagaaatttatagcattcttatatgacatggacaagactatacaagactatccttatataactgctatgttattccaccagttctcaaaaaattctaaataatttcaatcagtcacttgcacatgcactacatcgtaagtaaactattcaatttttttaacaaaccgctgtataaccataatgtacattattatataaaaatatttggactataatttaagtgatgccgctaccatagaatttttctatataagataagatcccattgaagtaaataaatttcatgaaatggacacaaaaaagtttttggaattccaatagtaccggagggccatctggaggtgcttgagggatgaacttgcagtcaccagagccattaaagcaccaaccatggtagacacactgtaatctcccccattgatcaatccttccttctgataaaggagccaatctatgaggacaactatcatcaaacaccttccattgactctcattcctatcccaccatacaaccacatcaagacccattactttcttagcatgtggcctcctcttatccaagtcacaaaccggcataatcggataccaatgagcataccaatcaaatttcccatctggggtttgagtttcaacctcaggcttaaaagggtcagaaagttctgtggaaacagaagatgaaatggcagtgaaaagcttggattttgacacggaattcgaactgggtattggattaaagctcgagcaaaagagttttgtgaattgggttttgtctagtcttgatggaaagccaagagaatgaacaggagaaactctgagagcttccatggctgacatgaatgaaaacaattagaagaagttgaagataagagagattaagaattggattaatggttaaagatgaaatctttgaaggttagaggagaggtaggtggggacagagataatgtgtaggcgtgtgaatagttcagttgaggcatttggatgtagtagcttagcttccattaatacgcttctctctgcatgtggttgtaaattaaacacctctcacattgatatactcaaaggttcacgagaaatcctaaatcaatattgcaattcatttatggctaaataacattttggacaccgtattttgcaaaagttaccgatt

SEQ ID NO: 266527 - DNA, 2226 bp, Cannabis indica
tacttgattaatcggctacctacccctgtcctaaaccagaaatcaccatttgaaatattgcactctagacaactcgactacaaattcctcaaagtgtttggagcagcctgtttcccatgtcttagagcatatcaaaatcacaagtttcaattccattccaccaagtgcgtgaatctaggatatagtgacagtcacaaaggatacaaatgcttgtctagcacaggtaggttatatatttccagggacgtcattttcaatgaagatgagttcccatttcaaaatggcttcctaaacacacacaagcccgagtcacccgtgtctatccttgtgcctttctggtcaactacaacttactcaaacagtcatgatactagacaaatcctaactccaaatgctgaagatccaactggtggagtacatacaagctcacccttaaggtcacctgctatgccatcctcaccgtcctcttcctcacatcaggtagatgaaactgaccacattatttcgagttttgaaatgaatgacaggcctaatattgtgtcaaccgaagagagtgatccaagcctaacacatgatcagcccttagaagctgaaacacgacatgatgaagctacccccagtactcaagtcaaatccactcaccctatgatcacaagggcaaaggctggaatcttcaagcccaaaacatatgctggactgtcaaaatggactcccatcactaaagtaccaaactcagtggaggaggccttgaacactcgtgaatggagagatgctatggacacagaaaacaaggctttaataaaaaacaagacatggattttggtacgaaaaacacctggtatgtacatcgttggaaacaaatgggtttacaaaattaaaaggaatgcagatgggagctttcaacgatgcaaggcgcgactggtagcgaaaggatttaaacaaagggctggtatcgactttggggagaccttcagtccggttatcaaagcttctactgtcagaatagtccttacaatcgccgtgtctctatcgtgggaagttaggcaattggacataaacaacgcctttctcaatggatcgttagttgaggacgtttatatggagcagccacaaggattcgaagacgaaactaaaccggactatgtctgcaaactggtcaaatcaatttacggtctaagacaagctccgagggcatggttcgacaagcttaaagcgacattacttggctggcagttcaaaaattcaagggctgattcttctctgttttactacaagtcagaccaccatgttatgcttgtgttaatttacgtggatgacattatagtaactgggaataactctgagatgatgaagcaatttatcttgaaactgaacaagctattctccttgaaagacctcgggcctcttcattacttccttgggatagaagttcatcgtgatgaaacagggatgtatctcagccagccaaagtacattgaggatctcttgaagaaaatgaacatgcttcatctaaagtcttgtcccacaccaatggcaactggaaaaacattgtccatattggacggtgaacctctgaaatgtccaacagagtatagaagcgtgattggaggactacaatatttaactcatactcgacccgacataagctttgccgtaaataagctcagtcagttccttaaagccccaaccagtgtacattggagtgctgtaaaaagaattttgagatacttgaagggtacaccaaaccacggcctacacattcgtcactgtgacaggttcgacattactggtttttcggacgcggattgggcatgctgtccggacgatagacgttcaatagcaggagtatgtgtgtatctaggagacaccttagtttcatggtcatctaaaaagcaatctgtggtgtcaagatcgagcaccgagtccgagtatagagctctagctcaggtggctgcagaaatatcctagatacaagggctgctgcaggaacttaaatttcccctcaaatctacaccaatagtctggtgcgacaacatgggcgctagtgccttagcttccaatccagtatatcattccagaacaaaacacatagagttggatgtacattttataagagataaagtactggagaagaagctcgaaatcaggtacattccatcaagtgaacaaactgccgactgcctcaccaaaagtctgtctcatagtcaatttcagtttcttactggc

SEQ ID NO: 266528 - DNA, 2803 bp, Cannabis indica
tattattattattattatgttgacaatatatagatagaaaattaaattactaaaaagaggatacgtacagattggcataaaatgtattttgagattatataattaataaaactaatataaaattagtgcatcatagtgttttcgtgatgatttgattggtagataatgtagtatataaatgtatccgtgttattaattttgatatttgcttaaagattttgttcaataaactacatataattaaatttatagcaatcttgttagttgggaagtaggtaatatatgatgtagagccacttgtctcacacttattaattaattttaaaaatttaatgaggcctgagtattatatattacatattaaattattgatcatgcattatataaattttgttagtctgattatcatctgtatgcatacatgcagattaattgaaccaatagttccaaatattatcaacacaatttgaacttcaaactatcacactaactatgactacaccatacattaaattaaagaatattcttcttcatcaatcatattcatttgcaaaccgtagtagtccttaattttaattgttgtataacttatattttcccaccagcatgacatagacacacacatcttctttaaatttccatggcccgtaatcgagtaatgacactaatttaattgtcaccaaacacaagtagctagctgattggcagatcagtaaatgtggcattcattaatcaaatttattattatctatgttttgattattactaaatctaaatgtagtatatatactattaagtttttatgtgcctgatgatactattaatatatgaaattgatcacattaataactttcagttggatgagaaaacaagcgacaacatttcatggaaagcaattggctacactggacccgattctagtacaactactgatcatgaccaaaaacaacaatcggaggaacactcagaagactcagaacaacacttcgggcctctttacagcggaattgtaaatctcaacaatccggaaagcatatctaatctaaggatcttcggatttccatcccaatcacgtccaagacccgccacaacaacctcactcaacaatcctttcctaaccattaaatgcgatgtggtcgtggttggttccggttctggaggcggtgtggtggcgggcgcccttgctatggcaggttacaaagtactagttcttgaacaaggaaattactacgccagaaaaaacctcacacttctcgaagggcccaccatggacaacatgtacttgtccaatggtttgatggccaccgacgacatgcaagttttgttgctggccggttctacagtgggaggcggctctactatcaattggtcagcctcaattcgcacccctgagcatgttatgaaggaatggtgtgaccggtgtgagctcgagctcttcggcagccaaatgtaccgagaagcgttggatgtggtgtgcgaaagaatggaagtacagtcagagtttacagaagaaggcttcaacaactcaattctaagaaaagggtgtcaacaactaggtcattccgtccataacatcccgcgaaatgcaccagccaatcattattgcggctggtgttgtttcggctgcaaagacgggaagaagaaaggaacgtccgagacatggttgaaggacctcgttgactctggtaacggagtcattctcccaagctgtgaggccgtaaaagtattgcaccatagaaagaaaggaagagcgcgaagtaccgcaaagggagtggccttccacttccaaaataaatcagggaagaaagaaatgtgcattgtagagtccaaggtgactgtggtggcatgcggggctcttaggactccaacacttttgaaaaaaagtggtgtaaagaatctcaatataggaaagtacttgcatcttcacccggttgtgatggcatggggccaatttccggatatggataagaaaagctacgaaggagggatcatgacgacaatgtcgagtttggaggataagtcaggatacggagttgttatacagacgccgtctcttcaccctgggatgttctcgattctgatgccatggatttcaggaaaagatatgaaagatcgaatgcaaatgttttctaaaacagctcatgtgtttgcgttagcaagggacaaaggttgtggaagagtgatgtctgaaagttctattgggtatgagttcgaacaggaagacgaggagaaacttcaaagaggagtggagaagattctaagaataatggcggctgcgggggccgagaagattggaacacacaatagagaagggaggagcattaatgtaagaacctcaagcaatgatgagttggagaggtttataaaagaggagagtaggaggccaatcaatgggctttcatctcccgtttgttcggctcatcaaatggggagttgtcgaatgggagtgagggcggagaagtcagtggtggatcagactggggagagctgggatgttgagggactgttcttggctgatacaagtgtgtttcccactgctcttggagttaatccaatggtcactgttcaggcacttgcttattgcacagcccaatcaattcttcaagttttaagaaggaagaaattaacctttaattaattaaccacttcttacttctcaagtggacttatttaaatattatagttatttgttgggctttctgctttaaataaaactatatttcaatgtaatattttctattcaattatcaataaagaaacagatttaatttcattacttttttaatgtattatttggttcatg

SEQ ID NO: 266529 - DNA, 4710 bp, Cannabis indica
cccaaaaaggagagtaaattagatcctcaagtgtgacattttgcagagcagttggcgctgaagaacaatgtgatagttttgaaagtgtaaaggctcacgagataggttgcgaaacttatgcccttctcaaccaagtaagcataaacaaatcaaagtgtagttcagagatcttagtgtggaaacagccatccacatgctcagccatttgtctttggattgttaaaatccacactttccttctcgttaacactttagcaactagaacaagattagtgttaagtgtcatggtggaattcatcttatcagcgagagaatttatgataccaactgtaacatagcagaccgatcaatataagtaacctaaaaagaaatttggaaatacttcagtttgaattgaagggaacagtttaaacaacatggaaaggatgaagaaggagagaaattgcagaaaaaaaaataaaaaaaaaaaaaaacggtaaatggacaataaactgccacatagcactaaagcatgttgggagtcataagtagcattaacgatggaattgaaaattggtgaaatccataaacaataatagaggggtagaacagtaaatacaagttaggccttttttttaaaaggaaatacaagttagtccactgatgcatccaatgaggaagaagatggaccacattataacctataaggtagttgactggtcagatgagtaagttctaatactattttgttggaattcaaaacacattaaatggcatcggaaaattttcaagctaacgtttcatcacaatcactcgtactcaaacacattttcatctatagctttcacacaaacatccattcccaacttttctttggcaaaaatagtccatgtagcctttatacaatttttcaaaattacataaaatgtccttttatttatttattttacccttgaatttctaatatggagtatgaaatgaattattttatgagattttagactatggactagaaagtaaaaactacgtcattgtcagcaaactctcctagttttactaggtactgggtcttttcgtatctattgactaatgtaatatggaaagcaagaaccatgttgcttcctactcttaattatattctttacaatggaatatcaacaaagcacgtgattttttttatgatacttttcgtatcaatactgtagtttagaagaataacatatcccttttacaaaatgggtgttgaacagcattttaaaggccatttttttagtgaacctacatcatttcgtgaacaatcaagggtacaagactaaaaaacttttggccacaagtcaaaacacctaatctttatgagtagttttgcacaatagacatatatcaaattatacctagaaattgttaaagtttgtcatatgaacatcgtatattgtcttcttagagtcactcatgctaggaggccaaaaatattcataaatcaaaaacaaaataatatcaagaatcaatacttattgttcgtttaaactatatatgtatatatgtgcgtacacaatactttctctcatgcgtttgtcacggtctcttgacgtgtacaatggttatgtgttttccaaatcatgagctggttggacttgtggtacaggtacagttactcaagctaattgatcagcaatacagaaccatatggtattcctataactttcttttttctttatcaccttatatttcaatgaaagaattgttttaacatatttccaacaaaaatgggaaccatatataaagaaagtacagcatgaggtgggaggatttaccactacaaaacaggcactggaatggccatttgtacggagacatcacccgataaagctgaatctctacttgtggccgaatttcctgctaaggcatatcccacggcgaggccaccataatggatgactgtattctcgcatctctggaactctctggcaagagaagctgcctttcttcttgctcgcttcgtaccggtaaacaacaaattttggagcaaacccgccaatgatggcgccttaaccaccttttcttttgtggtagccccaccactcctgcataactcaagcaatgctgcaactgcattctctttaccctttgctgttccacaacgcatcatactgatcaagccagccacggccatttcctcattccccactgcttcggccccacttgcctgcctaacaatcaaggccaaggcacctgctgcttcctcagcaactccttcatttctcaatgcatttactagagctgtcacagccctcgcctctatcattctcgcacagttatcaatgtgcgttgaaagattaaataatgctgttacagcatccttctttcctcttggagtaccctctctaagcaacccagccaaggcttctattgccccttccacgtatgctattcttttcttgtaatcatggactgctgaaaggctaaacaaagttgcagcagcattttccctggcctctgttgtttgcccaaacctgagaacttcaacaattgattctaaacacccttcttcatccataattcggcttttgttcttgtcatatatggacaggttaagcattgcagtgacagaattctcctgggcaacagggttaacagacaaaagaattgttcgaagatgtggaattgcaccagcttccgcaatgaaagcacggttttcccttcctgttttagctaataaacgaatctcgcgagcagcaacagtctttgcaacttgtgatccatttgcgagctgctgaataagaagagctgctgttgctctgttagcttcaagagcagccttagttggggaagccaccacaaagctttcggtgcactctggtgggtcataatggattccatgggcagtgcaccactgcataatcaaatttctcagtgcgcgattgggaaagatacaggttttaataagcatttggcccgtctttgggcatgtacagtgaccctcgtccacccacctggatatggatcttcggtcataagtctgtcctgttgagattatcacagggtctcgcatcaaatccaatgaaattgggcagcaaaagtccttcgggattgttataaaagtgtctgcaatttcctgtgaaagaatcccttttctcagcttcttcagagtccctcttcccaactctacttcgtcctcctcgaatccaaataacaaaaacctggaataccttgtaagcgccacaaaaccattaagaaccccaactgtaggttcattatctccctcgtgattcacaatctgctcttccaaaaactcaatctcatttctacaactctttgggtcttgaatccgtaatctcaccacaagaaaggaacgcaattcatccggatcaggaatttgactattctcaaactgatcaagaaatctaaagaagcgaatcctgagagcttcatcgtccttatcaataaacagtttagcacttctggactgcctccgcaagagttcaacttgctccctaacatcgtccccgagttcaacatcttccatgggaaaaacatctaaaagggtcgaaatctcttggttcaaatcatggaaatgacccgaaatcgaatggttttgaagcaaaagccacaacttactggattgagaacaatagtcaagaagtattttggagcgatacagaagcaaataaagctcctttaaacaaagctccgtcgtccatgagagactcaaacccgaatctctcatgtactccaacaataccagaaaaacttccatttttcggacgagggagcgagaattcttcctctgaaagtagaaacgcatgtcggaaaatgatgaaacgatctcggctgtcagggaagcaagggtttgtacgagagcgacatctgtaaggtcaaccggagccaaaaatgcctctaaagaaggcgatcttcgcctccttaacgacgagaatatcgccgccaaagccatcctaaacaataataaatttactataaaaaaatcccctacccagaacaacaaatacaattcataaacaacccagttactcaaatttctctttccagacagatattgatagacaaagaacaaattgaagagaaagagaaactcaaataccaaaaggggaacaaagaaaagagaaactcaaaacacccaaaaccgaagacttttatgcagtcttactcctccttttcttctacttcgtcgttattattggtaagctctggccgaagtttgaatcctcaaaagcaagagagaaagaaatatagacaaacgaatgaattcacaacctaatatttttaaattaatttaattgaatggatatttaattaattttgttgagccgaatccgcgttctcccgaaaagactgttgaatttgtaggtgttgggtttctctctccagagaaattcatgggtgaaaactgaaaaggactggaatgggtttatattcatacatattcctgtccattcgttttcttcttacctctccttactctacagttacttctcacccgtatttataattattatttattgagttatttgcccaaaacctttttaaatggtcaggtttttgcaactaatctccaattttaaaatttttgcgataaaactccctaaattcaagttctgttaacacttagctcttttagtccatttttagctgttaaataccatggtggaatgtacacgtgtacacagtgtacacgtggcacaattttattagtccatgtaaataaatatttaaaaa

SEQ ID NO: 266530 - DNA, 1844 bp, Cannabis indica
atagaaaaacatttaaaagttatattttcattaatcaataaaaaataattaagtaaactaatataaacataccaagttatcaaaaatataggccttcagctatactatatagtagcgtatcacttcacctgcacttgtgaatccttcgtgaacaacgggtctcgaaagaggcgcgttttccatacagacttgttcgatgaatacttcacgatatttgttttgtaggtagttcttgttatggacccagaacttgccattcatcagtgatttctccttcgcaacaaacccagtcgcaactttctatggctttctttttggctttagctgaacatgcatcgaacgcataattttctacattttataatcaaacaagaaacaatataatgggtaaattgattatatttataattttacatttgtaattcaacactattattattaattcttatgaattactattagtggctggtggtgttgatggagcagaaaccttcacagcacgtgttggtggtagtggtggtggagcagagacagtgtcagaacgaactggtggtggtggtggtgctggtggagcagagacataggcagcacgtggtggaggtgcttggggagcagaggcaaacttcgcacatgctggttcatttgattctcctccaacatcagaataagatgcatgtgacgtacccacaacgccactatactgggaacatatgacttgaaggagttcatttatttactcttgaatctgtctgttactctcctccgcctcacagagtcacctctccatctctgacaagagatcgttggcctcatccttctttttatttttagggagtggagtgtgaaaaaaataaggattttgtcacttactaacccatggctcgaacctgaccaccatactcatttgttcccagggccatggtcaaaatttccttcttcccttccacacgtattgttctctcttccacttgctttcgcaagtcatcctaaaaacataataaatggaattagaaataaataatgaaacataaaaatatcaatgtaattatttaaaacttacaatttgtttaacaatattcgttgttgggccctccacctcgcctttcttatttgtgtgaagtctcttccatactttagatctttcaatgttaatgagttggtggcctaactctctctcaatttctttttccatcttcatcatacaaccttttctagactggaggttgaaaatttatttttctttgttctcttgggcactttttgtctttgtcgtccactcaggatttaatctagatgccacgaattccttctaatctttctcaccaattagttcttcataaattttacgaggcttctcgagaaggtgggaagctacatatttgaattcttaaatacctcctgttaggaatattttccaatgtctccatctatctctagctcttgaaatggtgcttttctttgcctcctctcgtaacttgaaaaaactctgcaaaaattgacaatcagagttataagtacgaatcataattaatagtaagaaacaaatttaaggtacttaatatgaccttcatttcattccataatgcttctttaagtatagcatccaccttaggccacttgatatctcatggtagaatgttactctataccttttccccaacgttgtctgaagttactgtactcaacttccatccgcttctctcactcttcattttagtaaattctactcttttgtttctctccctatttttttctaatgcggtggtgctggtgaaggttcttctagttttctatgaggttcttctagctcaaatggtgcaccatgataatcactaatggattgg

SEQ ID NO: 266531 - DNA, 2903 bp, Cannabis indica
caaaattaataaataataacaataatggcttaccaaacaaaattaaaatcaaatttaattttatttttattagttaattttatttaaattaagttcaaattcgagtctaaacttgaaccggtgtccaagggcggctctaagtctgggttcgatgcagggtcagagtgcaggtacagatccgagtccaaggttgaggtcaagatcaaaatccgagtgaggaatcaagtctggattccgagtctgagccaagatccaagtcaaagtgtaaaatattaattaagaaaaaaaaaacatttaaaaaatttgtataagtgatatgtttttgttttcaaaattttaattattaattaaaaacttgaaaaggggatgcaattttacagaaaatattttcaattaattaaaaaagtattactaaatgcaaccaaacttaataacttttttttttaatgaaaagagaatgtacctataaaataagccaactcaaagctagccaatattccatacaaaagaagaaattataagtgaacaaaattgaagaaaactaaaataaattgctctctgcattacaaaggttggaaaaattaacataataaataagttctccatagacaaaagccacaaatagtaaactaaaagtcttacaacaaagcaaaatctgttgctagtttagcaagaatttttaatagaggtctcaagtgattggaaatctctgagttcaaatcttactaaaaatcaccgcctaccgggcaacttgtgtctgattttgtgcgtgttcgagaacctgactgactaacttgtaagtacgccccgacaatgccttggaatggtctatcagttgttcatagctgggaaaaaatgcatactattttagccgaaagaaaggagaatgaaaaaaggaaagcaaaaatcataacgatttcgggtgtcaatatgcatcaaaaacttacacattgggttgaaaaggttccatgattacagttcctgttttagagtcaatcttagcatctagctttgagtttcggataagattgacgatccatctctcagcctcttcatagttcaagtttagtttctcagcaaggactctgtcataaaaaaacaagttcttttaaattggaatattccaatgaaactatatttccatgtacacattattatataaatgcactctaagctaccaaatattaaatagacagctaccaatcctatcctaagatacatattaacccctgtggcatatgtaataatggaaatttaagatataaataatacgaagaagtaaaaagtcccaaaccccatatcaatgcgctgatggattcggcaataagtctcgaagataaatagtctggcattttcaaggaactcatctctcattggtaccgttgagaagttgccttcttcgagtctctttcctaggaaaggatcattcagtattacctacatttgtcaaaacaagtaacagtaagtaaagtccacaaatcactaattttgtggtcgaattggggccgatggacttacttcttcgcactctttcatctttttctgggcaccatcaaaatcataattgacatatacacatgctagaaattctgtgatgggatctttgtaagaatgctgctcctgctgaataactttaataaagtctttaaagttttgtctccttctcttgttaacgacgaaagcagtggccaagtagcgtaaaagatggggagcattggtttgaatggcgtttagatacctacaaaattttgaacattacgactgtaaataatagcgttatgaaaggattatgccatctaaaaagttattatgtgcttaagttacagaattgcatatgttcagagctaacaagtgaaagttcataaagaaaaacaaaaataaaattctacaactgtcagtaagatgtaacgaaacagcatttagatattccgattaaacaatagcaagcagtttatcagatcttcacaaaattgaaggcttctatgaaagtaaaagaaagcgacttaaatgaaaaagattaggagagggcatacttgtcctgattaaacagatcaatgatctgtgttcttccattgtcatggttgaaaaatatgaagagactccagtgcattaaccaaactctactttgcacctgattcataggtgaactgaaattctgcaataacaaaaacaaccaagacatgtaaacaacaaaacaaaagtaccccctacaaaactctactaagcaactaatttaggagtatagagatgaagaagacctttgagtcaatgctctctttcaaccgattaagctcttcaagagcaatatcccagttttgcatcaaaatttcagctgctagctttccccataaagcactcaaattcctttcactgtttgtgcacagagctctgtactggtaaagataatcagcagcgccagagtagttaccgcactcgaactgaaatttagcatactgatacaatgcctctatttgatctggcccaatctgtttatttttttaacaaaaaaaaatcaattaattaaccaaaaataccctcttagaagaaaaaaaatggacacatacactacatatatagatttctaaggccatgtttaaacccaaagaaaacgatatcccaaaaatttcattttcatatgtttggactgaatcaataaattaagaattctattttcagataaattaaaactttgagcgtaatataatctaataaaatttaaagcaacaatacatacaaaaaaatatataaattaaaaaaagtctcatatcaaattcatggtaaatatttcgcattcatctttcccctaccaaatgttttgtaaaaataaccattatgaaaatttttattagcaaaataaccttatatggtcgcagaaactactatagagtaaattaagtgagttt

SEQ ID NO: 266532 - DNA, 5454 bp, Cannabis indica
aaaaaaaaaaaaaaacataaaacgattgtcccattgattaatttttaaattaccaaatatatttgtcaatccaaaatccccttctgtcttttatgagtggaagatcatatattattatattatataaattatcccactttttaaattattattattattattatttaaaaagaaattctttcagtatgtgactctacacagccaaattaaaaaacgtttttcttttttcaaattattaaataataattgaagaaaacgcgcttctttcctttttctaatttctatttactcttcttcatcactcgatcaatctattcttaaattatttaaattatttatttattttattaaaaaagtgagttctctgacaaccgaaaattctttgctttctgtctacgtctttagttttagctatgttggtagttttgtcataacaaacccaaacggaaaacaactcagtcctttcagaaacaaaaccaaatacaacgaaatattaccttatctaaaaaaacaaaacaagaaaaactaaaaacaaaaattgaaaataatcccaattttttttcatattcgtttgttttttttctcattacctcacctgcctactttgtcattttaccaattccaccgccccctataaccgacccaaattctaaaaccacaattttcttctgatgatcaattatctcttcagtttgtttctccaattgatcaacggttgagattaatttactcttcttgattgtctagaattgaaccctaatccttcagaaaagtttgcaggaggaaagagatagcttataataagaaattgagttttggaggtgggttttcgaagcttgattctggttcaatggcggattacgggaagaagcccgtgtcctcggagaaacccaggttctctttcttcaatcgttcgctttccatgtaccctccggcggcggcggcggtcatggccgaccctgttgattctcccctgaagcctactcacaccaaaacctcatctctcgaacgaaccagctcgttctctaaattctacaattcgatggagtccgttcggtccacgagtaattcaatcaaagggaaggtaaagaagctatgcagtatcttcgagacgacgtcgaagcccgctttgacggcacctccgagcccatcggacgaaccaacgaatttgcaatttcaatccaagcttaaatcctcgaaatcgatgtgttccgatcaccgactctcccccttgaacagctccacaattcgattgcctggaaccgaggaccgaattgtcgtctatctaactagcttgcgagggattcggagaacgtatgaggactgttacgcggttcggatgatattcaggggatttagggtttgggtggatgagcgtgatatatcgatggattcggcgtacagaaaagaattacagagtgttctgggggataagaacgtgggcttgcctcaggtgttcataaggggaagctatgtgggaggtgcagaggtgatcaagcagcttttcgaaacaggggaattggcgaaaattctcaaaggttttccgcttcgggcaccgggatttaggtgtgatagctgtggagatgtaaggtttgtaccgtgcctgaattgcagtgggagtaggaaggtgtttgatgaagatgaagaaatgcttaaaagatgtttggagtgcaatgagaatggactaattcgatgtcctgattgctgttcttgagcaaacttgggcgttgaaattctactctggtgcgtcttttaaatgctcctttgttgatagaagaattacattaatttgatgtgaagtaataaataagattacagtatgttatggcttgaatttgggatccaaatatctctttggaggatttgttggtcttcttttcttgaatgttcattggttattgggattgatgttcattcacttgttgaacagcatttgaataacaatttatgttataaaaaaatgcttactttgggtttgttggttgtgttgaacactgaccagagtgtctttgctatgatagtgtgtaaatattttagtgttgtaattattgcaaagatttgcagtattgcataccataaattgtaatgagattggatttatatataatatatatatatataaccgaagttccaaaagttggagtcgattggtactcatgtttctgcagcttttatgtatgctaatgttctcgcaagtttggttgatgaatgatggtggtgaagtgtttaacaatgtgaattactcaaaatgcttgattttgttgtatacgaacttttgacctctaaccagagttttcaatcttgtaactcttggcattattctttggggtatatagattaagagttgtttgttttgttgctttgtgcatgttgctctatgagggaactaaaagggtttttgtaggaggatgaagtagatttgggtcaatgccggttgagttagtacagggatttttagattagaatgaatcaagtaatggatttagaaatttatttgttgtaagtctcatttaggcaaaaattagctggctcatagaatgattattttacaaactggcccactttttgtccttcaaattgaaatgctaaacaaaggaagatggtgttggtgttggtgttttctactactcatattggacacaacacacacacaaaaagggtgttattttctcctcttcttgcttcccttggtaatgtgattcttttactcctcccaaatacagtgttaaagatgatattgttcttggcttatcgttcatgttttactcctcccaaatacagtgttaaagatgatattgttcttggcttatcgttcatgttttactcctcccaaatacagtgttaaagatgatattgttcttggcttatcgtttatgttctttatgtggtgtggctattaattgatgtttgtgccatactttaataccttcccgctcacagagtagctcaagttgtcatatctgagttgaattgataatgaactctctccaccaaaggattgaccttaaaacattttttcattttcaaaatagcctatttacccagatatgacatccaggacacactgaattttttaactgttgtactccactcttaatcagtacacaaattttattagtaggaaaatgatattggaaggtgctgaggttttggaagaagacggtctgtgttatatacgtaccctaatatggtctcattacattaaatttttataccaatttgccaaactaatgtggtgaattcagtgttaatttgaatgcatattgatattgtagggtcagatttggctaaaatcattatgaacagatcattgtagagaggttcctaatctctcatatgttggagttcaatttatctgaaactgaatcttgtgaaacatcatgaattgatcaaaacaaattcgtaaccagggataattcataaaagcaagaaataacaattgggagaactagcctatggagattctcaactcaactggaaaattaaagtctcttttcaaaatactaaaatatatttcgattgacatttccttttctttggacactgacaacataagcatattaacacttgtttttatcttatttatatataaaaaggaaagccctcataatcagaggcaaaaacttctgccgtataacgacatcttaaaagaggcaaaaattttgtttgggaaaatggtaaagtagatggtggatgataattttcactgttacaattacttacagaatactaaatagtactataataaagctcatagtctagtaatgtttatgtacctaaccttaattcttcttattaccagaggagccaaagccaattagctcatctttgttttaataaccccaaaatcttttttactttttatttcttaaaaggcaatgttagtaacaaacaaattgctttttcccacctcagaaaagaagtgtagaattatgcttttcataaagagcctttattctttcgtcttttcttacaattatgctattgattagtagaccaaagatatctttggtggagctacatttcgagaatatttcgaaagacccacataattaaaatcaatgtcatattatttctttgctttcccacccaaaataaaattattaagtttcaataaccttctcaaaatagtttctcttttatccaagtgttcaacattttttttcaagtcaactaaagccacttcttttatactaattaattatcaaatataatatgcacaattagtatctgtaaaataaaacaagctaatgaatgattagttacactcaatattaatatgggtttattatttatatatactacagttttgcctggctctatattttggtgtttcttattctcattgggccatctaatacaatattgcacccttttctttcttaaaaaacatcatttgaactgctttaaaccatagccttaaatttaatctctttctccatcataagcacaactagtactactactaggagatttcacttcctagtcctcagatctatcatatgaagaagtgccttcaaaatcaaatgacagatttacattacatcttttgataaataagaatttacttgctttttgctaggaaatgtaaaaggtacattactgctactaagtctaaagttgaactaccaatactaccaacagtcaaatgctgtccttttttcttcactcaaaaccaatagtttgaaagcattttgaaatgtaaaagtttcctatgaattataattaagatagtataataacttaattaacatgtaaatgaatatatgttatcaacaattgtaaatatatattttttaatctataataaaaatcattgaagatttaccattatcattctttttttaccataagggatagttttgtaacaaaaataaagtcaaagttatataaatggtgggttattttacaattagaagaaacggagactttggcttatttttgtttgtttattagcttctcgtcctcgaattttatagtggtattgagtcttgtttttttttgttcgttctcattgttatataaattctcaatgagattttcttattattatcctttcaggttactgttcatggctaaatatgtgctccattaatttgcaagaaattgtttaagaaaaaaattgcttcaaaaacagaatcctaataaacaaataaaacatggtttcattaaaaagaaaaatccactgaaatattgtattgataacaacaaaattagttccaatattttatttgcagtcccagtttaaacataaaaacacagtgagaaattccaataattccattaaaaaatttattaaaataacaatcagaataatgctgaggaagtgaggaagtattaataattattcataagaggataagagacaaatttgttagttaaagaatacataaaattaaaaagctaatcatgatgattgtcacaagacaacataatcatctttattcatagata

SEQ ID NO: 266533 - DNA, 1661 bp, Cannabis indica
gcataaacccaatgatttttttttagtagcataagtacccaatatttgtaaaactgtaatttttctttattttcgtcagtacagacttcattttaaatttattaaataaaatttggaattaactggtattacatattttcgtccaaggcagtttataaacattgagtacttatgccgctaaaaaaaattattgaatttatgtcgcttacaaatccaaaactataagtacttatgccactatttacccttgccattcactttcaagaattacattacatactacttttcacatatataatgaaggaactgttctgtataagaaaatgttatatgaaattacccaataaattcattgcagcgcaaagtgtgcctccggtggcaattagatcatcaactaccaaagcatgttcgccaggtttaacagctccaacatgcatctcaagacgatcccttccatattccaaagtatactcttcaaagatgacatcacctgccacgacaaaagattttgaactagcattagaggaaaactttcagtggcatgttgttgccacccacaagatgtagaaattaccaggcaacttccttggtttcctcagtggaacaaactttgctccaattgccaatgcaatgggaggaccaaaaatgaaaccccgagcttctattcctgagaaaacaaaacaaatgttatatttcaaagcactatttcggtaattctaaggtggtgtttgtattgggagtttgggttcttaggaatcaaaatgtataatcaaacctatgcttagtatgattttaggtggcgtttggttggaggtaatgaaatggaatggaaaggaaaccatctccattccattcctttgtttagttgcatattaaagtgttgaaatatcattccaatagaatggtctttccaccattttggtgaaatgacaattctattttgatatgaaaggaaagaccattccaatgcatgatgaaaggaaagaccattcctagttcaattctcatttctatattttcattcctcccaaccaaacgccaccttagtgttagatcaaatctatgggtctcaattttaagtttatttttgaggtaatctcaaactatttatggggtgtttggcatgagacaagacaaagtatttgtatttccaagtagagtctaatttttaaattaaaatagtgcttggatttcatattccccccaagtttattccttccagctctactttctctaactccaactcacatagcaaacacttcattaggtggcgtttggttggatgaaataaaaacatagctaaaatacaaatgacattccaatatttaaaaatgaaaccaaacaaataaatggaacaaaaattatttctttttcatttcattacctccaatcaaacgccaccttaaacacttaagtttgaaattcccttattctcaaactaaagccgaccatttaaaattcttataccaaaatctggttagtgttcaagaatacagtaaacaaatgtcaaaaatcatgttgtgttcaacaaacagcaacataacgacaatccttagagaatgttttctattaaagaaaaaaaaaagttgttgtggagaaacggaaagaaaaagttgaagtttgaggctatggggtcatatcattcgaatagtttgggttga

SEQ ID NO: 266534 - DNA, 870 bp, Cannabis indica
cccctctgcagctaatgtgtataaaatattgtagtgatacttcaatgttagctttttactatcaattaaaatagaaagtttttccctttaacatggtatcatttgtcatcctccctaatcctaaccctatcaaacactaaactgtttccatggctcctagaatctatcactttccgcctccgccacccctcagttccccttcccttccgctcacactgccatccacaaccccgacgtcacccaccatcattgtcttcctcacgatgaaccaaacagctcattcctccctgccaaccttagcgtatttacatacagggactatcttttatctaccagttttactcaatcactttcaaatcataatttatccatcaaaaacaacaaaggtacttttcttgcacttttaatctattctgataatattatggttgcttctaataatgatactacgtgctcttagtgcttttaaacaacaacttaattcagtattttaacttaaggatcttggtcatttacgttttttcttaagcttggagattggtctttcttcaagtggcattcctgtgtcacaatggacattcaccttaaaacttttgattgaaggttacttgggagcttctactctttctacacccatggaactcaacattaagctctcttctaatgttgggaaaccattggaagatctgaaagtttattgcaacatcattggtataaactgatttacttaactattactcgtcctgacatttcttttgttgtcaataagctaagtcagtttctttctacccttagagctcctcaccttcatgcagctcaaagaatattacaatacctcaaaagcatttacctcaaaggcatttatggtca

SEQ ID NO: 266535 - DNA, 4736 bp, Cannabis indica
ggaagtagagaagtgagatacacttttaatttatgaatgccacttttggatcttgtctgcattttatgctgatttgtaaccacaggtagagcaggagcagcatttgtaaaagaggcaaatgaagcagttgcattatcagaggtgacaggtgtaacaatagatgaagactttgagtatggagatgaagctggttggaatgaacctgtgggagtacctgcattgtcactgtgagagctagaaagagagctaacattatattggtaagattgagaatttggagtaatagttatttctttaggtggaatgagtggaggagtagttgagatattgggatgtttagggaaagaagagacagttggagtgggatttagggagaatgaaaagagtattcattaaatgtcacatctctggatagatatactcttccatatttgcgcaggcacttgtagcctctgtgcacaaggctataccccaaaaatgtgcacttagtggatctgaactggagtttattttattgtaaggtataacattatggtagcatgagcaccaaaatattttcagagttgcgtagtcagggatcgtatgaaataacatctaaaatggagatgaaaaattcagttttgggtaggaactctgtttaaaagatatacatcagtttgaaatgcctcatcccagaattttaaaggcatatgtgcatgtgcaaggagtgaaagtccactctcaactatatgcctatgtttcctctcaaccacaccattttgctcatgagtatgagggcatgattgagtgtgaatgattccacattactcaaaatttgtcaaagggtttaaattcaattccacgatcagattgcagggctttaataggaagattaaattgtagttcaacttgcgttttaaaattttgaaaggtggaaaaggcatcatatttgatttttaatagatataactatatgtacctaccgaatgcatctacaaaacttgtgtagtatgtgtagccattgaaataaatttgaggtgctggaccccaaagatctatgtagaccatttggagtggttgtgtgtacataacattggaagaaggaaatggaaatttatgagactttcccaaacaagcatgacaaaaataaaacaaaaattgttttattccttgattgaatgttacaagtgaatattattttttgtacaataggggcagacgggtgacccaatctgttatgccacaactaaaaaatagatggactgttttgagtagaaaggaacgtgataaaattacaagtagaggagctagttattgggggatctatggtgagagtggtctccaatttgtgtatgatcaaacacatagaggcccttgtcaagcttgccaatgagacgtgtcttcttgatcacctggtcctaacaaaataacgttagcatggaattcaaagaagacattgttatctaaggcaaattgagagacttaagagattatttgtgattgaaggtacatgtaagagatttttgagtgttaagagttttgtgttgataaggagatgaaaaagaggattgaccaatatgatgaattctcaaacttgagccattgccaacaaaaatttgctcctggccaaggtagtcagtgctattgaacaagttttgagcatctggagttaaatgatttgtggctcctaaatcagggtaccagtttgaattagacatagtatctggggtgacaaccattgcttgcatttgacccatggatgaagagggtgaaccagaggagggggaccctggaaggatttatcaaatctgtgaaagtactgtaaaacaaaatgacttgatttgtggcatggcaaattattctggattggtacttttggtttgaccattgacctccattaccacgacctaaggatccacagacaccttgattgaatgatgaactggtgtcatctccatttttgaaagctccatgaggaggaaaattgttgttaaagcctccccttaaattggtgtatcccccacgatttcctctaaaagatggatttcctccattttgtgccagatttgcttcagcataggagatgtctagttcgttagatgatttgtcaattcttgcttcttgagccattaacaaggcttcaagttctgaaatagtgactcgttctttcctgatgttgagggatgtgtaaaagatatcgtattctggcccaaggccattgaagatagcttcaatattatcagatgcagtaaaagcatgtccaacagctttgagcatatcaacaacggacttgattttcagaaaatattcactaattgaaatagagtttttctttgtattacgtaattgagtttcaagttgacttatcttggagatggtctgatttgtgaagaattatttaagcgcttcctaagcatcagttgagctttcataaccgatcattctagtattcatttgatcgttcattgaggatagcatccatgacagaaggagttgatcttgagcttcccagtctaaatatgtaggggagagattttcgttgagacgattagcatctgagtcgtatttgggaggagcagagttcttaacaaagaactgttgcaggcgatttccacgaacagatgccatgatttgatgtttccatttttttggtcgagttttggtgataacaagtgtttgaaggcgactagttctttgaaagcttgttggtgagccttggtagtagacgattgctagccatagttaaatagagaatgggaatgaaggatcgtgagcaagagcccaaagctctgataccatgttgaacgagagagagaaagaaaaacagagtttttattactattattattgaattgagaaaaaggtacagagaagtatatgtatacaagcaaaagagaggcatgacttaacaacacttaaccgaattcctaactgaaaagtctgctcagcaagatacaaaaagaaaacaactaactccttcaacacaatgtaaattatttagaatgagatgtctattataactataatatacaacgtcatataaataaaaaattaggcaataatatctctagataccataaataaaaaaaatcattatgacagggacaaaagtaatattcctacctcagaatctttctacatatatatactgatattaagtatgcatcaaggtcgatcctaaattcagccaaaacaatcctagatcctagggcctatccagctcaaaagcccaaaaagaaaattttattttgcaaaatatacatttctataatattttttaaattattatatttcttcaaacaatgacctattatttttccctacgactcaaaaaatatcaagccaaattctggtataagtttcatgttacataggcacatatattataaggctaataaagatccctttttttgaactttgtcatttaacaaattgtgtcctccgaatttttcaaacagctttaaattttcttaaactattaaattattggattcaaggacttctatttaattttactaatgggcgtctaacgtggacggaagttcgggggcacaattcggtacacttctaagctcgagaggtacgatttggtacatatacaatcacccgttagacattcgttagaaaattagaagacaaaaatccttaaatttaacaatatcaatagttcaggaaaaaaattttacggattgaaaaatttagaagacacaatctagcacatgtcaaaaagttcgggatgagaaaaatcccaatttattagtctatttgtaatttataatgtaactaatgtgaattataattgactgactcgtaataaagaggtgaaaagatcatatttgaacccattgcatttgcatttagatttatttttaatagatattttttttcaaaagtatttttaatatatgtttatacatatatatactaggtattagtaacatataatgcatgtttgttgaaagttgtattagaattactaacctaattattattattattattattattattattattattaaataaataaatataatacaattcttatattttttttaaaatataaaatatattttgaaatttatttataaaaaatatctaactaattttttaaactaataaaataagtaaatagatttagatattttaaaaatataactaataaatttgatataaaatatgattaattaattaaattaacatccaatttaaatttaaattaagatttatataaaaaataattatctaattttgttgatacttttaaataattatctaagttatattttaataaataaattaagataaataatggagtttttcctaaacagattagggtaggcgcctactatgcccttatgctaaggcacgctacagtaattttccaaatgacatactgccttgctaatcaagggctttatttcaaaatcgtgtcaaatcaaaacttaaataaaattaataaattttataaacatacaaatgtatatatattatataaccaggatcccgtgccaaaacatctaaaaacattttaaaaatatttttacaaacttgtcgcatagcgactacaaaatatattctaagatgtcccgagaccgaacactccaattgctctgtcttgacatgtacaatcattacccgagctcggaactcactcctgttcatcttctgcctttcttttacctacacaggaaagtagaatttgtgagccaatagactcagtaagagaagcatacaacaaaatatacataatccca

SEQ ID NO: 266536 - DNA, 7842 bp, Cannabis indica
ctaaaatctatagtaaaaatagagaattagatattggactaaaatagagaattgacccagagcattacttcatgcttttaagctcatttttttttgtactgtttccccttagtccatgggaaatcaagctcttttccccttattccggccctaccatgaaccaaaaagctctctcttttcccttttgacatatggtttccagaagtatttaggaattctaatatgaccaacctcagtaataaatataaacatatatagtagctactaaattaaaatcaagctcactcaatgtggttcactactcactatattagtatacaaaaccaaaagcacaaaggaaaagtgatatgaaggccttgaatgtgaattggcgtgtgcagctcaactatctttaaaaggaacattctttccttttgtgtggtctcccacatgaaaatcctgcacatcacttcccaataacaaagtgtttattttttcattattattgttccctttgtaacataacatttattcatgcactaaatttcctttaatcccttatttactatcaccatggccatgaacttgcaggaaacaaactccttcacacttcattccaattctactttggaagatattctgattgagaagctactcctgagccatgacccagatgaccgccgtcttgactcggatcagctgcttcatgccatggagaatatcatgttttatgctactatatcagaagtactactaattaaccaatctccccatctctaattccctctattttttttttttcaatttcctttcaaatatgcatctaagtcatctgggaatgaacacaatattgtatcttgagttacaatctttgatcagagtagttgatctattaatcttaggacttttttttcttcagatttctgatctagatttcattgacaatgatgaggggaaaatcacagacattgaagcttttggattcaaagaaactctttcacatctcattaacaagatctcacatgaggtaattccttctcttctctcctcttcttcccaactctcattaggtacatacattgtgtgatcaaatattcttgaaacaatgacagatattatgcaagtgttctggtgaaggaagtctacatgaaaagactatggtcttgttcgatttgctcggaaattacagatgggatgctaaagcagttatagttcttgcaacttttgtaaaaagctatggtgaattttggctcttaatgcagatatatccaagaaacacattggcattatcagttgcaatgcttaagcagttgccaagcgatttgagcgccttcactcgccaatttaaggccttaagcttgctgatgaagacagttatagatttaaccaagtgtgtcatcaaatatgaatccttgccactttcacaagtaaagttggataaggagaacaagtctattactcagtataacatctacttagctgtttattggatcatcagaagcatcttgacatgttcttttcaagtctcagctttgaaagccatgacacctgtgcaagtacattctcttgttcttcaattccacttgctttaatcattcttattttaacaaaaatgctttaattaatggatgaattatctgattatatattcaagtactcagattcaacaacaattgcaacatgggagctctcaagtctggtcagtagactgaaagacatgtacaataacctcaaccatcaggtggaggaatgcagtcaacaaacaggtcactacttaatacttcataatacaattttaaaaattttactcagcttgatgaattttaatttccttatatgtccatatatatgtactcaatagagtcacagctgtatcaaagtctgttgaataattttaatgaggaacacagtgaaaaccaagaagtgcttcaaatattatttgccaccagagataactatccactactagactgctccacacaagtaaaggtatgctttttctttttccaagatttgaaaacttggtttgagatgactatgtcagtttcattttttgcttaactactttaaccttcttatttctgtccattgacagcttggtttgccagaacttaaaaacaaggtggtcttacttctgatcacaaagccagagcttttacctatagaagagttactcttattggttcagcaaacatgtgataatccttacaacgaaatactagaggaaagatatgaaattgtgtggattccaattccagattctaattcttggactgatgctgagaagagaagtttcagagttctgtcacagtctattccttggtgctcaataaagcagccatggtcactcaactcaggagtggtgacatttatcaaacaagaatggaactacagagatgacccaattatggttgttctagacacacaaggaaacctctcaaacttaaatgcattagatttgatctttatctggggtgctaaagcataccctttttcaaattcaagagaaaaagagctttgggaagaacagagctggaatcttcaacttctggtagatgaaattgatcccctacttactaattgggtaatattcaactttcccaactctgtttttttcatgtatttaccaaagctatataaatagatgcttaaagattaaacctttgacttcattttcaggtgaatgaaaacagatacatctgcatttatggaagtgaagacattgattggatactagaatttaactcaaagcttaagaagattataaactcaggtcttcagctggagatggtctacgtggggacaaggaatgaaagtgaaaagatacagaaatttctatctttaattcaagagggagatctgagagactcattattttctttatgtttaaccaaaagaaggtctttctggcttcggttagaaagtataataagatcaaaactcaagcttggttactcacttgatacagatcaagctctacaagaggcttcagctctggtcaataatgaaaatagcaacaagagttgggtggctatagggagaggatcttcaaacgacattgttagagttgaagaaagcaaaatgatggagtgcttaaataggtttctggagtgggaagcaaaagtgggaaagttgggatttttaggtgcacttagaacagccattgaccctccactaagtgatgagccttgtggtcatgaatccaaaaccattccttatggggaagaagaagaattggtggaagacatgagagcttgtgaaaagtgcaagctaccatggaagaagtttgtcatttataaataaagtcagttaagagttgttaatttaggccgctctaatttctgactctcgaaacagaataatttgttttgttaacgtaatttttggttcatacaattatgacattgagtactgagtattactactacacacttaaataataagtatttacatagttattaatgtggtgatcactattagagttaccattcactatagccgcttttattctaatttctagtagtcgtttgtgatccgttgtgagttcaaaataccgctagtccaaaaaaaaaaataaaaaacgagccaaactaaaaaaactttggttgcttcccctttaacttctcgttgtgagttcaagcaatttgtcagttttcagtattgagtttttgacctattttaaaatttacaaatttcatgatgtgtacactcacaaattttgtgtgattctttaaaatgtcacgttcggccctgtaattttttaaaggtcgttcattatatacatacttttcaagctcaaaaaaaatatatattagagttagtttcacattaataatgtataaaaataaattattatatataaaatgaatagactattctttctattatcaattaattttgaaataaaatctggtacaccatactgtacactcatctaatcctgctttaatattttcaggctctttctgtactgcatttcagccataaataattcttctagaatgcaatgaatataattctgttagacagttttgataatgtgtgaactgatatgttaatgcaatccatatcttttatcatacacctttctttctcccaaaatattattgctataaccaaaataatctattttaattattgattttttcataatcgtatattttttggcagtgtaaattatttaagaattctctaatattatttactatttttgagttagtaataatctcatctatttttttctttcacaaataattcttattaattacaacatcttttttaacctccaatgattggacatgaggttcaacaataatcaattttttttggggtccaaattaggttcaaattcttcattttactgtgtttttatcttaaaaaaaaaacacacacacaactgtgaagaaactattcgattgtgtttacaatttacacacacccatcttcatcatgggtcaatcttcaaagacgattattttttttttctactcaaactctcaaccttaactggcttctcgtacagctattccaactattttgcggggaatcgagagccaacattggggacatggcgtccatggcaaataggtttcttcaggcctacaatacaccttttctgataggtttcccaaaggattttccttttcattttcctcacatgttttacgcttcaattgactctaacagggtacgttgcttttcattttccttttaaagcatatcttgttcttcaataaaatacaaaaagcatatcttgttcttcaattctcatatatattcatttatggaagctttaaacacggtttgttttttggattcccattcagcttcatcgtaaatgaatttttttatatttgactacatttaacagtgtgcaaacttgttgttactattaaacaaatgtctctgccaagagtgaatatattcatattactttgcttgctgagaacaatttcagaaagttctaaaacaaccaatcaaatgggttgtcactgattgtgtaaaagactctatcttttagtgtttttaatttttcttttttcattggcaaaatttcttctacacaaaagagattgagttaaagccccacagtttatttatttaattattctgaaaatacagcatcactagtttttttctgaatgaaacaacatgtaatggcagatgcaagggattctagttttgagaaagcaaccaaaatggcaattaagcagtccaaaggagaggttgtttcaactcattctattttctcaaacaatgcaaggttgttggaggacaaaattattgaaactcatcactctgatgagcttacatttgcattgaagcctgttctttacataattgaggtcatattttctcgtactacaactgatcttcatggaaatgttcaggtagaggaagcccactataattgattggtcttgcactttcatataatatatatatttacatattttgaggtgaagtgatatagtaggttttgtcattacaggcgagtttagccaatgagaaggtgctgtattctgaccaccgagacatattgtttgaacttccaagtataactgctgcaatttcccgcgaggttaagtgcattgtagctaacagaaaatgaaaatatttgctgttttttagtcttgatatggggtaatatatacatcaaaaggccattcttgataatttttttgcttatcagctatgtttttatttcccaagacaggtattttgtgattggtttaagggggttgctgcacacaacacaacaatggacatactacaaattatcagacattatagatgggatgcaaagctggtacttgcagttggatcttttgccatgaactttggtggatttcggctggtgtctgagcttcactataccaattcaattgccaaagcagtggcgctccttgagaattttccagaaacattggagttggcagggattttgaaatcaaagctccaagatatatttcttgtggtcaaggcaatacttgatatgacaaagagcattatagaattatatgagctttcccacaatgaatatttcacccctgaatcacctgaaattatagctgccactgctgatatcccaattgctgtttactggaccattcagagtacagtggattgtgcttcacaaattatgagcatcgcagccatggaccataagtatgttttctatgttcatattaacagttcagagcttttgttgatctgtatgtttatatattcaaatagaggtagagagttatgctaaacttatgaatttctgaatttggtttatctcagatacttatccaagtcatgggatttatcatctttgggccataagcttgagatgataagaagccaacttgtaatgaaaattaatctttgttataaattcattggtgagctctataccttcttaatgtgagtgaacttttgcccttgtcctatttgtcactagtacctaacgagtaataaaaaatcgtttcattcagaaaagaagaaagatgatgaaatattcttttcattcacaagagttttggaaacatcagatattgataactcgaaatccctcaacattattttccgagagaaggatggttctcaacctatgctctatgattgcctccatcaaaatttggtttgctttctgaatctcagattttgttttttcaattttcaaagtatcttgactactataaattccatcagcaggccaatagttgagacatatatgattgtgaactagcattcaaccacatttagaaaacaattataattgcttgatttttttattttaattttgagattgaagaagatgcctaccatgtaagtcaaacagccctgtgatgtttaattttgaattaaatcatctctagtaattttatgtatagaattaaagatctgaaagaagttaagaatcaatttaaaaattcatgaacattctgtgttgaagaagatgcttgtcatgtgtatatagataaaacaagtctatgcaattcacctttaattaaaccatctctaatatttataattatcagaaagaaactcttaacaaaatcaagcgctcctgtttctagctaattaagttctttattattgtaacaggttcctattgaagatctgaagggtaaggttgtggcactatatattacagacctcaacattgtctgtgaagattatttgatcttacagcaaatttaccctgaaaagttggatgactacagcagaaaagagaaccagtatgaaatagtttggatccctgttatggataattggacaaaggatacgtaccggctatttgacaaagtgagagatcagatggaatggctatcagtgtgtcatccttctcagttagcaccacaggtcatcaggtacatcagggagacatgtaactttgtaaagaagccacttcttgtcgtgatggacactgatggcagaatcgtgcataaggatgcaacacaaatgatgtgcatttggggaaatcaagcatatccttttagtttggaaaaagattatcactctggcagcaacggaattggacaatttcccttcttgctgaaggaattgaccatatttgcctacttgggtaggctttacagccatttcaacaatctttttgacatgttatgtcgtacgtgcatacactcattgaaatttcttataaaatcttaaacttttcagattgaagaaaggaaacatatatgcttatatggaggagaagacatggaatggatccggagtttcacaaggactgcaaaaggagttgcactaagatatgggattgagcttgagatgctttatgcaggtaagaacagatctcgggaaagagttgtgaaaaagttaatcaatgttactcaacgagaaaggctaagc

SEQ ID NO: 266537 - DNA, 1358 bp, Cannabis indica
aaataaaatgacaaatcattgttttgttgaaaaaagttctcgttgtattgtatggacataaaatacacaaattatactattaggatttcgttctaaaggttccttttataaacgttaatttgttttcgcaaataaaatgggagatgaaatttatgatcccaacactggtaattgtgccatttcatgttttatttgaatcggatcagaaatatagagtcctcagcagtacaacctcaagctcaaattggaatagaagaagataatggccctcaagagcatcaaggacaatgtcgttgcaagctaacaaagtgcttaaaaatgtgagttaacttctatatggagctctctaattcaaatgatcacaaatttgttgtttacttcttttaattttatttgtcagacactcagaccataaatcttgagtttggcatattttaacgaatcttttgagtttaatatgaaagagaaatatttgaccgtgaacatattaaaggctaatgatgtggaatataaacaagattattattttagacagactttaaagtctttgaagtagaaatcgtatttcttgtatatattgataaattaatttagtctctacctcagagccttgaatggtatggcttactaaagctactagatttgattactttcatgacgatgatctacaaattgtcaggtactgtgaatgcttttcttctggattctactgcaatgggtgcaattgtattgattgtcacaataacatcaaaaatgagcctgcgaggactgcagctgttgaaagtattttagaacgaaaccaaaatgctttcaggtcaaaatccgctaacagcttgcatgtaaccccagatattaaggtatgcaggctatagttgctagaatgtttccctttttctcaggctatagtttgaaattaggtggaagtaggatttgtttctgttgttcttcaatattgtcttgtaacatgggttttatatcactgaaattggtcttgatgcgacttaaggttcagaaaaagggcactacatccgtaagaaaacaacaaaaggggtgccattgtaagaaaacattttgcctaaagaaatattgcgagtgcttccaagctaagatcctctgttctgaacattgtaaatgcttggactgcaagaacgtagacggatttgaggagagtatactatcacctcagaaacattatgacgcagaaacctctgtcaagagggccagggagacatcttcttcaatatcaactaaaaaagaaggccaggtactcttctcgtcctaatgctacaaaggcagagaatggcttcactgaacttacatgaacacattaaaagaaatttgttattttatttttatac

SEQ ID NO: 266538 - DNA, 3043 bp, Cannabis indica
taaccttaataatttttcccatatttttgaaaatagcccattagaatattgttaaactgggctcatttaaaaggaaagtgggctattagttagggcccatattttcgttcagtgattggcccagaaccttcgagagagtgacttttaaaagtcctgtcttatttgatgtttgtctacttcgattgaaaattgaatacttgagtctcttaaccaacaagttataaaagtttggagttctgagttttggtttctcattcatctgaaacaaaatatctcattccgtacgatcgaacagagagagagagagatggattttgagctgagaagagcgagagagaagttgcagaaggagcagaaggagcggaaggataaggccaagctgaaagccgatagggagaagaaggctaaagaacaggcccagaagcaaagggaagccattgaagctgctcagagatccagacgccttgatgctgctgaagcccaactcaaggttcttatttctccctcttcttatgttcagataaaataaattgggtttgaaatatttcacccatttttattttccttgtttgatgaattatttggttacttatagaatttttagaagaaggggaattataattcttgttactttattttcattttcttgaataaaattcatgagaattagaacaaatagataggcacacattaatctcataatttttcatttgataaattaaagagcgttttgtaacaatgaagataaaattgaaagaaaattctagaagagactttgtttacatagctataattctacaaataaaaggggcagaagaaaaagtagaaagactggaattagaattaatatttaaatacatatgcaacggtcttgatgtatatttatttgttgatgtattgtatgacttttgtagtgatttgtcttatttacttgtcttgcaccttaactcaatgccttctcaaattttttcaggctgatcaactaacggaagaaagtttacttgctgggaggggaatcatgttttatcgtctactggaagctgtaccttttcagggtaatggagataagataaaacttccaccatcttgcttcaacgaattgtctgatcaaggagcttttgacaagggacctctgtacttccagctgtccccagttaaagaagagggttcgttaaacaccaatgctgctgatcaggaaagtcatcggaccactcattcaggtgttttggagttcactgcagaagaaggttttgttgggcttcctcctcacgtttggcagaatttatttgcaacagacacattgactagtcatatgattgaaattcgttatgcgtggctaccaaaaggtacttatgctaaacttcaacctgatagggttggcttttctgatttgcccaaccacaaggctatcctagagaccagccttcggcagcatgccaccctttctcaggatgacttgttcactgtcaactatggggagcttacatacaagttacgagtccttgagttgaaaccttctacaagtgtatctgtcctagaaactgatattgaagtagatataattagccctgattcagctgctgagcaatcagagaagaatgtattaaaaccactaacatttggagagccagattctggcattgttgatgaaggaaattacatgtattacaagttctctgtagacaatgatatttgggagatagtttcttctggggctgctcgagttgaggttaggattgacgcagagactgatggtggagatactgatctttatgtatccaggcatcctctcatatttcctacccagcaccagcatgaatggtcttcctatgatattggttcgaaggccttgatcattgcctctacagataagaacttcacagctggtacttatagcattggcatttatggctttaagggaaaaactaagtaccatgtgtcggtgagtgttcaggatgactgtaatcgtacagtaggtcaacaagctgtgtcttcctcttcgtctacggagatggatactgtagagtgtaggaactgcaagcgtcacataccaagtcgaactatatcactgcatgaagcctactgtagcagacacaatgttgtttgtcagcatgcagggtgtggagttgttcttagagttgaggaggccaagaatcatgttcattgtgacaaatgtgggcaagcttttcagcagggagaaatggaaaagcacatgaaagtcttccatgagccagttcgctgcccctgcagtatagtccttgagaaagaacaaatggtaagcaatattagtttcaagttttctgccgtgaactttctattctcttctttgcattttcttcaagacttcaaatcatatttttatttgcacattccaattttgttgcattaagttaatttcatgcatttgacttgagttcaaggtcattcttcttcatgccaatgcctgtgtcagattcaaattttagttgtcattttgcattctgataggacagcataaaccatcagaactatcaaaaatcaatatgaaaagatatttgttagtattgttactttaaatatggatttggccggactttgttagtattgttactttgatagttggaaacttctgttgagatgacaaggctcaattgcaattgacttgattcttctaaactagtcgcataatgtatgcctgaaacttgtggcatcttgcgaaaagaaactcaacactgttcttattgttacgttttgcaggtgcaacaccaagcttcggcttgccccttgcgtctaattgtatgtagattttgtggggacatggttcaagctggaagctctgctgccgatgctcgagacagaatgagaggattgtgtgagcatgaaggcgtttgtgggtcaagaactgctccatgtgattcatgtggtcgctctgtcatgttaaaagatatggacattcaccacattgctgtccaccaaaagaactaaaagccaagataaaataaaatattgttatattcatatgatttgttgaactatatcacgaagggggttgaaatgaaagagg

SEQ ID NO: 266539 - DNA, 3295 bp, Cannabis indica
taaatagatctatctaccattgttgttgccgttgctcagttactggattcttaaacaaaaaccactaaaacttatataaaactaatatttacgtggctcgccacgtaactctcatctagtatatattatatatatattatatatattattttatgttcaattcattaagtttaaaaagtataacatatatatctgagagatgtagtaatcaataaatttttaattaaagtaggataatataatatattggtaattaattaaatcgggtgtagcaattatatattattgcgcactaataaaaattaaataatctaatcttttttttttactaagatgaatacattaattatacaaatgatgtgaaatttacgattgtaaattatatattatttattcaaacaataaaaattaataacacacaattaattttaattttaatttttatttgtaagtaacacataattaattttaattatgtatacaatgcatgcgaaaatgcacctcataataacttgacaatatatattaattttgggtatataagattgcctgcatcagggttggagagctaacagtttggtgcctagctgaagttcagcttcagctttgaagttttgaaagactttaaaggcttcatctttgattttgagcatgtatatccaagtgaatctagagtatgcatctagaaagtgtatgtaatatttgtaaccatttaaggatggtgtgtgggaggaaccccaaagatcagagacaacaagttgaagtggggctgtgtattgtgtatgtgatgctttggggaagggtaatttatggatctttccaagacaacaagcactgcaaacagatttggaatctttattgatattggttttattacaagaattgaatacatgcttgacaataggctcagagggatgaccaagcctattgtgccacacatcaaaatcagaaaatttattcacagtacaagtattgcagacagcagatagagtagatttttgagaagttgttgtgtgtgttggttgaagctgaacttgggaatgatcaaaagtatagaggccattctgattgatccccttcagtataagagaatgtgtcacctggtccttgacaaacaatggtcagggtagaaaacaaagtcgacattgttgtctttagcaaatttagatacacttaatagattctttgtaatatctggaacatgtaagagattttgaagtgtaagtaatttagaagagtgaggggtaaggaaagaagactcaccaacattttgcacctgcaacccagttccatctccaacatacaacttgtcagggccctcaagattggttgctgtcatgagattttggccatcaggagtgcagtggttggtagcaccactgtcaggataccagttggaatcccaagcattggtggaggcagtaaggttggcttggggttgggatgaggtactggggttcgaattgggggcagatgttgaggagtttcctggtgtaaaggttttaacctgtaaaagcaatctgcagctgtgtgtcccagcttaaagcacaactgacactgtggtctgctgtttgtgttggtaaatcttggacctcgaccaccaaaatttacatttctttgtttctgttgacttgtaaaaccagagttgtatgccccaaagttgcctcttccaggattgaaatttcctttaaaatttccaaaaccagcattgttatgaccatacattccaggatggggatatcttggaatgtttctttatctgtaattggccaaattagcttcaggagctgaatccacttcagaagtggctatgtgagcacttagatcaatttcacgatttatcttctcaattcttgattcagaagccaataacagggcttcaatttcagcaacagtgtagctctcgattcttgtattggtggagatgacaaaagtgtcatattcactaggaagacccttaaagattgctgcaacatgatctctagtgcttagaacttcaccaacagaagcaagcaggtcaacggttttcttgactttgagaagatattcattgagactgagagatccttttcttaagttctgcaatttagtgcgaaattccaggatctttgcagaaacttgaagagtgaagtatttttctagagtactccagatctgactcgagttgttgcatcctaccattctgtttagaagactctcgttcatggaagagagaagccaagacattagtaattgatcttgaacttcccagtctaagaaagcagaattgacaatatttgaatcacgatcattttcagagagaaattgaggaggagaagatgattcttgaatttaaggtaaaagacgattaccttttatggcagcaaggatctgttgtcgtcataacaggtagttgtgatcattcaatctgatcgagagattgtgattgaagtacaccggagagggattgacattttctctgtttctgagctgaggaacttgaactgcatcgttttgagctcgtccttcttgagttctagagttacctcgattgacaggatcggttctgtcgttgttgctggtagcaacattggccatcaatggtggccatggctctgataccatgtgagatcttttagccattgcagaaaggtaggatcaaagatagaaaacagagaaagaagagagaagagagaaaagaacagcaaagagatgaagatcgaagatcaatcttattgatacaactacactacaactgcaatttatataggtacaggaagagaaggaatgagtttgttacaacagctcaagaattgacaatgaataacagaatgtaacaaactaaagataacagaattaaccaccttctctcccaatagtactttttgttagttttggttctacctatatagtaaatttggtttgacaaattgtttttattttaatttttacagctaccaattttattttttatttattattttttttttttacaaatgggtcattaaaactcttttaacatacacacccacgtacactcaaccatttaatttgagctatagccaaaatgacattttaagactagctaatatataatattaattaatgcatgattacatcataatatatataattacccaacctaaataaattaaaaaaaaaaacactactaaaataatgttttagctagctgtacaatttatatatacagtagaatctctatttaagaatactcaattcaagaataacttctaatttgttatataaaaaaaaaaaaagcaagtcccaatttaggcctattataaataagaataac

SEQ ID NO: 266540 - DNA, 866 bp, Cannabis indica
aaaataaatttgaatcaaattaattatcctttagttgtttaaaaaattaagaaaaatacacacacattgtaaaacacgtcacacgtgtgtggagtttaacattgcaaattaagaaaaatatcatataatatatataatattgcaaattgtacgtaatccagtgtacagaaggttgatacattatcctagtacaacacaagtcgatttggttgaaatactttgcttgaacaatatgttgatctaaaggtatcaagcagaagaggaaatttaagaagagcgaacagagaaatcggaacaatcgcaagcatggaaattaaaagcggtacccattttaagccatgacgttcatgataaacaaccacgaatgagaaactaaaagctaatatcattgttatcaatgagagaaagagtgaagttagtccagtcatcaacttcaaaggcaaccgtttcagaaagtcatgttctgtgtagcgtgagacaaggatggacaagaacattgtaattgcaataactgagttcaatagagcaaaggcatctgataagacaaagattagaaatgccttagcttgaatttcattaggggtcccattcttgtcattgttaccacctggtaaggtgaaggcagctgcaaagacaactgtggctattaaggttgctacaagcatacatgaattggctgtgcttttcatccataactccccacatctcaataatctcttgtgttctttggtaaacaattcctgaggctcacagtttttgtcgttctttttctttaaaaaaagaggttgcacattctctttcacttcctgtatatatgtaggtacatatagataagaaagaggtacccatttgaccaaattactctc

SEQ ID NO: 266541 - DNA, 1663 bp, Cannabis indica
tcgccgataccttctagcagttgatccacgtcctctcccaactccaatagccttgcacttagtttttccactctgctctgttcttgtccaaggcacaccagtaaatcgctgagctctgcttcgctctctttctgagcttcttcctttgcttcggcctttattgcctcgatatctggaattgctgaagaccctcctcctcctcctccatttcttagtgctttcacctctttttccaattggaaattggcctgctcaagactgttgtaagcatccgataggctcttcaaatcagattccatcttggcagctaaattctggtacatcgatgcctctgattcagtattggctttttccgattttagcatctccaatctttgggatgcttcatgaagatcccgtctaagtttctctacttgggccctgtctaaggctccactcgctctaggctcagattgggattgacttccccctccagactttgccaggtcctccgccaaaacagaattccggctaagaagatcctgcaagaaaagacagaccaacatcaatacagtgtcatacatgacttaatttcaggagaattattaagcccaaaatcttacaaaaaaaacacacctgtatctcactgcattgcttctccacaaacgctttcagccgtttaatgtactcagcatcgctttcgctactcttctgttccagttcagcaggcactacagccaccttgctcttaggattactgtaaacatctataattgcttccctaatatctgcctccaacctctttgccagggttacgaaaatggcgtcaaagactgatgacagaatgggatgagcttcatttttctcatcagccaagtagctctcatcagcatcttcaatatctgccatactagcagcagtagatctactcagtgttctacggggctgggtggagctcgcggtagcaaaatggtagcttttttgcatttcttcgaacttcagaaagtacgatgtaagtccaactttctggcttactgtgtcaactagtgagaaagcatctttaccactctcaattgatttattgtaaatcacacattctcctaaaataacagcagccaacccccttgtggacacgggttcagattcatttgccaacaactcaagcaaatatgtaaggtgggctcgtgaatctagaaaacagtttactgcactagggcaatcaacaagccagatgactagcaatttcaaaataataggttgaacatatgcatttctggccacattagactttccatctctgtttttcatggaagaggcaagagccaagtactttaccatgcggtgcattagaggctcagaagaacctagagactgcatgggtgcctcgagttcaatttttaaaacctggaaaacatctcaaaatatcatataatattacatgtggggggtcatcatcttcttgcaactttttataaaataagatttttcagagcaaatactggggcaaaagaaaaaaggaatttctcttgggttctttgcatcaaaatacaggtaatatttaaagcgcaaacaatgctagttatgtatcagctctaatttagtagacaatttggagaggcgtttaatattaaatccaatgaaagtgaagctaaaactccattcgtcttgaatttcttaagctcac

SEQ ID NO: 266542 - DNA, 3237 bp, Cannabis indica
ttggtcatcatataatgaaaccatatatggccccactaatgctttcacttccgtctgaaccaagtaatataacaataataataataaagacagaaacattggaatgagatgtggagaacagtcccaaatctcaaactaaaagcttcttttttttttccttcatatagagaagtatatgaataagaagaagaagcatatctttattgatctgatcagtcagcatcatacatatattatatatatagtaaataataaatatatctaacttataacttactcttcttaagggcccccatctctttggccttggtccttagtacatgcttttgtatcttaccagtggctgtttttggcaatggtccaaaaacaactgattttgggacccaataagcaggcattttggacctgcaaaacttaatgatatcttcagccaaaccttgttcgttggaattgtcgatattgggctttaatgttacaaaagcacatggggactctccccaacgctcatcgggcctggccacaacagatacttccaacactgcagggtgcaaatacagagtgttctcaacctccaagctacttatattctcacctcctgagataatgatgtcctttgatctgtctttgatttctatgtacccatctggatgttttacagctagatcacctgaatgaaaccaaccattagcgaaagattctttgttagcttttggattctttaagtaacccttcatcacagcatttcctctcataacaatctctcccatagtagttccatcagcagggacagacttcattgttttggtatcgaccacatcgaggccctccaatgcaatgtatcgaacaccttggcgtgcattcagtcgagcttgtttgataggaggaagtgaatcccattctggcttccatgcacatattgtggaaggaccataagtttcagagagaccataagtgtgggcaaccttgaagcctttttcggacattgcaaagagaactgatggaggtggagcagcaccagcggtcatgacatgtacaagatgagggagaggaaggatagcatcctctgctggggcattcactatggtgttgagtaccacaggagcagcacaaaagtgagtaacaccatactcggctatggcggaatagacaccctttgctgtaacctgcaaagatgaaacaaaaacaaaatgaagaaaggttcgtctctaaaatatataatgtaagaagtacagaacatttttttacctgtcgtagacatatgtttgtaccacacatagcagccataccccaagtgtaacaccaaccgttgcaatggaacatgggtagagtccataagtatatagctccttcattcatcccccaaacaacagcagcactcaaagacatcagatatgatccacggtggctcaataccacccccttggggcttgctgtcgtaccagaagtgtaacccaaagcaatgctttgccactcatcctctggtggttcccaagaaaattcagggtcacccccttcaagaaatttctcatattcaatggctcctctcttcaaagcatattcaagattcttaggatcacagctttcatcacctattacaactagaagtggaggcttgtaatgactttttctttcctctgctaagattttcaaagcttcctcagccaaggggaaaaactcctgatctactatcacagccgcagctaatgaatgacccaaaaggaaaccaatggttgatgcatttaaacggatgttcacagcattcaaaactgcccctgccattggtacaccaaaatgtgcttcataaagtgcagggatatttggagcaattacagctacctgttgaatataaataaaatcagacagcaaatttatacattatcagcaaacgtagatacataaattgcagaaatgaatcaaataatggtgggaacctgctaaaacatcaaaggtaaaatttgcaaatacttcaaattctgttaaataaattactgatgctgtagagaaacaagaagctatgacaaaaaggacttccatttccaagtttctctgaaacatagtacctttctggtgtgattgaaatgaaacaataataacaacaagcactaactctctctgaaaaagctaccctgctagtgctatcacttcactctagtcactagccctgccttggtttagagacatagttcatcttcttctgctcctaatatattgatgctttaggggaagatatataacaaagtagatttccatttccaagtttctctctgaaacgtggttcttttctggtgtaaaaaaaatgaaacaatattgtgaacattgtcccacatggaataaatggtagagaattgagccatatataagaacatgggctactctacccattgccaattgattttgagatggtaccccatgattctcaacaaacgaaaataccaacaagtagtaactcttttgcataagctataccctgctatcacttcgctctagttactagttccaactatattgatgctacagggaaagaaaatataacaaaataagatttccatgtctaagtttctatgaaacatagttcttttctggtgtgaaagaaatgaaacaaaaaaaccaataatctatcacttcactctaatcactagcctgccttggtttagagacgtagtctgtcattccagcacgaaagcggaaagcttgaataacaaatgaagatttcacccaactattctgatcatatgtttttcttaattatctttgttattacatcttacttctataatgtgctcctgcaatatccaaagttcaatatacccatatacctgacattataaactcaatgaaagaggaaaccaacaactaaaggcttcttagtacatacattataaactcaatatacccatatacatacatactgcatacatgtgtatatgggtatctacacacgcatttcaaacaatctcttcttcagtacatttcattattcagtatcaattacttcactgatatacaaagtaaaacagaaccaaacccataatttcattaattacattctttttcgccataatctcaggtttcaacacgcagtcctagcacccaaaataattaaagtccactataaagtaagattcctttactgttgtgtaaccataacattccgagagaatcaagaaacgaactacgttattattattattattattttttttttgttccatacaaattttgaaaaattcaaataaa

SEQ ID NO: 266543 - DNA, 1345 bp, Cannabis indica
aaccatttgaagatttatagatgtttcttgacatgcttaaaagaataaaaaaaatattatgtcctaacaaataatatgactgctaaagagttgtggaaaaaaaaagaaaagaaaagaaaagaaaaaatacttgttaaagaggatagagagtactacatggttcaaagttagcagtgcacttttcagggagctgtaaagccatgttccgatcaacgccagagattggaggaccattgactaggacacacaagcatggctgtcctagagccttaagggagttgcagcaggcttcgcttggagggatagggctgaaaggagcaactgcagctctgcatggtattagctgaatgagtgctgagaagaaagtgcttgcacaagttgggatgggcacttgttgctcttccaaacttctcactctttccaacaacataagcgccaaaactagcattgtcaggcttttaaaatgcttcattattttttccttcttccttaattcaactttgattgtatataagtgtacatcaattgggttctttatagattatataggagttttaagggttgatattgcaatgtcatgcaattgttcattggcatcctaacccaggtatcacacatcttatgccgtttgtttaaattaaaattgtcatctgaacttggcaccaaaatatgattagcgtgtaagggaggcagttgtaggagttaaatttcatgaacctctatcaatttgatgaatagactatgcattactacttggaaaacaaaaaacaaaagcaatatcttcttattctaaaatttaatcttaaatcacaaaatgccaactatccaaagataattattgtaataaaactagaaattggccagctataaaaactaatgtatgttttcatttcatttcatccttcttactacaattttatagattgaaaaatacagtgttttacctactctttctctattacatatttgtattctatgtcattccaaatcatactttttttaaaaaaaaaaaaacaaaaacaaaattaaccttcctttcaaaccctctaatcaattctacaaatgattttgtttaaataaattttaattactgctgtccaaaatacagtatccccattgttatttttaccccgtctgccacacattaataaaatgctaattaggatttttgctccctgaactttgacatataccaaatcatacctcctgaacttttaaggtcgttaaaaatgcttactgaactattgagattgttagatttaagaactttttttcaattttagtaaacaagtaaacatggatgaaagttcaggggtcataatttagtatatgtcaaagtttgagg

SEQ ID NO: 266544 - DNA, 1875 bp, Cannabis indica
atattttcacgttcacacatctcaatcaattagccaaataagttataagataaggttctgtgtagagaaaattaaacactagatgggtatgcataatattagaatggaattttctctagggaccactaatatgtgttgcttatttcaaaaatggggaaactgaacatagtgttttctaacccaattaagtaacacctgtttataaagagagtgagatttcatgaaccagttcatagataaagacactattcttgaacaaatgcatgctgtgcaagtcttgtgtttggccttaagatttgtctattttataagtgggaatatactcatttagtactctattttgaatattactcattcggtaccttatgttttaatttgatcaataaaattttgtttatttaatcaaactcgcataaatgaaaatggttaacacttaaacgtagtgaaaggtacaattttgaaatatcagctagatactaaatgagtattattaaaaacacaataatagtacattttatattacttaagcatgaactttttgacaaagtcattgcctatatttttatgcagatagttaggatgctactcgggcacaacgataccgacaagaaagcagtaaataagacgggcgaaacagccattgacacggcggagaagacagggaacaacgacgtcaagctaattctacaagagcacggcgtgcagagtgcgaaaaacatgaagcctcagggaacaagcacagccagagagctaaaacaaacagtgagtgacatcaaacatgaagtacatgaccaattagagcatacacggcagacaagaaggcgagttcaaggcatagccaaaagactcaataagatgcacgccgagggactcaacaacgctattaactcgacaactgtggtggcagtcctcattgcaaccgtcgcctttgcagccatcttcactgtccctggccaatatgtggatgacccgaaaaacattcctcttggattcactcttggtgaggccaacattgcctcaaaagctccattcttgatcttctttgtgttcgattcgattgcccttttcatttcactggctgtagttgtggtacaaacctctgttgtggtgattgagagcaaggccaagaaacagatgatggctgtgatcaacaagctgatgtggttggcttgtgtgcttgtttcggttgcttttttggccttgtcatttgtagttgtggggaaaaatcagaagtggttggccattggagtgaccataatagggacaactataatggctactacacttggtaccatgtgttattgggttataaggcatcgaattgaggactctaatatgagaagtattagaagatcatcaatgggaagcaggtcaaggtcatgttcattgtctgtaatgtctgattctgagattttgaacagtgaatataagaaaatgtatgccatttgatcacaccatgagagcccctctattttttttttggttcataccagttttctgctatgtttaaaggacagaaaatttgagtaacagatgagataacacgttgagttaagcctcatatcacataaatacatatttaagtacacaaatgtgaggttttgagtatgatgagcaattggaaaacagttatcaaatagaagaaagtgtaatcaagtggagctttctaggtgttgtgcattcatttgtaaaaatggtatagttactttgacttaagggaaatacataaataaacaacggtttctagtgatgtattatctattataggtaaaaggtttcaaacaacgcactaacagtttcaactaacatacccgtcatcttgttcctcaaccacactaaccaattcttatactccaacaaccaagcatcaaagct

SEQ ID NO: 266545 - DNA, 866 bp, Cannabis indica
cgactctatcactccttgttcacatttctgattcagatctttgagcattgttgtgctctttcataggctttgagatgggaatctgtgcctcttggaccatctgccatggcgggtttacacggcggagattctcttttgcctccgtattcggccttgtttcattaagcaaataccaaggttgcacattttgttgttgtctggtgaaattgccaatgctcttctgtaagcatcttctgcttcaatgtagttgttttgttgcatcaatgcccatcctaaattcccctgaagaaaacaaacataacacaaagtgtcacaacaataagattagtgctaaaaagtcgtgcctaacagtaatgttcaaacaataaacattttggtactaaaactaatgaaaaattaagtattaagtataattttagaatgtatatctaaactagtgtccaatggtaatgcttaaacaataaacatttccgtgctaaaactaataagtattagtgattaagtatcgaatcccatataatttttagaatggtccaaaaaataaacctttcggttctaaaactaatgagaaatttaatttttttacttacaagtaatctagtagcctcttgctccacagagacttgaaatttctttccttgagatctagctgtcttagttcttttcccattgaaagctaaaccttgttgaatcaagtacaacttgtgtctcaaaagtgcaatttgatcatccaatctaccacatctctgctccaaaaaaagattgtgaatttaaataaaggaagacaattgaagataaacccaatttttagaatatgaattagtgtataaatcaaagagctttttttttggtaatgaaaaccaacc

SEQ ID NO: 266546 - DNA, 2526 bp, Cannabis indica
aaaaggggaaggatgatgagagagagaagagagaaaagggtaatgagagagaagagtagatataggtgaaattgttgaattttagagagtaagttggagggagaacaaaattcttatctttcccaattctattcttcttcttcttcttcctcctccttcacatactcttatttttttttttggatgcctattacaaaaggagaggggtattgagagagaagagaaacttttatttgaaaaaaatgtgtaggagaaatttttttaagaatttcatcattagttttaataaaaaaaattgtcacaagtgacaagacaatccatcactttcatttcatcattagtttaataaaaaaaaattgtcacaagagacaagacaacctatcactttcatcattagtttttataaaaacaaaaaaaattatatcaggaaaacgctagcatgtgactatattttaaagatgaagaagataaatggatttggtatgaggtaacgtgaatttagcttagaaaaaaaaaaaaaaactacaatgtcactgatgtgattactcaagatagtaaaaaattaaagttttaaaataaatacaggaaaaatataaaacatatatagtataaaagttaattgtactgtgtcatagtataaaaagaaataaattgataattacaatatagggtgtaaatttcccttatctttatctaatttatctttatatatatatataatatagggtgactactcaatggttacgtttttattataattatgatggttatattttttttacctgtaatagtaggttgtcaatataggtaaagattattttttagaattaaactaattacaattaattaactattttcttaaaacaactaatttttaatttaaatatttagcaagacgtttttttagaaattaatatttatacatcttgtgggagttcatactcagtgagtcagctcgttcgatcccgttcaagatttgaggtcgtggtgccaagacagttgttcggactggtgtgttttagactaaaccctaatccagatgataattcagctggttatatcgagttgttgaaccgaaggcttctacattgggtaaactcgtctggaaagatttatgtgtcgcatactatagtgggttggatatatgtgttgagattttctgtgggaaccccgtttacggaagatcagtgtcatgtcattaccgcctgggagttggtcaaggagggagccaataaactacttaaaaacacaaaattatacaggcttattatatgaacagaatttttattaaacattttaagctacccaatactatattgatgtaccatgttgtgagtagttagcagtggtgcttcgtaccttagagtgtcccttaattaattagcatttctataatgatagattattaattaacttgtttgttttattgccgagtaaatgtgtcttttgtacaccttaaatgtggccttatttgttttagtgtttatcaaaattgctgatttggatgtaagatcaatatgttatgagtttgttgccttcctaataaaacaggttggtggtgtacttatttttaaagggatatatttgactatgcatgcttgattgttattatattctaccctcttaaacattagacaaatatgttaattacatctaattttttagtataatatttacctctcaaataataaaattaaacccttcccctatctttcctctctctctctacagagtcacacacacacacccttgccagatcgtattccggagcactctttgctgaagtccatcaattttacttgacaaccaagtgtgtaagagcaacccaaactttcttaccaacataatttttgaaaaaaataatagatatgtaatttatttggtaattattattagatttagttgtatttatttgtatttaggttgatatgaatagatctacacatgtcattcttttattttagttgttttgttgctgaaatttgaactattcggtttctacatttttttgtttttttttcaagtttttgccattttcagcgacatgatcattatcgatatatagcgatattagttggtagtgaaggttaggaatgacttttaacgtcatgtagtcatgacatgttgcgatgaaacttacaacactaggaaagattgttacccatttacaatttttgcaatgtctcgtgatattgttcacaatatgtgttgatagttttagaaatagtgtttggtgaagtagagaatgaaattttacaactactagcgattagtagcgatgcctttcactactagaaaaatgagttttagtgatacacattgagtgactctaaaattatttagtgacacttcactgcgcgtcactaatgtgggtgactggaaaagacaatttttagtgacacttcacgagtgtcacttaacccttttacagtcactcactgcgtgtcactatagacatttaaagtgaaattttgtcagactgaaaaagtaacagctacacacaaaaagtgtcactatatctttttt

SEQ ID NO: 266547 - DNA, 3284 bp, Cannabis indica
ttttattaattttaaaaaaatactaatttgtcaaaaatatttttttttctatagctcacttaatttcattagcatttgtcttatatattaatgtgtttaattaattggtgttgttaatgtaggtgaatggtggaagaaggatattctagaagtgcttgaggaatttgttgtgagtggtggtcaacccaatgtttctgatgctttcaccattaatggtcagcctggagatttctacaattgttcaaaaccaggtaattaattagttacaaattaattatatataattatttgtttatataattaaattaattttcttaaaataatataaaatattatggatcgtgatcacgtcactattataatgtgaaaactatatatacattgaatattgttatgatgaataaaaataaaaggaaaattatatactatatttacaaagaggaaatatatagcctaatttcttttcatttttacacatttttttctaaaagaaaaaacaaatacaattgtcaattgtaacctttttttttttgggcagcttttttctagtttagctaaatttctgtattttttttaacatatatcttttctaagaaaaatagtaaaaatatcatgtatttttttacatcaaacatttcgtgagtaattaaatcaacaactttttggaaaaaaaaaaaaaacattcactacaaggaatataagcaaattcggcacaccaatatcggcgggcccgcgtgtgtccgtcaatattggtctctataacggcaggctcattgtaaaccgtcaagaatggtgactgttttttttttcaaaaaaagaattataaatttggactcaatctcgacgggctgaagtaaaactgccaaaattgtgtacccaatctcggcggtcctagttgggcctgccgaaataggccacgaatttaaaggaaaaaaattcagacccaaatcatctatatctctctctcgaaaccctagtcttacccacaaaactcagctgccaccctattcctttctctcaaccattccttctcttcttctttctcgcatggacggcggggctcaaaggttctctctcattgtcgaagactcacaaacaaatgaacgttcttgttgctctctcgtcgttgacggctctcacctaaccccaacgacagtgttgactcaatccaaccccaaaagttgatggctctctcttatattggcagggtctctcttatagcgtggagtcttcgtcttcgtcaatctggagtggaatgtcgttcatgaagcagacaaggtaaggactctatttagggtttaggttctttatttttatggaggaatttttgtattttaatctctattcttttataggacatttttcattgtccattattgatacttttttcatctctatttgggttacggttgttgattttttttggttcaaatttttgtcatactaatggcgaataggtattgagcggtttcacttcgtgttataggatctgcttctcaaaccctcttttggactcagtcatgcaggtggcgaaagtggtcaacaacaaaagtgaagacccttatatgtaataatttattattttcttatttaagtaaagcatcttctttttcttcagtatttttctagaattttcccttgctctagttgtaaaaaaaaatctgttgtgagacttaatacttgaagttactttgtcataagatttggaatacattttttagttgtattatttcatattagtttcaatagtaatatctctatttgttattaatttactcatttctatttttttttcgaatgctgatagaaattgcagcaaggaggtgtacatgcgaaatagttaagaatcatactggtacgttgtagttgagttttggaattgggtattcattttatgtttatatattaaaatattggcgtgatttctatgggtatcaaaatttcaagctaaaattagttgcaattaatttgggtttgatcattgctcaatatttattttcaaaattgtaggtttatttgtatataatttgtactgttctcaaatttagttttttccccttttttcttttattggtgttctgggaatttcgttgtggcatatatttgatgtggttggatttcatatatcattctttatggtttcttatcaagttctgatttttattgtgaagttatgttctgggggatgatcaagtacctctttgatagctatgtaattagttcaatgaaaaagcaaagaatgaatttatacttttatcttaccactgctcatgaataaattgatatttgtttgtatagcacataagtatttatatatgtatgtgtttatatgtataatgaacttaaaagaaagcattttgtatgtttagaaaataaaaggggataaaaggtgatataatttctcttgtgcaccttttttgtatgttaaatttctttttagacacttggtacgtagagataatgaaaagtttttcaatagattgtcaaaaagttaagaacatatgtataaatctataatatatatatatgtatataattgtttgtgtatagaattatatgtgctaaagatcttgagacaatgaccttgattttccaaggtcttactatgctataataataacaataatatgaccttctattcttttaaaaaaaaattatatgtgctaaagttgctttgaattaaagaaggtatggaaatttgttttgaaaaattatatgtgctaaagtgcccacctatttgcaatatttgcaaattaggtgatttatacaatgcatttatttagggtcttcaagcctgcaaatatacattagttttaactttgattatatgtcatttttcagtgagctattgaagagggtagtcaaaggaatagtgaggtctacttgattgtcttcatgtaacgactcaaatgagatttgctgatgttttataaagtaggccaacaatatatttttgtaacttttaaatatttgaattctttttttattatttatggctcagattttgtaatggtgttttgagaagttttggcttaatattatggaatgctattagatatattatttgtaatgtattgtaattttttttatgtatatttttacaacaaatatataatggcagggaaaaataaaattaatgataatttatatatttttttcttttattttaacctatctcggcgggctaagcctgttgagattggtacctaaagtgttaaaaatcaccactaagaagaccaatcacgacgggctaatttcactaatctcggcgggctaggcccccc

SEQ ID NO: 266548 - DNA, 1222 bp, Cannabis indica
ttaaatataatcatgaaagaaatcatgtgaaccatgcaaatcataaaatattatttctgatcttgattaattattaaatctaattatattgaaatgagttttatttagggtacaaaacccaacaaaaccagcatgaaaagcagtaatatagcaacaaaatcagtgcaactattcattgccataccctcaaataaactcaaagctccgttggtgtcttagatagaattaactgctagatgcgacatcaatgtgtaactttgcttggttattaagcccattgtagaagagttggacttgaaaccaatcttttatgccatgttaaggatactttcatagcatctccttgaatttatcccatgcctcatagaatatctccatcttgaatttgtccaaactaaatgattttcgcccttagtttagaagtcttggaaggcggaaagaatttggtgaggaacttttgagacgtctcctcccatgtaagtgcattaggaggcaaggatcagtaccacgaacgagcttggtctccaaggagaattaaaagagcttgagtctaaccgtgtctggtggaactccattcatctttattatatcaaagatttctaagaaagtagataagtgaatgtttgggtcttcatgggaaaaactagagtattgatttttttgtatcatgatgacatacgtaggatttagctcaaagttgtttactttcacttgttgccttctcacatccggcctaaaacatttgcagccggcctaatgtaggattgccttctcacatcatgccgactaatgtaggattggaagtcggcctaaaacattctctcaagtttgccacatgatttggatgattagctatgttgttgttattgtttttgactttgttaccaaccatctttctattagaatacattttactaggatctagatttactaacaagtatgtttttaacatcctaatatgaatttctaaaatgataaaaataaacacataaaatgtatgagaaaccttacagtgattgcagcagaattaaatgactccttccactcatatctctaacactcgtatcctttttgtagcagagtatcaccaagatctgagtccgattctccttcttgttgattggattcttcatagtcttacatattatgattgaggaccaacttgtctgaatcactaatggctttggtatttcgaaaattcaagaggaggaagaagaaggaa

SEQ ID NO: 266549 - DNA, 1968 bp, Cannabis indica
ttcatattgttatgttttaaactgtttttgatgtctttttactctgttgtttcattattggtttagggacttggaggttcctatgagttgggaaacctctcatgataatgttttttatgaaatacataatttcattgaagaagggataaggttaacaactgaaaattctgatcatagtagatcaagaaaaagccttaaggatttcaaaatgagtgaaagtttgcaactcatgaagttctaccctttgtcttatgatatggtgagacacttggtttctggttttagtggtacagaaatggtacttccatttgaattaacaaatcaagaaatggaagttgttcatttcgatagaacttccttcattctcgggagatcaggaacagggaagacaacagttcttattcgaaagctattccacaaggaacagttatatcatttagcttctgaaggttttcataaacttgattcttgtaatgaaaaagttaaggaagatagtgaatgttctgaagaaaccgaggagcctttttgcgccagatttttgtgacagctaatcctatactgagtggtgctgtaaaagagcatgttgaaggcttgaaaaggtgactgtgaagcattgaatagttaaatactcactttgactctttgtattttcagtctatgaatatatgacatgtttgctatattgcttatttgtgttcatataattctcagattttcttgtggtgggaaatcagcagaagattcattctcagattcagatgttccagattctttcgagggtcttaatcgttgtcttttcccgcttgttgtttcatatcataagtttctgatgatgttagatggaacattagggaattcattctttgatagatttcctgaagcaacaaggggtgcaacatcattggcatgggagaatttatcagaaaaggaagttaattttgaaaaatttgaacaatcttattggcctattttgaataggaaaatcactaagagccttccatcttcagctgttttcgcggaaataatgtcttgcataaagggtggattgcacacttcgatttgtcatgatggtaatcttagtcgtgaggactatgtttcgctatctcaaagccgggtttcgaatttggatggagagactcgagaatgtgtgtatgatatcttcatacattatgagagaaaaaagaagatgaatggtgaatatgatttggccgatctagtgactgatcttcatcgtcgacttggagaaggaaactatgaggccattgagtttgactttgtctatattgatgaagtccaagatttaacaatgaaggaaatttcactttttaagtacatttgcagaaatgtgaatcatggttttgttttctgtggcgatactgctcaaaccatagcaaaggggattgactttagatttgaggacatacgccacctcttctatgaagaatttatattgaaatcaagaagtggaaaaagctttgggagaggagagaaaggtttaatgacagatttattccatttaaacaagaactttagaactcatgctggtattttgcagttagctcagagtgttgtaaatcttctttactatttctttccagactcaatagatgttttgagccccgagataagtcatattatgggggaaactccatcactgctggttcaatcttttagagatgaaaccacattctcttccatgtttagtaatgctgcagatttgggaaaaaagcttgttggttttggacatgaccaagttgtgatagtaagagatgacagtgtcaaggaaattttggaatcagctgggaccgaggcgattattatgacaatatcagagtccaagggcttagaatttcaggtgattaagattaaaatgatttataagcattaagaaattagcatgaacaaagttttgctaatttagtgatataacaaagttttttcaattggaactttctattgcataaattg

SEQ ID NO: 266550 - DNA, 1004 bp, Cannabis indica
attgtgccgtcaacacattggaggtgattgtgtgtttagttatattaatttaacttgtgtattgatatttttgtcaacatactaacataggaatattccaaacatggcagtggctcctccaataaaacagagatgccacaagggattaagcatacgagagaaacgggaagacttttttgtcaacatactaacttagaaacgtttggagatcaactcagcaaaatggccaaaattgaaggagttgaaccatggaagaagagcgagtcaaaagtgatgtttatgtttagtgtctatttaaactcttttattttcacattaacatctagctacaactaaacttatgaacttagaaatataaaaatacaaacgtattgatgtttattaatgaattttatttttatcatttgtatttgtgtagtactaatttcaaaataaaaattgcataatatacatgtacaagaattatttttttttaagaaaaggaaaaaactgcttgtgttcttggtaaagcattctaccgagaagagtttcctcggtaaaaattagatagaatggtcaaatggtaaaggtagcaccgagaacttcccaaacttctgcctacaacaaatgttctcggtataccctttaccgacaacaattttcttgtccttgatatatctcaacttgtactcgacgagggtctaacgaggacattataccgagtacttgttcttggtataaggttttaccaaggacatctcaagttgtaccgagaacttttgtcctcgttataaacctctatttttgtagtggtcatcagcacagtggaatataatcatgattatatgtttaaaagtttaatacccacgatttgtcagttcactagatttagactggcatgataatcggcgataagtatacttacacattggataagtgttatgtcctttccagggtagttcaattgagtggacgtgttgatcatagatatgaaatctatatcttatataggtatttagaagtga

SEQ ID NO: 266551 - DNA, 3162 bp, Cannabis indica
attttttaaaaattattttttctaaattatatgagacctgataattactactcatcaataatatttttaacaattttggtatttatgagaattaagacatgcacacgacaaaaccctacatatacatataatattattcaagtaaaacggccgatcaataaggaatcaatatataaactaaaatattaattaattttataacactaatgatataataatatttaaactatatacgtactacttgttattaattaaggatagatgtaattaaaagaagggataaaatgatcaatatatgtttatgtatatacatgcatgatcccaagaaagatccagcatgcattagttttgagatgaaagataaagattgatccatgaagattatatataatatatatagcaagttaagcttctaatttttgttatatatgtatatatatagcagtagtatttctactactctaccatggatcatatatatatcatgtatatatatatatatatcagctgacttaatttcacattaattaattaatttccattttccatgcacacaaacacaacacaacactactctacatatcaattactagctatatgtatattttcgtaattattatagatagattaagagagtatatactatagtaccatatatatatgttatggattgcacaagatcaatgatccatattcaaaactagttaactaactaactctacttaattaattgatgaatatgatgatacattcataatttatattattatttataattaatgagagggcaaaaagactaactaattataacagatataaattgttatcaaacatatataacatgcaatcattataattaataactactgaatcatgatcatcaatcgatcatcatcatcatcatcatctatatatataaaataatgtcatgatgaaagtggttgatcatctatgatgatcagagaattaataattataattatgtatttatatatatataattaattattagctatatagctagtgccatgaagataccgaaaagagaggtcgattctgccaagagagaaataatgaattgttaaggatatgaagatggtacccttccgatgggtaatgaagcctcaatagcaacttagcttgtgaaactgcaaaagggctcaatgcaatattctcaaacccacacctaccaataaccacatcgtaattattattattaactacatgatcatgatcttcatcttcaatattaatctcattctcattattactactaccattcctcatcatcttcatcacctccatgatctctcttcccagccacacttgctccacctccactctctccctactgttcggcggcagagtcgcctccagggactcgaatatagcactgtaatgctccaaagccccatccaagtaatacctactaatacatctctctgctatggtaaccaccgtcggattaagtacccctttgatgctgttcaaaaacatctccacttcctctttcgccaccactctctgcaagtacagtacgcagttcactgccagagcttcatcatcatctttagctctactactactcgtaccaccactacttatcagtgcgttgatgatgagatgatgaggatgattccgagggagtaagaagggttggaactgaaaatggagtcccaaagactgagcgaatctcaacagcctgtcccccgtgcggcggaggagacttaagtctgttccggtggcggtgattcggagacgtagcatggggtgtctttcagagagtgcttgcataaaaggcggccattggagtccgtgcatgatgtcgaagtcgatgatgtgtaaggagtggtgttgagtgtggtctatgacttctaagattgcttgattggctgtgagatgacaaaaccttatgaatggggtaatctgatttagggttagataggaagaatgaagagcttcgaggtcgtaataatgatcaattgggttttgattttgaataatttggatttggtgtaagagggcttttgataactgatggaggagtctttccatggaatctccataaggagaggaattggctgagagaatagagatgagtctgtgagcagcggttaaatcggaatgagagattaggtcggcgcatctcgtaaccaactggcgcatctgaattgggttgttaataattgggtattgtggttgttgttgttgttgttgtggtggttgtggttgtagtgggttattaatccctaaaccaagctcatcaatatcatcatcgtgtactactactagatctgatgaagctgtagtagtagtagtaatagtattagtattagtagtagaagtattatcttcatttggttgaggttgaggatattgatgatgagagctggaattaaaagaacccatcagcattatcagattataattaatacatacaaaccacacattgatgattatatatatacactatatatatactatatagctaggtaggtaggtagttgatctatatatatataattgtgtgtttctgtgtacaaattaatggaggaggaagagagagatctagagagagggagaaactacacatggatctgtttatatataagatgatgatgataatgatgaagaaacagcaccagctttttatgtatatatatatatctggcacacacacacatgcactactgggcaggccaaaaattcaagctttgcagtggtacttacttaacgtactcttctctgtttccacttatattttatcagatcacccttttctatctaatttctaattatatatatatataatattctcactatatactatctcatcaaatcatcgaatcaattcaatatatattcttttgtttatatactaatgcttctctaaaacaatataataaattgtaaatgtgatatgtgtgtgttcatatggtggacattataattaattaattaattaacttcatgaaaatggggcacatggaatggcatgatggatattatgaatcataaattaaaggagactaaataatatatatattaacgcaacatatatatatatttatattattgaaaaatcctacgtacatatatatttatagggatatgattttgtcctgttattgtatttttacggattgtaattcgtgatgtacg

SEQ ID NO: 266552 - DNA, 3981 bp, Cannabis indica
atatatatatatatgggtgcactacaaggttttcaccattttgagttaatggagtttatggggatcagaaagtgaagacagagcgtgtttattatcttaaactggaaaaaatagtgtttgtatgtcttgaaaaaatgaaaacttatacttatgtatgtcaatattggacttacatttttatgtttgcatcaaaagctatgttgaacgattgcttgatcgtataagcaatggtaagctggcagaggataggaggaacgctttgattgagcttcagtctgttgtggcagaaaatcgtgctgcacaattggcatttggtgcaatgggtgagtacttgctttaatggttttttttttaaaaaaatcattatgtgggtgctgtttctgatatttttagctcactttgcaggcttccctgttctgatgggtgtgttaaaggaagaacgtgatgatgtagaaatggttgctaatccttctctctttctgtactgtatggtttctttgatttctatcagacatttgaaaccgttttccagtcatcttaatagcaaatcactaggcttttgttgtatattatgatttatggaatcttactttattgctgttatatgcttcattcaactatgatgtttacctctctttgctgaagtcttctgatttgaatgtgaatttatcgcttatgttgtatcttatgtgggaaagttagttgttcatcactttgattcatgtagatccgaggtgctctagaaactcttgtaagtgccttgactcctattggccatgtgaaagcacaaaagaatgaggttcaacctgagttaatgaatgctgatttgctttctagagaggcagacggcatttcacttcttctgagtttgttggtgagccttctttgctggaatgtgaaacaactagtccattttcaccttactttgtatttgatttggtcacacttttaactttcctgctggttttccttggagtttttggcaggcagaggatgatttttatattcgatattatactcttcaaatcttgacagctcttctcacgaactctccaaacaggtattagactttagagccaatcatagagtgttcacctttcaaaaattctctctaaatttctggaaagacaatttgctgagatcatcttcagattacaggaagccattctcacaattcctcgtggtataacacggttgatggatatgcttatggatcgtgaggtaatatatgctcaatgaatgaaataaatcctttcttatagttctctaattttattttcttagctctcataattttaaatatgtattgacttaaaaagtttatactggatatgcttctctagcttttacaaattagccttcacatggtaatattttatgtactacttgcgacctttacataagaaaatttaatagtgtcttaaaaaattttctcttggaaccctgtggccttacattgaaagagccttctatttgtactgtcaatccattgctttcttttaatactacttaatttctgtgattttccttctaggttatacgaaatgaggctttactacttcttacttacttgactcgggaagctgaggtaagctttccatctcatgttcattgttatttctttctttatctgttggttttggctgttccactgattgaaggattttatgctaattggtgaacttattacatctccaggaaattcaaaaaattgttgtctttgaaggtgcatttgagaaactttttagtattattaaagaggaagggggttcagacgggggtgttgttgtgcaggtaattcattgagtttctttttactattgctttacttaaattaatcgtgatgtgtagaactattgctgatttgtttattttgataaatcatactactacttgcatgtttgaagtttgatgatataattggtactcatgtgctttagattggtagatggtttaagttacagttcttttcttttatgttttttgtttcatattatcaaattgtgctgaagcactgaacatacttgttcgtcatggtagaacatagagatagaagcattttttgctctggccttagatttgtcaaagggcattttctatcctataatttttttttagtgaaactcatctgtggttatgctgttatgcctacagtataagcaactactaattcataagttttgtgctagaaaaattgcctgtctaaatttgtactgattaatgatttttttgagcaaaaatagctatggatttaacttcttattctttgcacaggattgtcttgagttattaaacaatcttcttcgtagcaatacatccaatcaggtttgtagccttcatctgttccattgatatgcattggatttttttctttcgattttgtgataaattactatatatgttcagattctgttgagggagacattgggctttgattccttattgtcaattttgaagctacgaggaattagttacagtttcacccaacaaaaggttaggttctcaaggatatgtaatttttggtgattgtacatctgttgcacaaatcttactggaattgttttgttgtcatgaaacaaacaccatgccagtagacaattaatctactcagcgtgttagaaaccattaatttattaattatgggaggttcagaggctgatcccgggaaagaagcgaacaggttgacaaataagacgacccttgttcaggtttgttatgaagcttttatttgctatcattagtgccacataaactctcaatatgatcatattcaatgctataaattgtttggttgatgcagaaaaaggtgctggactatcttctaatgttgggtgttgaaagccagtgggcacctgttgctgttagatgttcggtaagataattattttggtacttatgctgaaatgccatgtataacctgcatccactgcctgattaaagctcaaagtgtataatatttgtatctataatatttaaagctgtattcactttcaggcattaaaatgcattggtgatcttatacgtggacatcccaaaaatcttgatgctcttgcaagcaaaactcttggtgaaggactgcaagagcctgctattaattcgattcttcggataatcttgaggacttccagtacacaagagtttgttgcagctgattatgtttttaaaagcttttgcgaggttgataatgcatttcattttgctttacaagtgtttgttgcacttgtcgctagttgcatatcactgaatatctttctaaatttggttgtgtttacactcaatttatttgaatcaggaaaatacagaaggacaagcaatgttggcatccacattaatccctcaaccataccccgtggctcatgctcctattgaggaggatgtaaacatgtcatttggaaggttttttttttaatgaaagtagtcttattgggtctcgctttattagtttcaggcattgaaattgtcaagttattgccccttcacaacatatataaatatgtaaacaagttttgatgatgaatctcatttaagtgtaaattccactgcagcatgctattacggggttttactttgagcgaaagtgatggagatcttgaggtaaaccaaatattttactggcatcacagattttgtaagactgaaacgtctgtgcatttaactctgatatattgaagtacagacttgctgcagagctgctagtgttctttctcatgtactcaaggacaatatcccatgcaaggaaagggtacgttgttgcattcacctctgtactaacatattcttccaacattttcttcaagtgggctttttccttttctttttttgacaactcatttgggctacttgaatcgccagtaaagtatcaaataacttagcaatctggtattcaccttccagattattgtgagcttaagaaattcaagacggatggagttttagcttcactttaattggatttaaaattaaacgcctctccaaattgtc

SEQ ID NO: 266553 - DNA, 4894 bp, Cannabis indica
agggtgttcacctagaggttagatcactcttcctacttttggtgtttccaccatactgagtagtgaaatgttgggcgagcttgtcgaatgagttgatcgatcattcatttagttttttcaaccaaagcaaagttgatctggtaagcgtagttgagaaggctttacacttaatgacgggattatttgtcttcaattccattcgatgttcaaattgcaggacatgctctaatggatctctttccccatcaaacaaaatttaggttccttgatgatccacttagcgaaatgagattttactacattttgaaccaccatttttttaagaatgtcaaaatctacagctatttcttccccaattttagccataactcccttcatcacttggtctttctagtgagataatgaatcttatgactgcggcagctcaggattcataatcttagcttcaagtaaatatgttttctctttgttaggtgctggctcagtcaccttttctttgttgctgcccctagttggaactacttttgcgagccctgttttgcttttgtggtattgcttgaggtcttcgtaggcgcagttccttccttcctgacggcaactggcattattgttcctaataatgctttgacagttgctatggttttcaacgcattttgcgtcttctctacagggttttgtaagatttttgcttgtagcagtcgctcttgtagcactgtctcgttggcagctaaattttcattgttagattgcttgatatccaactgtgtctggatttttctgatccttgctcccatatctgccattttttgcctgaatttctacaagctttgtgcaacatcttggtgatattggcaactctcgtcttgaccctgcgaacgtttttcctttatgatttgtcgtcgctcatcgttatgcttatcttgtgcaatcattcatcgatttatctctctcatttcaactgccaagctttcaattggattaacggtctgacttgaggtatctccctcactttcactcagtattttgtgcattatccactgttttcttcgatcccatcttaaattgtagtttagtcttcagcttttcattcttgtggttcccatagatggcacgagctgttgatgctaaaaattagctcaacgaaaaaattgtaattggacttggattctttacactaggataagtcttgccaaaaaggtttctacttcattattctattcctctggtgacgatggatgtttcttggggtcagtgtataatttcttgtgctgaattctttcaaagaagcaataaggcagaatttcgacaagttggtattgtcaagaattcatgtcctattttaatttttcgatcttcaatttataggccagaataggtcttgtgcttctttaggttcttttttatcggtccatgtgacttttctctccccacttctcgtgtcctgcattttctttattttttgagctctgctctttcgaattcttgttttctattgcggctagcgccttagtccttgctcccttttaatgaaaagacacatttcaacttctcctgacatattatttgttagttttacagaatttctctttgaaatcacttttttgtccctaagattaaaatctacccttactcttaccatataatattaacagatactaatagtttcaatataatgtttagaaagtttacaattttttcaaaagtaaattactaaagagtaagcacattatttacaattttgttgtaataaaaaattttgttttccgaacaaatatagactcacagacaattttactataattttaattttattttgaaaagtcttacacttgataaatagtaaactcattatttgtcctttaagctgattatttacaactacaataaaatagtatacaactatactttaactactcctaagaacaaatgtacaacttaatatagtatatacatcattagctcaaaacaaattgagtacccaattgccactgttctgcaaagctaacatcaccacatatcacaagctttgtgtcattcatgcaagagatctcagcattctcaacagtaaaaccccttaaaattggcaaaggcattcctttccaaagctgcaagttcacgtacggtaagaccaccgttctgaggagggctgacattacagactgcatatttaacataattaacagatgctgtgcaacaagagaagctaaaagccttgtttcagatatgacatttgcaaacaaaaacttacctgaactaaacgcatgtgaaggccaccgatttcgctccacttcagaactgttgtgaagtcttttagtttaagagtaccaaccagtttgttcaccacaattttcggagagcacgagccagcaatctcctgcacaaacaaaacactctcaagcatttttattgactaatcaaatctgttatcaactatgaaatccaaaatgaagcataccaatgacatgcacactactggtatgacttcagtgccatcgagaacattaattatgacatcggagtaaattgcagtttcaatgtcattatttataactttaactattggcggagaggatacagatatattaagaacaatgggatgatctggatacttcttgtacagttggggaactgcatatttccatttagaagtgttcaaaagtgattgatctggtactttgtcaacaatccagtgcatataacctgcctgaggataaagaaagaaaccaattttagttccactatatggagagaattatagagatcagtgtatggataggttagtctttaatttttaagcctccactcaataaaatacattaacagaaagttcacaaatagagaaaataaagttatcatttgcacatcatgatgtgaatcatgtaatgactagcttgcatcctatataataataacattatgaaaagagcacaacagaattttctactgacaaagtagagcttacattgaagaaaagtagggacactgagttaaaaattcttcatgtaacgaaatctcgatcatcttagtagaagcattgcagaaaacatgatctagtaaatttttatggtaaaatctagaggttaaatcatcaattgccgtgaataaaccattgatctcaaattcaatagaagacttgctcaaaacaggcttgccaacgaaagtaacgttcattgcagcaatatcatagacttgaatttgcttagggagtgattgcaataacgaatcaagctttgttatcccttcttcgattttcttagacatagcatcttcaacaagagactctatattaccttgaaaggcatcaactaacctgtaagtgcaaataaaaatccagaaaagatatttctttatatgaaatccttcattggtatggtatgtgtatggtgttagaaagagttactcaccagaaactaactaggattaaatagccttggtaaaaatgcacaaaatttacataatggaaatttatttgagaggattgaattacccttggtaaagccaggatgctccaccgtccaccttgattgagatatcattgacatagcatccagattcaaggatggaaagtttgagagttccttcttggtcctccaaagccactgtggcacccacatccataccttcaacctagaaaaccagagcactccatcagatactaaaatcatttaaaaagcaaaaaagaatatatgatttaagtaattgtatttcacccactgcatatctcatcttttctggcatctttgacactctcataataatgtcaccacttctttcttgggacaatacacagcccaaatgaacaaactcaaccgaaatgtgatcttgataacgaagttatgaatcatttgaattgctctatgtaacagtagcaaaaatcaaaatcaagagaaacacatctgagtaaactgtaaaacacacctgaatagaagccctcccatcatcagagatatcaaaaaaccagttactgtacgagtacttccaattcatgcttagctttgcagtagcaccagaagcaattatagcaatacccatctcgtcagtctccacatatgaagaagggacatcaacgctgtagattgtgatatttgaaagagcgacgtgaaccttgccaattagagggacttgtacatatttttcaatctgagggagatgaaatggaattatagagtcaatagctttctctattagcaaatcctttgaaaaatcaagacccttgtctgatatcaccacagagacaaaaccttcttcttgaaaactagagggtaccaataaaagaagccagaaaaacaatgacacaaatttggacgccatgaattttgagaagaaacccatgtgagattgagaataaacacttgaaatttatgataatagaagatttcgcctcgaagaagattacatccttcctggtatgggatatggaggaacacaaaatttaattttacatgttgtattgaatgagtttcgtacagaagtggttaaactgatatgctattatgcaacacgtgggaaactagagatatataatttttttcgctaactaagagcatctcccatgtacaccatttcaccacattcctccagaatttttacactattttacttcaatgctatactaattataattagtgtgcactaaaattctatatgtgtaatctacaccaatttaggtgtacaattttttttttttcattttaactcttatttaattttattttaaaatataatcttatatttcagtcctcaaattaaaatttatcacaaaaataataattaatttaaaatactaccatatttaaatatacaaaataacaataaaaattactaatattaatgaaataaaaacagcataacactaagggtgcgtttggaaagccacaatgtaattggatttgtg

SEQ ID NO: 266554 - DNA, 1360 bp, Cannabis indica
agaaacacacctaactgtttatgataaatatataaataatagacataatttggtctaacgtctatggacttgccttaatactcgcctatcattaactattatctcttttctctcttctctcattttccaactcaatcataatcttcattttcatcatcacaatcttcatattcttaatcttcatcttcatcattataataatcctcattctcttttccacataccctttcatttcttttgcctgaatctctatcattattcctataccaagaataattacttaattatacatatttacatattatagatatacaagctcctgcgacgttccctaatggcatcggtaatttcttttcatccaaattaaattaatcaatcaatctttgttcttattatattatacatttatgtttccatgttaagaaatcaatcaatcttttcagaattattgcacttttgttggcttgttttttttggggtcatgaactatagaattatgttataattataaatttgtgcatatgaatgtgtgatgcagcaggataagggtagaccgttgccaaaatttggagaatgggatgtgaataacccagcctcagccgaaggatttactgtcatatttagcaaagctagagatgaaaagaaaatcaaataataatggcaatccttcttcaactaatacaattcaaagaaatgatcaaaaacctcctggggcagacacttatgattatccccctacggtataatcaatcaatatatattgttattattataaaactactttcatttttgtatatttatcttcaatttttgtttttctgatgcagaagaaatggttttgttgtttctaatcaaaacccaaaacaatgagaaaggtgtttgatatgatataattccattgaaagcagagtagagcagagcaaggaattaatgaatgaatgaatgaatgaaccaacgatcatgtgtttatttctacttactatttttacatacttgttttttcctttgtaattttatgattattccatgctttaaactctttgttattttacacataatatatattgggaaacccttctcatgttttcttctattgagtaatattaattttaggacaaaaaggttatgaaattgattagttcatatatatttatgtgtttcaaatattcaatatatttaaattataaaccgaataacaaagaacatagttacgtactagcaagaaagaaaaaacaagttataacattaaagattcaaacttagctatataattaaacgacaacaaaagcagcaaacgacattaaaaacagaggaaaaaagaagactccatttccaagtgctgaaccagaagaggaggctc

SEQ ID NO: 266555 - DNA, 5279 bp, Cannabis indica
ttttttaattttttttattttgtgtatttgcgaaataattccaaaaaaaaatccgttaaaactcccgaattcattattgggccgacaagatctgtctgtattgtcgtacagaattgaaattattgggcccaattgaaagcccattaaggaaaagccctggcccagtggaaacttctcattgttgtagatgagtcatcagtcacatgagaccaccagttcttttctcgtaagaaaccaaactccggcatagaaagaatcacagcatcaccccaacaaaacgccattgaagaaagcttcgaagacacacagagagatagaaagaaagcttcgaagatagagagggaaacaggagaaagctatgggtgttgattactacaaggttcttcaggttgataggagcgctaaagacgatgacttgaagaaagcttatagaaagctcgccatgaagtggcaccctgataaaaatccttccaataagaaagaagctgaggctaaattcaagcaaatatctgaggcttacgatgtgagatttcgagctgagatttaatctgaaatttcaatatcgaggttttattttcggcttaatttactttcttttttctttgttttcaataatttgtgattggctgcttttgtttggattcaaggttctaagtgatccgcagaagcgagcagtgtacgatcagtacggtgaggagggtttgaagggacaagttccaccgccgggtgccggagggttttcgagcggacaagagggtggtccgacgatgttccggttcaatactcgtagtcccgacgatatattctcggagttcttcggtttttctggttttgggggaatgggggatatgggtgggtctagggccggtggtggtggaccggctttctcgaggagtatgtttggtgaagatattttcgcatcttttaggggtggaggtggggaggcctccatgaatgctccgaggaaagctcaggctatagagcgaacattgtcttgtactttggaggatttgtataagggaaccacaaagaagatgaagatttctagggatgttacagattccactgggtaagatttctacccttttcccattgagttgatatttactatttatcaattttgagtcttggatgagtgtgataatcctagatttcagatttgcatgaatcttaaagcttgatcattagccttaaatactagaagtgagaattaagaactttaaattcacaaaatatgggcaaacaaacttaattattatttgaattaatgctccttaactgttagtcatcgatgttacttagtgggacattgtagttatgttgttctttgactactagttatcgctttttaattaatttgccccattggaatttgtagctgtagaattgtaatacttttaggtggatcacccaagagggtaagctcaaatggtacccacagtctgaggttcgagtcccttctgggtacctacgtggcaattgctatagttttccggtccccagaaagtttagggataggcgggcatcctagtttcaaatcaaagaaaaatatatacatatgaaaatctgtggtaattcgttgcacttcaatgtgtataggttcatgccttgtagtataaagattccatctacattcattgtacaagcgtactacttgtctgttacttaacatcttagctggttgattttgttatcttagccttgatgaatcctaccaaattcttaagcatttttcacatttttctttttaaaaaagaaactcctttgtactaatataaggaataataccaagaaaagagaaatgagataaaaaataattatctcatgttgccactacacagttacctacatgataaacattgaaaagcaacattaacaaaaataaaaaactagaatagttttcactgatatctctacattttattcaaatattttagcattgtagttacggctgtattccttgtaggatgatgagttttactgagcattggcatgtaagctgtgatgtgaatttttttgtatatttccctttataaatatgtttgtgtgtatgatagtttcagaccttgttgacactgatattttaaaacttcataacacagtaagtcattgtttgaacatctaatttacagtcgtcgcaataatgttattcctagttataataactttgcttttcatactttcctttttattcaagatatgttagatctttattgttttccattatgtttttgggtaacatacatgatgatgactgtcctaattacatgactagatgactcacaacatgccaattgttgcaaatgcaacatttgtcaactagttttctctgtggtgtaatttttcatgctcagtcaaacttaaatttcctttgtgagcttttgatatcgtaattttatccagttctggagcaagaagaaaaatctctcttacgtttttggtgccagttcctgcataggtatcttagtgtttgctctatttcttctttctctctctctctctctctgtactaattcatgctaacatgaatgtatctcaaaattcttcttacatcaaaatttgttatggtaaagcatgtgttgtccacaactttagtttccatgtaacttactagataggatcagaggaaaagtggcctgaggcccaaatagaaacaaaaatagtgcattcattatttacatataggatatacatatactactgccctttaataacatcttggtttctaattaattgtcattattaatattttattttaatgcccctatagttttccttgctagccaaagtgattgttggagaaaatttttcacctacacacttttttttttttggtgaactatgtatcgatagatactagtggaaagatttgttcattatgctggaaccaatctcatgtgttcaatgtgggggcataaaaaagttcctaaagtctgttctgaagtttatttccgagtcataataaggagtataccaaactatgagttatgggtttcatggatgaccacttgttcataatattattttccttggttcattaatgcatattgcattagattgtctttgaagagtttttctattgatacattggaccactggtctaacttgtggattgctaattgcatttcttcttctttgaaaaacacagaaaatggctaggctcaactaatttttctttaaaaaattccaagaaacataccttctagaaagataaatattatggtgattgtagaattttgtttttccgaaaagtaggagtctttcagactaaatctgtctccctttcacatgagatggcccctattaatacaaggctatgacttagtgtaactagaagttttcatctagtggaattgttgcaattgattagtgatgttgccctttttcatactgatcatgattatttttttggtattctgtgttttttcttttgatcctttgcggtgcagtttcatgcttattgatttcaaataatcacatacaagttatgcaaaaaatacacaatacattttgaaaatgcaagtgatgattctctagagcacccccggctcaaacttctcattgcttttgctacttctgttatgttttgtgcagaagaccaaatacagtggaggaaattctaacaatagagatcaagcctggttggaagaaaggaactaaaataacttttcccgagaaaggaaacgaacaacgaggatttataccagcagatcttgtattcatcatcgacgaaaagcctcatggaatgttcaagagggatggcaatgatcttgttctaactcagaagatatctctggtggaagctcttacaggttacacagtgcagctgactaccctcgacggtcgaagtctgacaatcccgatcaactctattgtcagtcccacttatgaagaagtggttaaaggggagggaatgcctattcctaaagaacccaccaaaaagggaaacttgagaatcaaattcaacatcaaatttccttccaggcttacttcagaccaaaaatcgggcatcaagcggttactatcttcataaaaataaaaaccatggtggcggtacttccgttgcgatcttttatatttgtgctctgtttgcatttgttttatttggtagtttatattctggaaagttaagttatgctctatgaaatctaatctggagatttgaacagaaattgtgtaggaatcatgcatttatttattgtgtccaattctcttttttcgacaaagaaaaaaaaaggtagaagaagcattgacatgtcatgattaacttgttgcaaactactaccttttaaatcttggcaaagccttctctcttatgtggatgtaatttatttatttttatttttgttagaccaacctacaacacacgtttaattttatttgaaagttttattatattttaactattatatcaattttctatacataatttttcatcaagtcaaagaataacatttttacctttaattttcgacattacttattttgcctacataattgttaggttctattttttttaactattaaaaattagtatttttatttcttgaattttgactaatataaaattttgtctctttttattaaaaaaaaataattttaaaaattataatatttatcaattctgaaaacattaataaaaattattaaaaatattgaattatttaaaaacttaaattatctaaaaaaataatattttattatattttatttataaacacgtatcttaaaaaaaccaaattaaaattattaaaaaaattgcataaaaaaaaataattttctcttattttcttcgttttcgtcctatatttttctctctctcctagtgtgattgttctctctccagtacgtcgaagaaccttctgtgataacccacaggccagttgagaagcttctgcgaccaacgacgacaacccacaggcgagtcgagaacttccgtttgttttacgtcggccgacgacaccgatcaacgacagccactgtctgagattggttcgttttcgtcatcaacccacagaacttgttgcgtacgagtctcctcttttttagtttttgtttcatttattaattcccttttattagtttaatttaatttagtgtttttatggagttagaattataaggagtacattccttaattgattttatatgttgtgatcgtgtttatgtgttgaaattaattaagtttctccattagttttgtcttttgacatgattctttagtcttaacctttagttttttctggttcaattcttgttcgttcttgttttcttttttt

SEQ ID NO: 266556 - DNA, 2678 bp, Cannabis indica
aaaatatatttttcaacttacccataacattttcccatctttgggacaaacccagataaacggcatgagcaaaagctagagttatctcacccgatattgtgaaataataacctccacaatgattctccttaagttgcgaaatacaatagctccaacaattatctcacccattattgtagcataaaaagaaacatagaccatctacaactaggagggtggatccaacatttcctcttcatggtattgctttgctaaagatttgtagtttttcaaaataaggaataaattaaaatatatagaatttcataaaaataattaattatttcatagtagtagtagatgcattaataatatttaagaatttttcttttgttaagtattatagttgattcataaatataattaaagaatataattattttgaaaaaagaatgaaagaataattaaaattctttcttcaaaaaagaaaaagagaattgggtaaaaaatatcatacatatatcgttagcctttcgggagcattataggctaatttagtacaattatgttgtgagaaaaaatagtgtagctagtcgtgctgtgagaaaaaataattgcagcagaattgtaagaaaaaaaaaacttaattgagtgttttataaattatagattttaaagtgttttgaattaataaaattttattatactaataatgatgatattagattgtttaaaaaccctttgagagaaaagctcaggtagagctcttttttcagtcgtcaactgagtgttatagcaggtgggggccgaccaaggaagaactcgttgtctcagaggaaggaagctagtaaacgaaagattcaggggaagaaaaagcagggcccattgagttcaaatttgatgattaaaatctatggctgaagtattgcaaattgatgtgcttaatttctttgtttgatgaagaatcgaaagaagagcaagaagagttgatgctattagaacagaatcgagatctctaaacttgaacaagtaacttatgtgttatcaccgagagctgtgatacgtgaagtgtactggagtatcaggtccatagtgacttcattagctttcttgatgctatgaaacggtgtgaggctgaagtcaagtcaggtaagggtaaaactcctcctattcttcactctcaatctcttttactctttgcatctgttattcaaaatttatttgaaaaatttgagaatatgttttgtgaatactggtaatcttgatgaattgaattcgaaaaaaaaagtcagggattaagattgatatggtggatattgaagaagaggttcgatactggaaggttgcttttgtttgttattttttgggagtaaactcacctctaggtccttttcaaggctttgttagaataatgtggagggggtaaaagaattgataaagtggggttcttaaatcaggagtgtttataatgcgatttcaatttatttcgagatgaaattctagatggtagatacatgttttttgataagaaacatgtcataatgaagccttgggattcataaacagatttccacaaaaggatgttagtttggttccaacttggatccaaccacatgggttagagctgaagtattggggagaaaggttttattcaagattgtgggggtagctagggactcctattatgcttgatgagattactaagaataaagaaaaacttaatttcccaagaattcttattgaagttcaaatgcatcaagacttccctaatgtgatttcctttaccaatgaaattcatcaagaaatttaattacaggtgaagtatgaatgggttcctatagtatgcaatcattgtaaggcttatgggcacatagtggaattctacaaagagaaggatgatccgattgggaagaagcaaaagaaggtgtgggttgagaaaaagaaagtgagtgtggaagaatcgattgtggtgccagtgacagtgatagattcagatgggttttagaaagtcaaaaagtgtggtaaacaaattatcactgtgaatcaacctactattacataaaatgcttttcaggcagtaggtgatattggagcatgttcaaaaggtggagaagaggctactagtacacgaggagggggagagcctcctactttgaatgggtatgattatgagttggaacgcttgagggatcaacaatcttaagaaataaatggaggttaaacttttaatctctaaaatgaggacaatgctggttggtttactcgagacaagagtaaaagtgtccaatttgggggccttgtatgtaaatatatttggaggatggtgttttacttcgaataatgcttggcatgtaggaggccaaactattgttagttggaattcgctaatgtttatagttaacattttgaggtgctctagccaaataattcatctggagttgtgtacaatttcaggaaaataaaagttctaggtcacctttgtgtatggattcaatgatgaataaggaagggttatgttgtggaaagagttaagagagatagttgaaggaattaatgaaccatgggtaatgcttgtagacttcgaaaaaattctccatctagaggagggaatagtaaataatactaagataagaggtttgaatgacttcaaataatgtgtggaggcttgtaaaatgaaagatacaaaatattctgggtcc

SEQ ID NO: 266557 - DNA, 3104 bp, Cannabis indica
agaaaatcatggatcaacacgcaatggtcaataccaagttgttgaataaccttaacaccatgcaacaaagaatgtaactcacatgcagaagggtcccgagccttgatcttcgaagcatagagagcaatgatatgtttagagttatccttaaccaccatacttacaacagccacatagaccctttgactgccacatcgacaaagacaagaaaagcatcttggatagaaggcagctctgacagtggaggagcataaggcctgctaatagctttctttttcgaaactgccttccaattattaaaatcgcggttgatgatcgttgccatctcctcaacaggaagtaaaactttttgatgggagacttgatttcttgatgtcgagatattatgataaaaacaagctacataggtggtgaattcctccttgattgaaaggtaatctgattggtcaataaatggagcaagaactatccatttggcaacatttgggcctaaaaccagattaaaaaatcttcaattcttaaattctatttagacataaaccaaagaggtgatgagtggtattggcattgtctttatgacacaggacacactatccaacatcactcccaaaaatcactgccaaccgagaaccaataggaagagcatcacgaaacactttccaaaggaaaagcttgagatagggatgcagtttgcagtgccagagggtcttgcagaacacatcactaccaaaaaatctgagggaattaagaacccaataagtacttttaagtgagaacttaccttttcaaaatgagagtatctgagttggccaactcaaaagttgaaacaaaggagaatttagtagcagcagcaggggaaagaagctactgattaagctggagtcacactcctttttgttagaagtcaatagatttctcgcctctataagctccatcattctgaaactaatctctctatgatgcacaaaaacatcatcatataacatccaatcaccaacccagaggttctttgaagaatcacaactaatctgccatatagaactagactaaacaaagttcttagctgaccaaattcctttgccaccacagaggcattgcctttgaggcaaaactcaaagaaatgagattagggaagtacttgccttttagtacttggctccacaggaaagtttcattagaagctagagaccaacataatttagccatgaaataatggttaatatcttcaaaactcctgaacgcaagaactagactaaacaaagttctcagctgaccaaattccttttgccaccacagaggcattgcctttgaggcaaaactcaaaggaatctgattagggaagtacttggctccacaggaaagttttattattagctagagaccaacataatttagccatgaaacaatggttaatatctttaaaactcctgaacgcaaggcctcaacaactttttagtttacaaaagttttcccatgctacttgagagaggaatcttcccccttccaagtgacctttccaccaaaagcgtcgggtaattttggtcaaggtcgagagagtagatatgagaagcttcaacacagacatagaataagttggtataacatgaaccatactctgtgtgagtactattctcgtaaattgagacaacaatctggccttccatccttccatgcaactggccactttttcaacaacatatttaaaatcatttcaactgcaccacaaacaaatatcaagttccccaagaatttctcttcactagacatttccccaatcgccaaccactccatgattatttcctttagatgagagctacaattagagaacaaaactttagacttgttgatattgattttttgccctaaccacaggcaatatttgtcaaggcattcacaaatagttgtagcagtaggcccatctaccttggcaaataaaagtgtgtcatcagcgtaaattaagtatgagatagatgggcctcttcttgtcacacacacgccttcaaggagtccctcaacttctttcttatacaacaaacgagatagcactttcgaacatagaatgaaaatatacggggacaacatgtctccttgacgaatgcctctttgaggaaaaaaaagtcttagtaggacctccattcaacaagacttggaatttaacagatttgatgtagaacatggtgagcttgataaactccagatcaaaccaaaggccttgggcacgacctcaatagaattccattatagacgatcacgcttttgacatcacatttatttctcataaaagctttttttttccttttttaatatttcaagccaccaataacctcttgagcaatcatgcaattttcaattattcatctgcctttgataaaggtagcttggttcagagagataaatttttctagcaccctcagagatgattagccaatatttttgccaaaattttgtagcagacattgcatagaataatcggtctatagtcgtcaaaacaagcagcgaagctcttcttaggaataagcactaaaaaagtgcaatttatctcagaaacaaactgccatgtttaaaaaaaatcctaaacaaaattggtcacttgaaccccaactgtcttctagtatagcttgtaaaacttagcaggaaattcatccaaccctggaacttcaaaggcagaagcccccacaccactttccttatctcctccttagaaggatatgctaataagaccaagttctctttagcagtaacaatattagaaatgatattaaacatctcatttaagatgtttgaatttgaggaatggaatagattaataaaattaccttagaaatacacatctaaatcttgacgatcttcattccaatgaccatgcacatcaagaaccgaccaaataaaattacgcctcctccttaacgacatagaggcatgaaagaatttaaaattttgatcaccactaggggtgttcatcaaaccgttcgcatcgcaaaaaaatgcggtttgaaattttttgtggtgcgttgcatttttaatttttcttaaactgcatggtgcgatttgcagttttgaattgttaatatgggatttaacccgcaccgcaccgcaccgcacat

SEQ ID NO: 266558 - DNA, 8904 bp, Cannabis indica
aagattaatctgtttcttttgcaacatgaattgattgagactacataattttcgacattaatattttcaattattttctgtcttttagattttttaactattaaaacttctaattattcaaattatacatagattcatggttcagttaggaaattattacttctcctccatctgttagactatgcctttcaggactgaatatgattcttatctacactaatttgccctattttcttcgtaatgatgagttaccatatgttattctaatgtttcattgtgcctaatgaagctcaaaacagcaattagtcgtgcaacttcacgcaatgatatgttgaccatcagagatgccattgaagtgtctgctgaaatgtacaagaaggatgcaaataatgttcaagactatatacaacgtcatcttatttctttatctatctgggaggaattacggtaagtgttacatatcataattgttgtacatatatgaaaatctttctacggtcctcttttttttgtcttggcaaatgataggataattcctacacaattagaataagagacaattgatagaagaaaatatggggaaaacccctactgtattgataatgccagagaattcgagagcctgacctctccttacaagaaaaattgcaaattacaacttggacaataacccactccaattcccactaactcttatgtaatatctaaggtgcactatactagctgcactaccccagacactgaaataactcgtgtaactaacctgccacatcaacaacccctcttgatctctccccctttaccctttcttgagtacacaaatgtaattggaggcctatcattactcctggcccaaagatgaaccttgtcctcaaggtggaagtgagggaactgctcctgaatagtgttagattcgagcaagtgacaacattggatgcgagcgtgagtttgcacctttcgagtgccaagctgaatatccaacaactttgctggatccaaagtccattcaaggcaacggataactccttagtaattggaggcctatcaataccctcgacccaaagacgaaccttgtcctcaaggtggaagtcggggaactgctcctgaatagtgttgacatcttccaagtcgcttcagattcgggcagagcttgaggttgcaccttctaactgccacactgaatatccaacaactttgttggttccaaagtccattcaaggtcaatggataactccttagtaattatagacctatcattacacccgacccaaagacgacgaaccttgtcctcaaggtggaagtcagggaattgctcctaaatagtgttgaaatcttctcaagtcgcttcagattcgggcagataacaccactagatgagaacttgtggttgcaccttttgagtgccaagctaaatccaacaacgttgttggttcccaaggccattcaaggttagtagataactccttaggaaggtagctgcaacttgtatgctgctggaccaatgcgagctagcacaagaaaaggaccaaagaagcaagtagccaatttctcattcggccgtttagcaagggagtgttggcaatatggtttcaacatgatataaaccaattcacctacgtcaaagtgcacatcttgccttttcttgtctgcttgaaccttcatttgttttcttgtttgcttgaatcttcatttgtttttgagcttgctggagattcaatttcaagatgtcaagaacctcgtctcgagctaacaaattctcttcgactgctgaaatagtagtgctggcaggttgaaagcgcaatagaggaggagggtcgtgatgatatagagctttaaatgggtcatactagctgatgttgtaccaatactcaactcaaggcagtcacttcgcccattgagccggcttgacactgatgaagcaacaaaggtacgcttcaaggctttgattaacaacctcagtctaaccatcacattgagggtggtaagaagtactttgctgtaacaacgttccttgcaagcggaaaaattctttccaaaagagactaaggaaaactttatcgcgatcagagacaattgaacgaggaatcccatggactttaatgacctctttcacacaaatggttgctactgtagtggctgaataaggatgacgaagagggatataatgggcatactttgtcaagcgatccacctctacaaatacggagtcaaaactatttgatttcggaagcccttcgacgaaatccatggaatatcctcccaaacctgatctggaataggcaacatctgtaaaagtctagcaagtgattgagccatatatttgttttgttggtaggtagcatactcggccacaaaattttgaacatcgatttcgatctctttccaatttaagtccctagccagccgctgaaacgttttaaacaccctcgaatggtctaccacgttggtgcaatgaatataagatgtagatggaataacaaactgacctttgaacttcaaacaccccttgagtgtatgtaaaacaaggatgagatgagagtgaccttgttggagctcgggaatgaccctagagagagaaggatccccagcaataggagtttgcaagtccagaatggaaatgagggaagggactgagatagcattgaaggtggcctcttgatacacacgagacaaggtgtcattagccttgttttccaaacgaagacggtattgaacattgaaatcatatcccaatagcttggtgagccacttttgatgcttagaagcaaccaaacactgctctaataggtactttgaactttgcggatcagtgtgcgtgagaaaccgtctgccaagtaggtagggacgccatttttgaatagccaacacgattgccataaggtcgcgctcataaattgacttagtgcgagaccgagagggcaacacttggctgaaataggcgattgggtgctgctgctacatgcctaactctgtgctcgaagcatcaacctccacaacaaaaggctgaggaaaatccggtaaggccaatactggaactgaacacatggctatcttcagttgttcaaaagctgtctttgccttcaaagaccatccaaaagcatccttcttcaattggttagttaaaggtctcgccaaggagccatagcctttaacaaatttacgatagtaattggtgaggtctagaaacgtgcggaattgtcgcaaagtttttggttgaggctaatttaccatagctgccaatttaatagggtcaacagagacaccgtcagctgagatagtatgacccaagtactcaaatactagcttgagcaagcaaacacttttttcgattgcataaaaagcatgttgttgcaattgggggagggcctctaccaaatgtgttctatgcaacgcccttgtcggggtatagactgatgtcttcaaagaaaactaacattgacttacgtagcagatttcgaaagacctcattcataactgcttgaaaagtagcaggcgcattagtgaggccaaaaggcattaccaagaacttgtaatgttcttcatgtgtacgggaagctgtcttttccacgtcttgggcagccacaccaatttgatggtaaccagtctgcaagtccaatttagaaaatactgtagcaccatgcaattcatccaagagttcgccaatcgccagaataagaaacttatttgctatcattgctctattaaaagcacgatagtcgtcacaacaccatcaactgccatctttcttcttcaccaacaaaatcaggctggagaaaggacttgtacttggctggactatgcccactttgcatcatgtcagtgtcagaatttcttactttcatccttttggatttgggtctgtgccctcctgaagagtgatagtttacgctcacgagtccaagatggtggtaagcccgggggcatttcaaagacaccatctttctaagaaagtaaatttgaaacgtcttcatggtggattgcccgggggcatttcaaagacaccatcttactaagaaagtaaatttgaaacgtcttcatggtggattgtcccaaacattcggatgtaacgacatggaattcaactcaacccaattattgaaaccttcttgttccacagtgcgaatcatggtctgtaatgatatttgtgacttacagaggctgcgatactcttgaagagtgatccaagaaccacccaattcaaatttgagcaccattgtacgccaattaacttgcatattccccaaggtttctaaccacttaatgctcaacaccgtatccactccacattgtacggagtcgagattcaattccacctgagcgcaaatgcctttagcatgaaccttgtcgctagtacccagaaggatgccacaacaaagtagcagttatgggaaaattagtacctgtaacaacttccatggagatgaaattatgagtggccctgctatcaatcaaaaccgtgaccttgtgacctcctatcctgcccgccaatttcattgtgttgatagaattcacccctaccatcgagtttaacaacaaagtggccaaggtttcttcaacagttacctcggaggtggagttaggggaggttggaggggactacgttggaacatcctcgtcgtcctcatccatcagcacaacacttgcaaagtcttctgctcacaaatatgtcctctacgatatttcttgtcacatttgaagcaaaaatctcgagatctttgtctttatactcggcctcagtcatgtgctttattgcttgacttaagagattggtttgttgaagctgggaaaggattgggtggatgaagaagaggatattggagaatacgagtttgagtgtttggctgaaaatggagtaaacatgtttttgggaatagatagtgggctgggtatgggcttaggattggatagttggttagtatagattgttggttcatgattagtaactgatgactcttcttaacacgttgggctgtattcataatttgggccaaagcccaaagcttgaaggagattcgaagcactgcatctcttttttgaggcccttcacgaagctgccttcaagaacatgctcaggaactttgggaacacgggatgcgattgattctgacttaatttggtactcattcaccgttgcatcttgtgtaacagagagcaactcctttgccgtagagcccactggaatggctcggaatcacagcaataaaaagtgcttcaaggcgacctaggaagctatcaacctcctttgagtttcccattgaaaccatgtaagtgcgtctccatccaacatacgtgcttcagataaacaatgtaacagaaagtatcgctcaatcttgaaaactcacccctcaggattatcgtaggagaacaaaggaagttcgattcaagggggacgataatcacgatggaaatatgcctctgggtaatgaagaggattgccggtctgagtttgaggctggaatgaaaacagtggaggtagagtatgtgctatcggagtaggaccaaaggtgaccactgccagagaaaaggtcgaagagggctctcttgccatctattgctgtagacgatcttcactggttatcgtcgctgttggagccaactgattgagtgcctgcagaaccatcccgacctgctcagaaagcaactcttgtcgaattcagatttcaattcgctgaggtcgtgcttgtactctaaatgaactgcatcaagtcaattctgctaagcacatccgtctttggacccatggaggatcggtgtctttgatactaattgataggataattcctacacaatttgaataaagagacaattgatagaagaaaatatggggaaaacccctattgtattgataatgccagagaatttgagtctggcctctccttacaaggaaaatagcaaattacaacttggacaacccactccaattcccactcaactcctattataatatcaaaggtgcactatatactagctgcactaccctccacactaacctgccacgtcaacaacccttcctaatctctcccctttaccttttctcgagtacacaaatgtaattggaggcctatcaacatatgtagagaatatgaattcgtgatgttgaagcttctttatccgtacttcggatttagtataaaatcattgacttttcagttttgagcctttttttttatggaaaatgaaggaattaattactaaagttgtggaactagagagtaaagaagatgaaagagaagagaactagagaaagaacatagagatttgaaaagaagagaacgataatagatatttaaaataatctttcattttttccccttaattagaaatgagacaagctttattgtatgcattgcttttcttgattggaaagaaagtttttaattgaatgaaaaagggatttcagaaaggataataagatatcctcctaatgaaaacctgttaggccttgatattagtcccttaaatataattgattaggaatatagatgctgagttgtcaaattcttagttgttgagatgacatgtttttagtcccaaggggttagcttaaaacagtagggatgggagagtataaatagggggctgattaatcctaaaggattaggaattgatttgtattgttaagagtaaaatttactcaaggagatatccaagtgtcacgaaaattttggaaaaattgtaatcctttctttgatatcaatgagaatccgttctttgagatgactatgtttttagtcccaaggggttagcttaaaacagtagggatgggagagtataaatagggggctagattaatcctaaaggattaggaattgatttgtattgttaagagtaaaatttactcaaggagatatccaagtgtcacgaaaagcgtggaaaaattgtaatcctttctttgatatcaatgagagtcctatcttctaattcttttaatatagaaatggagcaatagtgtatcaaaaccataataaaatgacaaaagaaataaacaaaattctatctagaaagagtaatttttccgtctaagtgaaactaatgaaagggggaaatccttaagctcctttgccacataaaactaaagagaacctaaaatgttactcttactcagagaaaccacagttaaagattttatttgtgatgtttcgtactgatgcaaacttgcatttgtatatatgttttcctaatgagttttaagttttggttttctttatgacctattgcagattttgggaaggatattttgattatctaatggagaggtcttcaaacaagtaaaatttccattcaaaattatgaattaatttatttcctttttttctttgctcctataatcctatttattttaatttttaattttgttctgtattctttcgtcttcattttacaccatttcagttttgagttgttggttgaattgacgcacacacatgcatttagtttccgaaccttttgtcaaatagagtttcacagcatagagattttgtttcaaaactgtggttgttagaggatgcttatttttcttcactggtattttcatttggtgcaatcacttttaggttcagtagtgtgactgatcaatttatataatactttaaaccttactgctaaaggagggaataatctggttacttgaggcagttaaagtggtttgatgattgttctatacagtttcaatctcccttaatattattattattttttagaaaagggaataaaatatcacattctgacttaatatctacttttcgtgaaggaaatgttcacttattttcctgtaattaatatgttttaaagcttactgtgctcatgatttgatgcacatgtaaaatgaaacttctctgcaccaaataggaagtgatgtttctctaactaggtatctgctgtctcttcatttgtcaggtcggcgaattatgcatccatggtgacatcacagcttattgtggtggcatcacacatggtgatttctattgttatagcactgctactaatcattacttattgttatatattacaatttaaattattattattgtttatgtaaacgtttgttttatgatgttatgaaggctggattgggacttcctgacactgatgcttggtatatgattgaaactatagcggagagaaacaacattggttacaagcaatttgtaagtaaatttccccaaaaccgttgattgattagtttacaaaatgttatctatggtaatcctgtatgtgtaatttatgcgactagttattaatataaatttctttttatttcacgacaccataattgacaccagttatatgtgcaatgttatcttggataatttcgtcatgacccttaattcagaaaggtctgacaaatttattagaaatatcattctaaaataatccatcgtggaaatttctatatggagttttaaattgtatggaccctttaacttctttccaaactgtattttggatgaacaaaatctatattgcaatatttcaagggggacaaaaaacaatatagtaatatgtttccgttagtacattcacttggggaggaaacatgcaagaacctacttaaaggcatttttaacgtttaggtttgcagaatgcaaacataattgtaagtgttctgtaatatatattcaattatcttttatttatgtatttggtttcatatcagagaaaaaaaaattaatgtattctggttgtatcttttccacgtgggaattgccacatccaacagtcttgtagccatcaaacaaaataattcatctgaatctgaaaccggaaattctttgtctttccataaccaattttgaattttctttttcaccggcgcggaaaaagaaaaaaaaaaatacctttctgtccaaaaaaaaggcagaatgactacacatattcctccgggggcgattgggacgtggacat

SEQ ID NO: 266559 - DNA, 3634 bp, Cannabis indica
tggggtttatgcatgtattgagagtctctctttgcatcaggggtcctatagggctctaaaggcttgtaaccttttttcctttgattcaataacacccaacagagctaaaattccatctaattctactgctctattcctttcttgctactgtattgaagtttcagggcacatcactccttttggttagaattctccttagcacttagtattccaaccagtcacaacagattctttctgtataacatgcacctagttgtgcatggaaaattgggtttaattatttactcagattttgtttattttttgcttctatattttctagcttcttagctcgaatcatatctatcaaaagtcaggtttatgttaaattcagaaattgctttttcttttgtacacttcttatagtttttgaacttcttacaatctcgagttagagaattgaggaagaaagataattcttttacgacaacattgttgttggttgggattcctaatgttggtaaatcagctcttgccaactctctgcatcaaattgggaggacaagtgctgcaggtgaaataagaaatccaaagtatttctttctctgaatgaatatataattttattttcgagaaagtttatttggatatgactacgattaccataatttgatttattttgaatttgtaaaattttagatgtgttttgaatttaaagtgcattgcttctttcgtagagaggggaagattaaaacatgcaacagtgagtccacaccctggtgagacaaaagacataagcagcctaaaggtgtgtagtcgtttgctgttatagtatgttttataggaaaggatcttcggttaccaattatttgcttagatttattgcaaaattatgttaagattccacattgactaaatacaagactaattagtagtttataactacttgagcaccttcctttcatatgctataagcggtttaacaagtagtatcttagcaaacaccctctaattagtgacccacgttgtagaaggggcgacttatgaaatgatcaacatgtgaaggagattacttgggaaaagcttagtgtgtcattatagagtggaactcaatgaacatcagctctaaaagggagtgtattgttagaatttcaggctagtcttttggtagtgaaatctgctaagtagttataacataatattgtcatttatgtttatccctttttaggagaccacatgcttccgagaccatggccaaactcatcactgcagatcccacatccgagcttactgacaagtcttgatgattttgagatactatttcattcacatcagtatatgaaaaggaaaactacttactgcatataccatttttcgggaccaactgatacactccagctaggtacacagggaaaatcaaagagaaacagagaaaacggagaataagcatcccttaactctacactcatattagttttattttttaaaacttcccaaaaagatagatagacagatattaaaagagatctcagttaatcacactagttccccaattgaaagaaaaccttctctccatacacctttcattcttaatactagggtctaacacccaccttttttttttgtccataatacataatcataaatgttttgatctagattccattactataaacaaaatttagaaaggttgatgggaggggagatagcatggaaaatacattgtgagcatggtttcgttaggttctgagattctatctacgaatgggcatcacatgttgaattttcattacaatcaatttcattacatttatcttttccaagttttaactcttatgttatatattcagtttatagtttaaatgaaagtttatgtgaacttgcagattggaagccacccgaatatttatgtattggatactcctggaattttgccccctgagatttctgatgatgaggtctgcttaaagctagctttaacaggtagagaaactacatagctcagctttcatgtatttcaaattcaaaggattctttactaatatgtcatggagcaattaacaactctcaggttttcattttccaaaatacaggagcaattagcaacttttttggtggagaaaaagaacttgctcaatattttcttactattttaaatttgagtgaagaatacaagagatggtcaaagtttatccacaatgaaaatgagataacattgacaaaccatgaatcagattgctcaagtggctttgaaaaaaacctgaaacaaagaaggcaatatcccacagatcatacacaggtatgtataagcatttatattatcaaattatggaaccaaatgactagcaactaacaaggaaaatgttttatagttagaagaacttaagttagttgccaagtatccattgctttattattattttaatttgggttattttcattctcataatataccacttgtaaggattctactttgactaagtataggattggttagtaatatataactgcttggaaccctaggctagtttctagaagtgagttcaacccaagtggttatataaagtggtatcaaagcagtgaacttcaaggggaccgacatcgcagaaggagcgacctacggattagtcttgaacgtcggctccaaaccggagtgtattgttaggatcttacattaaccaagtataaaattggttagtagtatattaactacttgggcactctcttctcttaggcttcttttgtgagtgaattttacccaaatagttgtatgaggacctacattacatgtttatagtatttaaatcctcaaccttttttaattcttgtcacctaattttattgttctcctcttttcgtttcacgatctccatgcaggatttaatagtgaatgatgttcgtcaaactctctttgagataatttcatcttttgatggcaacatggaagatgaaaaggacttgaggagacttattgaagcagagaccatagccttacagaaagctttcaaaattcctgtggagttgtataatgaggatggtcactgcaaagtagctggtaagttattgaatctttaccgtactgggcggcttggacactacactctagattccatcacttgaaaacgaaaatggagattatactttgtgtatataaaacaatatttatattatcttcaaaccttttgatttgggtggagaagatgtttagtttgaaacttgaaatcatgatgttcctacaaaatgctatggttttaagtagagtttttcatggttttaagtagttatggaaaaagaaaaaggaaaggaaaaagaataagtaagttgtgtgacttattaagaaatgagaggtatgaaataaattggggaataaagagaaactaagccactttacttttaacattgatccaatgcataatggtagttcatttttctcaactctcatatgtaaataatgtaatccttatcttttgggcattcttttaataataatgataataataaggctatttatgattttttacctccggaactatgacttatgtattattgtggtgttgtgataaatccaacacacaagtatacatatcgttttaataagtaatactcaggtaagtgagatcgttctcacgagaattgtagctaagtaccaaacaat

SEQ ID NO: 266560 - DNA, 2094 bp, Cannabis indica
atacttgtgagtagatctaagttcctggtaaaataacttccaacaagaaattgttacggtccagctttagtgcaaatggctggttcagggtgctcccaaattgaggcacgattatattcggagctgagttttggtttgtggactgtggtgtcgttgtttcaacgctggttgcagagtttccatcgccctccatgtcgtacggcacgctccgagaaacccgctctgataccaagtcaaaaacagagatataataggaaagacaaccagaaaataagggatgaatgctcagctaaaatcattgctgagattgtgtattgaatttatagaaaaggattattacaatgagaatattctagagcatgtacacgtcacagaaatgacatctcatagtttgttacaggggtacaaaaagagagagagagaaatgatttcctaatcattgcattccaacggctcttccctactttcgtggatagcaggctttgctgcagctgattgggcctccttgtattgggctgctgtagagtaaatatttccaacaaagaaagaatcttttacttcatcaataattatttccaacagagaaatgatttttttttttttgaatttattacttcatcaataattaaattccaatcaaaaaataaataaaaattgagcttaataattaaactagattttattttagatttccaaaatgataagtctttccataatttttttttcagttatgtatatggtctttgagcatcttattttctttttaaacaaagaaagaatcttttatttcaacgaccgcaaatcaaaacaaccaaaatttaaatcagaaagagttaatcaaactgatttcataagcctctcacctgttacaattggaaaaacaaagcacctttcaggctttcactctaactttaatggctaaattaacattagcactaatgaccttggctacactgtgagatcaaagctacatatctatgtggatttagttaaacttagtcaaacgaattagttttttcaattaaaataacaagtcagctcttttaagcttcaatctcgacaattaaaaattaattagagactatttatttggtccctctaatattcttggacaaagcctatatataccatctatgtattcactattgagtcctctcaagtctaatttcaatactcaaaatctcatgtaaagactcttaaaatcatagaactcgaactgttattgtaaggttataggtgtttattaccattgtagcactaagtgtgaatcaataaagattaaaaccaaaggttgttccatccaaagatagtagatagttgccactaccatgcaactgatcgaaccttgttaaattagtgtgatttgatttctattgctatagtagacagttgcctcacactaatgatttaccaagtgatgaaccgatattttgggatacaaaacctattccacaaaccttagtatagcaaactttagcgataaccgaagggatattgtttagcaaagtgaaatttagcaataaccgaagggatattttttaggctaaatacaatttattatcttgtatattataaaatttacttattgaactctatttattaaatgacaattcaagctaatcggtattcttttcaaaaaagtgcaaaattaaccataaactcaattttcataaaaatagaacataacaataatctaatctacatgtgttatagcataactatatatatacatatatatatactaagttgatgttacgtgcattgcacgtataattagttttcttttttattaggtttaattaagtaatgttaattgcaatacatttaagttcaaatttttttcattagataatgtattttatttttaaatttttaaaatagaatttgagattttgatctttgaggattttttttagctattacggctacgattatattagaaaatattttgacaaaatttgagtttaattagagaattaactatacttttaaaatacattttatatattatgtccaaatatatattttaaaagaataatgatagtgatagatacattcttataatttgtaattaggagagtgtggttataataa

SEQ ID NO: 266561 - DNA, 3780 bp, Cannabis indica
aacaactgtgtagcccgtgaacatcataaggtccactggttgttctactgatacccaacaacttagaaaaaatatctataggaaaacgtctatcttatatgattggtaaacaatttacaggtttaaatccatctgcaggatattaaaaatttgaaaggaaaaaaaatagaataatctagtttgtgaaacccgaaagcaagggtctacaaataattcaactaccaatactgaatgcaaatcaatatggccactgacaagtagctcagtcaagcaaagtcaaagattacccacatactccaacacttcagtacctaaccttacacttcagtgccttatagagcacaaaccccgaatttctgtaccttacctgatgaactccaactaaagagcttcaaaaattgcccgtgtgaaaatatccataagatagtgaatgtcaacgactaaatttggtaccgaaagtgtgcgacgtggctggaaagtgcatattttaatacagtgatgcagtatagacctcagaatgttgcaaccataacacatggtgataatgcatagcattctacatacaagatttatctgattcaactgaaaaagggccatagtttatccatgagacaaaaacgtatataaaagttaatcgagttcatacttcaatttgattagccatctatgactaacataactttataaacttggcaagcataaacctctcgacatctgaaatatgtccatgcaataaaaatgtgtatctagtgaagattgagaaaatctacctcattcaacctcggaataatgcgcataacctctggacctctactgtcaattcgtatgttggagccaacagcatcagtaacatcaatgctctcagttcctttcaactcccaatttcgggctttaaatgcaaaaggctttgaggtcagggcaccaacaggacatatatctatcacatttcctgaaagttcacttgtcatcagtttttcaacataagtcccaatttcttctccacttccgcgacctagcatgccaagatcttgaaccccagcaacctctgtcgcaaatctgacacatctgtttaaccaaatgcatttcacatcagaagcttgctagatactctgacaaataaataaagacttcatactaaactgagaagtcaaaacagtatataaatagtatgatttacaccgaacagaattttcaagaaacaaaatagctgtttttaatttaattattaaaacattaattcaagaaagtgcaggcttactagcttgatatttaaaatgaaaattcagtgaaagataataatttcatgcgttggacaaagataacccggaaaaaaaattgtctacaattgaaatacaaaatcacatctattacatttcaaaaaaaaaaaatcacatctattacattacaaaaaaaaaatcacatctattaaaatagtaataacaaaaacaatgataatgacgacgattcagtttttgcttctagaataccattgaaaacataaaccacatactaaataaactagcccaaaacacatatgaatagcaaagagttttacaaggagaaaaaaccttaagctatgttgattggcgaaaactatctaactgaataaacattgagcattgaatattaatgacctagaaaagaaaaactagctaatgagaagctgatgaaaatacaaattaatttgatgatacaagtttcttgactaaaataaactatgaactgtgggactgcagtagaagtgaataactaaatcgaggctgacctagtacattgaatacaccgagtcataacagttttcaccaaaggaccaagattcttatcaacaacggatctcttcatatcagtgaagcgaccgcgatcagatccaaatgccatggattgatcctgtaggtcacattctccaccctggtcacaaattggacaatctaatgggtgattcatcagtaaaaactccattaccccttctcgagccttctttgctactggagtatccgtctttattttcatccctggaaaatatattatcaatgaaattacaaacacgagcaaacaaattaagcaaaactaaaaattcaaatagcaacacgccagcagcgctgttaaacaatatatgaaacgagagagattctcttctctaaaccaaaagcctctcatacaacaaattgtgatcaagctactgcacataataaatggaagttgcaaaagaaccataaaccattcaatccattagtaaatgtatgagaccatataatatatataatatagttctaatcaacaagactttgaatatcacttatatccaattatacttatatccgattatatgatacactaatttaaaattcaaatagtaagaagatataacccaaaatcagccatgatcaaatgtaatacatgctcaaacacaaaaattacaaataaaaaaatcaaagtgggaaaaccctaaccagggagggcgggcatggcgcaggaggcaacaggcttgggagacttctctacttcgacgaggcacatccgacagttaccggcaatggaaaggcggctatggtagcagaagcgtggaatgtcaacgccggcaacctcgcaggcttgcaagacagtgaagcccttgggaatcttgactgggtagccatcgacgaagacctcgatagcgtcttccgggttgggtaaatggactcgggcaccgcccaccggggtccgcggagaaagatctggagtgggctcaggctgagcctgggcggccgccgattggtcggcgttgtggagctccggtgtggaggatacggccctggtgaggaagaaaccatttttgtgggagttgaggagcctagaagctgagggtcttatgactctcgaagctagcgatcccaaccccatttctctacttgttggtggtgttggtggtgttgcgtatgttgtctccttcttccagactgaggagatctctcagaactcaccaagttgtagcgcagatgtttggttgcttaagattgtcaattctcctgtttctgccgcactaacacaattgcagtcacaattgggccataatttattgggctaggcttcctctatccaacaataagcaatacctactttttcaattctatacttacaatacattttatttataaatatacatcaaacaaatttatttataaaaattaacagtgttacatgagctaacatattgttatacccaaaatttagttgctatctcagtagaggacacgtgtcacgataaggggaatatagatcgatgcaatcgctctatatgaaataactcattaattacatgagtatcacattatatttgtaactcgtaggctgtaaggtcttaggcgaggaactaatatacaaactggtacttagcatataagcgagaaaccatatgacactgaatgcgaattgcgaggcatcaaggacagtacatattggaaaacgaaagcgacatatatcaattgcgaaagtccttagtgtacaaactaagtgttacagacggatcgactcaagattaagtaagtgaggtgcctgtctcgttatgggaagacctcatataacttcatcccgttagcatcagcgaggctcacaatcctggcaagtcagaagctagcattcaggtgagttccgaagaattcattgtacataagaaccgtgatcgacatcagacatgcatcgtcgacctcagaaggaaaaatggccccagctcgctattgagatcactggagctaagcttttgtcgagataactccaaaaacaataattaaagacatgatttaa

SEQ ID NO: 266562 - DNA, 3273 bp, Cannabis indica
cttggtaagcctatgagaaaaatattaagcaaaaaaagttagaaactgaaaaaggagttgaaccagactttgcaaaaatgactaacatattttttattactagttacctatattgaagtcaaactttatggtcgttttgtcatcatgatgagacaaatgcaagtgatttagctatgaaaaaccgaaagcaagataaggggttggtgagaggttgttttccaaattttaattgaaaagctaagtaaattcttccatgaagaacaatagaagaaggtataccagttagtgataattcacctttgtctgctatgacttatgattttcttgaaccttgtaaataaaattgcttggtctttctttgtaacctaaccaacaatggcacttgaaccagccatcgttccatcttttaaaaatcctactccaacccttccagttgtgtatacagccgataatacaatgttcataacattctcttcattttgagtgtactgtaatttatcaatcaaaatccaaaatcagaaaaaaataatattttaattattattaatccgccatcacttcgaaaaaatagcctctgtttattttgctactacctttgtcatcgaaagagaaacccctccaccctcctcttctagtttctcatatataatacccacatgtcttcgatcattgtgaacggaagcgatgtccacttctatcttcactttatcgtagcattctcagtctcaagaacagtcaaatcaaatactagttagacctaaactaaactgtaatatttcggaaacctaattatatgttatgaattaatgagcatgaatatgatctcactaacctaatttaacataaattataaattttgctataagtggataaataaacgtaatttgttaattacagatatatatattttttatttttcaggatcggccaccctagagacccgattggaggcaaaaaaaaaatgtcacaataattttagttagtaatattcatgggattattgagataagtcaattttagaaatatcagggtattttgaggaacaacttcattaatcacaagcaattaaagcaatggctaagcaataaaagcacactcagccaaaccaacccctacttacaatataattgctctatatacattctctcatgtttattcaagtttctcttttttgcaatttttaatctatagaaagtaaccttttgaatttctagtacaagattagacaccatgctcgagtaatcattaaaaatatagttgttcttgttgatccaaatgctattatatagcagattggacttgaatctacctgtcaaccccgttttatgaatttcagatctagaaaatttgtctctcacatgaatttcttttttccaataccaactcgtatcaatcttgagttcataagaccaaattgaattatttttaagataaataccattgacccatttcatccaaagtatgtcaattttggttgaaatggccaaacgatatttagctatgattgcttgattccatttagttccctctttgaaacccagccctccataaggtttcggcaggcataccttctcccaattgaccacatgaagcttgcttctattcccgttccaaccctataggaacactctacataacttttcaatttccttggtgatgctttgaggcaggatgaatatgctcatctagtagttacgaaggccaagtaacactgaatggataagctggactcttcctgcaaaagagaaatgtctacttgcctagcaaagaagtctttgcttaatcttcttgataatcacaccacaatcttcagctctccatttagttggtctcaaagggactccccggtactttaggggaaacttgccctcagtaagagtcaactctctcaaaatagcctattttgtctcttcttcaacccctccaaagtaaatctgagatttacttgtattgatagcaagccctgtggtgtctttgaactcctccaaacaattcttaagcacctggatagacagaatattccctttacaaaataatatcaggtcatcaacaaatacaaatttgacttgttggctgttatttgcaatctccttgttagatactccattatcaaaacaaaaaggagaggggatagggggttcccttgcctcaaacctttctttcccttgaaactaccttgcactctaccattcattagaatagaataggaagtggctctcacacaagtcataatccatgcaataaacctggctggcatattaaatgaattaagaagctcctttaaaaactcccatttcactgtatcatacgctttattgatatctactttgatagtgcacctaggggacacattcttcctattgtaattcttcaagatatcttgaagaatcatgttgttatgagcaatagatcttcccttaacaaatgctccttgattttgaccgacaagactaggaacacatatgcatatcattatactattcttacctcatttttaggttcaggtgtgccggccaacttgagtggaacagctcctcgatgatctacatgcccttaattcacattattcgcaaaactggtgagtgacacactaatcacttttcgaggacttaaacttgaaactaaaattttcctatcaatggataacatggaaatactctaaatatcgtaaaaataggaaaaattaggattccctaaaatgccccaaccagtagaccggttctccaatcgaaattctagctctgtggggtttcttggggaccaaccgatcgatcggttcttacaggtccccttaaaccgatcgaccggatcaatgcaagaaacaccaaaaacttcccaaaccactcaattcgaccttaaacttcatacaaacatccagacctgctatttacaccataaagaatataaaccaaacaataaaacacctcaacatatatatccagaataataaattaccattagagagcaaaacttgagttcataacctcaaaccttgctcaaccaacacaaaaagccttaaaaccaactcaatccagcataaataaccttaatttaacatcagaatgcaaattcaaacaaccctaaaagctacagaaccctaactcacaaaatcaagcaaaaaccttaacttaacacttaagaaaacaaagggaaaaggtgctagaggggttaccttcagtggattcaccaagaaccaactaaaatccacagaaacaagctgaagaaacaccaattgctgtttattttgcaaggaattggagagagagagagaga

SEQ ID NO: 266563 - DNA, 6359 bp, Cannabis indica
tagaaataaaaattgtgaaaactgcaaaatccaagtgaggtccattaacacctacggccggccacttgataggctttttccaattaatattttcattattttaatcccaagtaattactaacctaaacctagtagttgccgtgatggctcagtcaaaataacaagttttcttaagattgtcttttcagaaaaactgagcctttcactttctctctataaccgaccctacctctctctcttttcttcttcacaatttcgaaccctctagtgatagagtagtgcccacacacaataagtggtacctcaatcatagattagaagactgtgaaggatcacattcaaagagactgacattcggcctcagatcttaataatactctgcgacagaaaggatacaaagattagagatctgagtggaatgagacatattattccgctgctaccaatgtaaaaattttttaactttatatgtgtttaattatcgtttaagaaagttcatatttagggtgttaaacaacatacttgtgagtaaatctaagatcctagtaaaataaaatccaacagtacattcttataaataaaaaatttcgatcttaaaattataaataaaacataaaaaatgatattcttaaaagttcaaaagttcccttctttaaacacttgcttcactgaaaatacctttcaaatctctatcaaggtttctaccttgtatttattatctttttagagataatattattgtattagatttaaaaaagtctagtttctaaaagttcctctatggtaatgccacattataatttatatatatcaaagattatacaccatatctatattttcaaaaataattactccatatctatgaaaacttcccataaaaaactaggcattaactatggagatttcatgaatgcatcaactatatccattgtttttaatttaataataagatattcatttataccacaactaactaataattatataaaacaaaaaaattgctaatgctatagagtttttttattttctttttattggaacaatgttatagagtttacttttactaacaatcaacaatgattatttacattttctaactcaaagtgagatatacataaaacaaacatagaacttaaaaggaaacatgcattatgaaaacaaagactaaataaacaaatatcatattcccaatctcttagcaccacattctgagcagaacttagaggtttctctcaagtatggagcaccacattcatcacaaaattttgctgggctggatgcctgaaatgcaagttcactagctagtaaatctcaaggattatgacaagagctaaaggaaaccaaaattatggttataaaagccaagcaaaatagaggaaaattggttacaagacaagttacagttttctactttgtttcagataataatttagtaaagtttatttaagtgatcacagaacaaaagagaagcaccaagctgtgttgtgttgtgttgcactgttgtttattgtcgattaaaatatacctaacggctcagtttgcagatctttaattactcatataatcatatacctaatggattcatcatttaaatcagaatctttaacctaatgataggtaggttaggtcgctactaagcatttgagttacagcagctaacagattcatgccaaaaattgacccactttaatagtcagcatgaaattatagtacaaatcattgtaactcccaatacattgttaaaagaaaataattgaggaacaaaaaaaaggcaaatcaataattaataaccttgccagactttcacttttgcaatcaatttctagtaactctatattcttatcatctataacagtcagcatgaaactacgcacacaagtcattgaaactctcccaatatggtgtttaagcaaattgataatatgaaacgaaaaaaccaaatcaacaattaataaccttaccaatacatgcaaacgccctccaacatggcctgtgagaggttgtaagcacgcaatgtgttgtgacaaggttggcgaatggtgagcaccgatttcaggcaggtgtggggttggaccacactgatggttttgagaatattggggagtatgttgactttggtgcattggttgattgtgatggtgaacagggtgaaattgaggttgctgcaacaatggttgtaaatgatgcttgcagggagtctgctgctgtgtttgtggctgtcagaaaaacaaccaaaatattagtatgtagtaattccctaatctaacaaatatattaataaatcaagaataaacaaactagcaaacttgtacctcgagcataatcagaaaactttacatattcctatattcatgtttgaccttaggtgaacacaaatacttcaaaagcaagaagacaatatagtgactaattatcaggatcctatgaaaaagcctatcaccccgacgaggtcataatatcactctcacattatttaacattattcctttgtaaacaaaatagcatatcgaattttggaaagaggatatcagactcttacttgtgagataacataattacatttcacttcactatatgataagttctttcttggatagaatcatcccttgtaattacacaataagatagctgaaattcttgcagaaactttattgaattgatgggcaaaattacaaatcacaagctttcgagaggcttgttctctcctattccaatctgttggagaggactggggctctccacaatgaatctcaactcttatcgattttctccctccctttctaagagaccccctctccttatatactttacgatgccctaaaataattgccacatcagcccctaaaactaatacaactcagccactaatacacatcaacttttaattaaaacaaagagaactaacaactaagcctaaagtctagtttaatctggtggcttatcacactacaaaaataatttatggacaagtgtgtagctaaatatcagtaaattctctagctatcacgtaattcagaaaacaacatcaagaaaataaaaaattatgtgttaaactttacaaaataataaatttcaactatagtattcctaaaatagaaaacataaatgcagatccataaaagaaccaaaaaggacccctggcaatttacattgacaacctcaataatatatattgcatcagaattcagataaacataatgttgtcaccatctttaacttctatcttgttaaaaaaaacatgatgaaatgcaaacttagcttgtccagttcaagatatatagagtactaatttcgaagaagtaaaatgatattaaagcatatcttacttcactgactgtacggaatccttgagcagtagtcaacacagaagaattatcattaccaggaaaactctgaaaagattatttagcgaggttaattcattatagctgaacataaagataaaaagatgtgtgtgaacccattctattgtaggtggtatcttatcttcaaaagggtttgtaatttcatacgatcataagaatgaaaacaaataatggcagaaactaaccatcaaattcaattaagaaatacacacacacatatacatatgcataagtgaactaaattagtgactttaatttcccacgatcatatcacaaattcataaatttggcatttcatgcttacaggtaaaccaggaatgtttggcactgaacttgaagaaacacgcctaaatttatgtctcggagaataaaacttgtagtcttgagcagacacagctacttcatttcgacccgtcaatcgtttaaacctgcaacaagagcaatttactgaagtcaaactaagaagaaaaaatacaaaagaaaaactgagcattcttaaattgtcaatcctaaaagatctttcacgatctatatataatttttttattatttctattcatgacttcaacattttataaaaaagattcataggaacaataccaaatatcaatatagataaatttacttgtttaacttccccaataagcaatccaaacaaggaacgccatagaaagattgagaataatagattgtgcctatatcatagagaaaatatttgtctttactctgattgtacttgcgctataatctatcagttaccccgatattcctctgctgaggcttaccaataaattcaagtgggggtcagtctaagacaagtgacccctttctcttttaaaatatataataggccgtagtgcatgaaattatattgttatgaatcatgccatcccattctctaaatcaaaactttattcaagcatcaaggtcttaaaatcatccaagttcatttatcttgttatgaatcatgccaccccattctctctttggttttttgtcagacttgacaagtgaaaaaaaaaatgagaagcagtacgtgttgccaaaaagcaaccatgaagtcacagattgaggaagttttcaataatttacgtacaatgcacagaatgctctccagcttaccactcagcatcatccacagaaatgctatttggtttttcaataatatccaaaccattgactactacaaatcgaacacgcttctcttcttgtatcactaattctggaaaccttgtcctagtctctagggaagttgccagttctcttcttttaaacgtgcatgatcctgattgatgtgaccagagatacaaaatttagaagtcgtgtcaaaaaactctaaaacaaaagtgaggtgtcattcaataaaacaacattaaattagtaacccccaattttatactctactacaaatatttaagaacatgttaggaggaggagtcagattattaaaaacaatcttttttgaaacaaaaaataataaaaagtaccttttttgggatatttcttagctagccttctatacaaaccaccagctgcttcaagcgctaccccaatagttttgtcacgaataccatttatggaagctagtctaacatttacatcattgactaaagtttcgtatacgtttgccacatacatcaagggcaaagcaaaccttggatcaccttcatactgaatctccctccctttccttttattgagtttttcttgattagattgaccagtataatcaccctccgaatcagcaacttcaattacatgatcgaggataaaatgatcgacaataatttgtaaaaatcttgctcttgcagattcaataggtgaaacatctactccaaagtacaattcaactcagttatcctacttttatagttgtatgacacaaagggtccaaaatattcaatccagaaaagtgtaagttaccttcaatggttagtataccgtagggagcccgtgaaggcccattattctcaagactagaacgcttttcatcaactccgacgctgtgaagttgcaaagggttcctgtacgattcatgcatgcattcctaaaattgtaaactcagagtagattaatacccatataagatagctagctacagattaggaactcaactccaaatctttgacctcaaacaaataaattttctgcggtttttttaacaagcttagtaacagtgacttatttcataattcttaactaaaaaaacaaacaaaaagataatagtaaagaattaaactaacaacagcattggattcatcgtcgttttcgaggctatcttcggtgacggcatcgcgatcaacatcgctgatggattccatttccatatcagcagcaggacgcgtatcaacggtgttaagatcgtgcagaggacttgatatatacgaattcgccgatctcataccgaaatgctgaaccgggactctactccccattccgtctaatcactttaacaccctaaataaattcaaaaacagaaattcaaaaactaacagccatggaattcgagctctttggatcctgtaagagcagaggaaaaatagaaatggtttgaagtaagccatcggagcttaacctagcttaaaaatggagtattgagtgtaagaatggggaacttggctcagtaatttgaaattatacatatatatagatagatatagggggaaagttcaacggctatggagaaggagagagagagagagaatccaagcctgtagccatacctgagcttcgcttgtggagacgaaaaaggaaggtttccgaggctgagtccgatctctactccacaccagctcccattccaacattttatagtagcctagtagtgatctagtaagaccgttctcacactttataacataagtcctctctcacctcacttagtactactccattactaactaatttttatttttatagctaaatatataataaattttttaaatattaaaaaaaaatctcacaaaaatatttttttatgaagtttctcacaaa

SEQ ID NO: 266564 - DNA, 3602 bp, Cannabis indica
taattttttttttcaaattttgagtgtattatgtaattatttatagatttctcaattatcacaatatatggctaaatgcagatggtatattaggaagaaaggcttatattattgaactacaatggcaagtgttttccaggtatttgtttttcttcttttcccacacaaaaacatttttctacccagaattttagttacacaaaatgcaatcattagaatttagaagcatagataaaagtattaaaaggaaaaaataaaaaagaaactggttgttcatgcctttcaagtacttcttcacaagtttttagttcaacaacatttgcttccttggtcaaaaataaactagtgaaaataaaattatacattcatgattttgaaatataaaaggctcaaaatagcttagtaaaaactttcactcagaatcagaatcggaatttacaatggaggttcttactgaacggcgtctatcttcatgatctccatcgtcttcgtcgtcttttttcttctcactaataacacctgcagaagaataatgattttagacactgcaatggtgggatatgtaccagaaaaacacacaatgaacaacaaaaagaattattaccctttttgataagaagattctcgagtgcccttgtggtgaaatcgtctttcgctcctagatcttgaaacccaaccaccctgtctactgcaattccttttctgaaaagagaaattcaatgttaataatcagacatgcattcataagtaagacacatcaacttactttcgattatgaaagcagttgagaaaatctgacctgaatattatgacacaaggcaaagttttgactcctagcttggtgataaagaatggtgcattctgcgtttcagacaagactgttaataaatcatggcaaaagtcaccgaaaacttaagattgcaatgcaatattacaacaaatattcaagtataccgacctcagcatcgagcttgatgaactttgtatcgagatacttagtagcaagggtcttcaaatgcttatccataatcctagaaagaagcattttaaaaactacatcaatttttgcaacacaaagcttgagtggggagaaaagggagacatagaaggagagggtggactttacttgcagcggtaaaaatcatggtgatagaagtggcaaatcactttctcactcccggtaacttcacccaagaaatctccttcactaatatctctgtattctccatgaccttgcctcttcaatgcttctcgcttctcaacttctttctaatcaaaacaagaatcgaaaaaagtaaatatgtacttgtgaaatttcccattgaactgcaaatcacagatgaaactcactaggtggaaacaaaatcaaaccttaagcgcggcaatcctatcagcatgcaatttttccagctcgggatcctaagcaagatcactcagtccaagttaaacataacagataaaaagccatcatttttatagcgtggggagttagattggaagtctaagatacttacatccatcaactcatcaagatcaacctcctcgttgacagagctcgatgtctgggccttttgctgagaaatcacctcctgcaacattcacaaatctacacatgggtacacattcaccaagcaaataatagaacagtagttgtaaaatagaacggtagcaaacagtaaaactaagccatctcaaccatggtttttcattttaattttggaaagacgaaagaaatacagaaaaggtagtggtcctttcggacctacaatgcagagaataatctcaattcttgcataaaaccctctctcctgtcctataactatcactcccaatgactcatctaatcctttacttactgtcttctaccatatagtatgctatattggggtctcacattaccagccaaccgatcagtttcatggagcctccagcaggttgcatttacaaaactactaatctgataggatattgtcatagaaagagagctaacagtagccaaatagaagaaacaaaacaaactggtatatagtggtattaaacgataaaatggtaagtacaatggaactaactaatgtgtattcgagagaactatcactcttgtaagagcaaatgattctccacacccttcaccccttactactgttctaaactccatctcacactactaatcctaatgtctaacataatactgtgtcactaaataaaagcagctccaactatactttctatacacattatttagctaaaataaagagtaggaaaaatgaactccagccataaaaaagaatgactctttataatagagaatggataaagaactctctaaaaatgaaacgacaacaataaaaatggttttctaattttaacattttagctaaaaaaatatatatggagtagcctttgattagcacaactataagttccccaataatggagattgacactaagctagagctttatactaataactataaacacacaaacacaagtttttccatattaatcactaactacaaaactgtgtggtttaacaaaaatcataaatataataaatggtgaacccaacatgatgaattaattaattaatttacaaagaacagtaacagatctgatagcctatgattcccaaaaatccaaccttttggtaatcgcgagcagcagcggccattacatttccaaaagctaaattttgaagagtcgatttgactgaatcgggatccatcttttgaaattttcagaactctacactgaaacacatcgaacaagaaacaatggcgaattaagtaaaattccaaaacaaaaaactcgacattttgtttgttcatcatcattaacatggagagattcaaagatgataatcaaaattcaaaattgacatacacaccttgatgaaggtgttggccgaggcgaggcgagccgcgagtagaacagcagttgaagaagagcaaaaatgaaagagaacatctttttataaatactcaaaaaaagataaatttattacaaaaatacacaatttttagtattttgtaagaatgactcattttgaaaactttcattacaaaattttaacacaattattaccataataatcatgtttagttgcacgtagggatacacatttttttcatggggatggaatccgctaattaaacggggattccccatctagatggggaacaagacagggacagggatgacactctccgccccgacgggaacccacatgatattctaatttactttttattaatattttataatgtgtgttcgtattgtttttagtatattagtatttttttataatgtttaaagtaatgttgtgtattataattaatatattgaataataaataatgtgtaattttttttaatatctttttgtttttaatatcttttttacattaaacttttttatatatattagtggattcttcgcctcgtcctcgacccattcctggtggggaataaacggggtggggatgggaaagcactcaccgcaaattttctaatccttgtgcatccctgcccacgaagcaccaaaaaaaaatatacattgtgtgattataaaagggaaatttacatgatatactaactttcgctatt

SEQ ID NO: 266565 - DNA, 1261 bp, Cannabis indica
tattttacgtttttgactatagttattatataatgaaaattttaaatttttataaaatgaagatagaaaaagaaaaaaaaaaaggggacaagaaatttttttaaagtactacccaaaaaactaaaaggtacaaattcctaagagccaaaaagaaaagcaatccgtaaaaatcttttatccaccaaaatcaacaagctcagaataatactttttttggggttaagaaacactattaagaaaaatgaatcctgacatatttctatggcattaatttaatttcaacattgcttgatatactaccccatcaaatataaaagctaaaaaaaatgcaaaaattgaaggataaagagtatatagctcacactcaatgagaaacggcaatcaaaacaagaaaaaatgaacaattagctcaaattaattaaacacctgatctgtagttagtttggcgccattactttgttgcaaccacccatcaatgataagcttgaaagcttcatcacgaaagagaaatgacccgagaaatactgtcaattaaagaattatgcaaaccatcaaacctgacactaaaatgaaagagcatgacaaatagaggctgtatcagggccaatacaaaaattaacataaaagcactacctttatgcttccaacaaaaatttctattgcattagggaagataatgtctttgatctttgtacacttgtcacttcattgaatgggatcaatttctgaagcacgacccacaagattcccaataattgaaaaccaagtttataacgtattgcatgtatagagataaacaatgacagtaaaaatgccaaaccattataaggtaccaacaaagtcaatacataaagcactttaaaagagtttacgtggctgttggcaatgcaaaagctatatacttaggcaggacagcaaatgtagaaaacctttttctatgcagttatactatctggggttctctgtgcaaacatagtactaaatctgcttgacgagattattggagtcctcagaatttataatatcttcattgccagcagttaagtcagctaggcttgcagagttcttcacccatccaaaagatatcatgtgctccaatacctctgcagctttatccatatgtccagccctttggagaccagaagctatcatgctacatgcagaaagacttagactaagccctgcttctccaatttcattaaggaagttcagtgcttgtaaaaactcttctgcttcacagagggtttgtattagagcatga

SEQ ID NO: 266566 - DNA, 1851 bp, Cannabis indica
tgttgtcgtttcctacatgaaacacaaaatagcccataagattcatcttctttgcataagaaactttagccttgatagcctcaacatcatcaaagctaataaagttttcccttagtttgcagaagtttaccgcataagtatcattgtaaaaagactttacaccatacccattacttcctatgtaccactttaagaaattatagaacatagacccgtctaaggtgattcctggacctgttgatggagccccaattgaataatcatttgggtttgcaagggtccaagcgtagccaatataaggcaatcccaagaccagtttacttgctggaaatcctctgttcaaccactcgtgaattccactattggtgttaatcacttggttgaatggatcatacaaagcagcatgagggttagagaactttgatgttgttggcatatagtagtcgtacgatttaacatgaacccaatccaagttcttcttcatcgcgtcaatcgggtaactcactgagttcaaactcggcatgatatgactcaccatcaccaagagcaacttcgactggttcttttttcttgactcagaatctatggcagctcgccactctcccaaaagggttctcaaaattgtcatctccaagctcgagcttggtggcacactataaaggtctagcccatcaaacccattaagcctagctgttcttattgaagattcgataaaggattttctagaagaagacttggttagcgctgagagaaagtttgaatcttgattttcaccaacccagatggacataatggtatttacagatggggttttaagcttgacaagattggtgaatgtagagaacttttctgagctagaggcattaatatagagctggtacgaggaaacatttacagaaacaaaaccaaagattaagtgagtgaaaagagcagagttgatatctgaaacagggagctctgtttgtgaatcgtaataaccgattttcaaccaagattttgaggtcgaacactgattaaaaaacaacagaaagaaaaggagactagcaagtttgaaagccatattggagaatgatgaagcaatcatgaactatggtaagatcttctggtatattataataatgtatctattgacattaaccaacgttttcaactcttaaacgtgtgaaaagagttttagtttcaagttcgggagccaaattgtctgtcagatgcatgtgtgccaattcctgtctcagccaattatatatgaacaactcatttaaaatggcacatatgcatttgacaaatctttcattaattcagctacttttactttttgttttattatatgatatttcttttgaatactaattcattattaaaggtcaaattttttcatcaatattaactcatatatgaatgtaatcaaattgcatgatatataattatatatatatatataggttaattagtaattttttttcctaaattttgacatgtactaaatcgtgccccctgaacttttttttgaccgttagaaattcctcccgaactattgaaattgttaaatttaaaggacttttgtctaatttcattcaattttactgtttcagtgatatgtatcaaaccatgcccctcaaactttgatatgtactaaatgatgtcccttacactttcatccttgttagaatttttttactaaaattagataaaagtccttaaatttaacaatctcaatagttcggggaaatttttaacggtcaaaaaagtttaggagcacgatttagtacatgtcaaaatttagggagaaaattactaattagccttatatgtatatatatgtatattacttgagaagttattaaatattga

SEQ ID NO: 266567 - DNA, 3550 bp, Cannabis indica
gtgacaagtcaccatcatcaagcaacccaatctgaaccaaattattattattttgcaacagatactcatgagcttttatctgcctgttcaaatcaacaagcctttgaagagccatagcatgcattacataaatcagaggactataatcttcagcaccaggcacaaagatgttcgaaatagcttgaatgacagtaagaagaggagctgaaggttgtagaaagcaagaaaatacacatcactcatccagtcagtcctattcatccaatctccaccagagagtgccataaatgaatcccccattgctgctgacatctttctcgaggaatctggcggcataaagctggcagcttgcctatataaaattctacaggacatgaacaactgaaagaagaatacaaagatccaatgagttgaatatttaatactctgcaaatcagtgttgtttccagccaggtcaaagtcaacagatattcccgtgacagaagagaggaacttgttggcagcatctggctgtagtccaactagattactcatgtacggacacaatacaattatcaagtcctttacagacgctccaactagcttgctattacccgttgtgacaggcagtgagtttagcactaatgcatacacttcagacaatcctctacccaaaagttcagctcgcaattcaaagctattttgagaatctggtttgacagatttctttttacgaacaaccaaatcatcagtctttatccatttcaaagattctgatatatctttaatcaaatgttgaagacacgcactagcctgtccttctggcatggttttaagagctctatgaatggcatatttaaactcatgcgagcataataacattccaactgactttgcgtgaccttcattatgttgaggggtcaagaatctagtataattcacttcttcatccccatcatgtaaagctaaaagccttattgctttagacattgtgaaaatagcattattcacctgcattaggatcattatgtcagagctcgaatcccagtctaacgaaaacaaaaaacaaaataataagaaacaagatttagctggcaggatattgataaggtttttgaaaattcctaatgcccaaaagagactaaatgctcttgttttgatgggtaatgccagggattcacacatgagttacatacaataaagtacgtaattttaacaacacaatttaaaatgatgtggtctcacttgacaatagtaatgcctaagattaattacacatcaatgtgcaacttttgtgtgtcctagcattactctattttgatagatgtagttaaaattctatatctataagtacataaatatatgtgtatgtgtgttttgtctcatgtatctatactttagcaaaaacttagaacacacagggaagaaagaaaacaaaaaacaaggatctttaaccaacctgacgaagttgactatagagattaatcaattgacacccaaggtgtgatgtcttatgaaataatggaaactgatcagccacattggtcaaagaaaacccaagtaccaagtatgaaaacatcataagccataagcctaccagatcatcccccataacacattatactcaatttccaaaatataaccaacagcaacaagtacctcctcggctaataaagccagcatttccccctcctttctgttatcaacatcaaacttataagatttgattaaattagatgacagtaatgttactgtatcataaacattcttcaagaaattaaggcaagctccctctgaagcatcctctgttctcaagtacaccttttcgtgcataaagctagcaagtaaactatttatagatttaagtgtacaaagggcatccgaaaacacagattcccctccttgttttgattgatggtggccattaatctcaagcaaaagaggttccataacacttacaaaaaagttaagaagggactttcgttttcctgcagttatataagttgagcagttactctgttctaaaactgtgctactttgagaaaatgctgtagccgtatcacccaacatattaccttctagttgtgttgaacactcggttttctctgccatcgtggtattttcagagatcactaaagctcctttaggatttttaattcgatcaacaagcaagcgaaataaccttcctatgctacttgttgccaattccttctttgtagccataacctcttccaatttagtaaacaagtgtctatggtaactcataatgactgttttagtgtcagttttagcctcactatggtctgcagcatacttttctgaaccacgtaagcacaaaaacccgtcaatatgcacaggatgaaacaacccatgagacaaaatatcttcaactaacttcaacaaatttcttttccaatcaagacaacattcatccatttcactatgcaagataccgagaagatgcaatagaggttcaagaagtttgtcaataaaatcagaaaaggcattttttttacaagggtgtgccctcaaaaacttggcaaacggttcaaatatcaagcacgagaaccgcaatacataaacacccgcatctccagtaaccagattctcagcgaaaatcttgtgaacaagctcaagcactgtaacaacagtcgaaagccacagttctaaattttcatttgacaaaccaccatggcttgagaacaataacaagacacaatcaagcacatctttatgcaactcaaacccttcaccaacaaaatatgatcctatcaaagatgaagatacattgttgattaaagacaatgtatcatttgcaaagaaagaaaacgaccgtaaaaggtttctcgaaaaattcaaaggaatatgcaatttcaatgattgctccaagcagaatttaaaaactttccaacatctaaagtccaaacatgtctcaacttgaccatgaggcttctccttctcttcatcattcttaattctcttccctgaaggaatcaacaaagactgaacccaatcattaagaaatattacaacacgtgaaatcttcacagtctcacaatccttcccatcatcatttccttctttcattttcgaaccaacaaaatcgaaagcaagttccaccttcctacattcaaatttcctaaactatcagtaaagatacaaaatttaatacttaaaaataacccaaaaaattcaattattacttcttatcactatcaacactgacttacgtcaaaatgaatcaactcctaagttaacaagacagacattgtttaaacacaatgaactgaattcatcttaaaacacaaaaataattaaaaataaaaaaggtaaaaaaaaaaagctaacttttgaatgtcgatggatttgttctggattgatagaatcaactgcaagttattccatggaatcgggggctgtacggattccgcttcttcagtttcttctaagaagttaatttgatgtcttttgagatagtgttgatcttcaacttcatcttcatgtttgcggcggagtatagcctttctctttctggtggtggaagcttttgaatcggcggccatggctagtc

SEQ ID NO: 266568 - DNA, 3306 bp, Cannabis indica
ataaacttttataaatagaaaaaaatcttccactatttgtgtaacgttatccgttgttattttaacatgcatcgatttttctctcaaaaaagattatttttttgttaagcatcaaataaacaaaaaacacgattcaaatcaactaaacaaaattgtgttgaagaaaaaccaaacactaaattcaaaactcaaaataaattattttactataagtgaacggatttggggcgcgacggtgactaagagctgaacagtggcggcaaagtataaattcttgttatgctattaatttttcaaagattagtttttctttcatctaaaagatattatgtgtgatttaatccaatactttacatttatttgtgtgatttaattttggatgttgaaatattcagatgatgttaataagaagtttattgtgttcataataatgttcttgagcaatatattataaaaataaatattaataaagaagctaaataattcggtgtttcttgttcaaacaaaacaacaactttattaaatgaggtgtcaacttctcataggctgttaaagacccgaccgatggagtctttctgagagatcctatagaacaagcctccacatatatatatatatatataatgtatatatatatatataaactatagcttatatatagctaggctatatatagcaatataactttatagtatactcacgtaaattattatcaaatccatgcacaagaatactacgtacgtagtaccatgcatgactcacacgtacgtatatatatctcacacaaaaccaaatccactcattatagatataaatatatatatatatatattatgatcagagtgaccatttggctggctggaattctgcatagacaacttgaatctgttcaacgagagtatttgaatatgaacccctaaatcccataacaaaacttcccggagatgagatatccaaacggtgttccgatcctccactcccaccaaccataactgatctatcatcatcaagatagatccccaatcgatcaacttcaacaccacatctaacacaaattttcttgatgaaatgataatcaccaaacacaagcttcttactcaaccgtcccgattcgtctctaccgtaaacttccgtgcgtcttcccgccgcactcgacgacgatgactcgaaatcgactacgatactcgtgacgcggtcttgagaagcagtgcatcgcattcgaatgccggtaattctcgttttattccggatgtactcgtcgtaccccgtgaataaatcgaacgtggtgcttttctgttcggtggaagagtattccccgttacaagatccgtactcttctgagtaacggatcttgtattggatgtacggcgtaccgttgaaaagagatgggagagttggtacgacgacatccacagttggattggtatgaaaaccgaaaaatgttttttgtagcgtcgccaaatcctgtttcgcttgaatagcgacgtcatttagcttagaatcgtcgttgtatccgccgtaaaaatcgtagatggattgtatttcttcgatttgatcaataagatgacataccttattgaattttcctaccaagccaagatctcgaaaccccatacccactaatttattcctgtttgaagcgacaggattgaaactgttggggatccccacaacgtgttcatatcctgtcgtttcaaatgcaagaattttaggcgcggtaagtttcatgcttggaaacttacgcgcaaactcaaccatctcttcaaatttgggtagctcgaagttttcttcgagccccaaaaccatttggttgaatgaaaccttcgtttgagaactctcaacgactcgatccactttcagttgtaaatcgaactggactgtcgcgaatttgaatattccattagctcttagctccaactccaacttgatcctgtcgctttcggtttcggtgtgaaatgttaagacaccaatgtattctcctccagtggtgatggatgaaacatatgcgtcgccataatggaaaaagaaatctgcagtatcgcttactgggacaacggtatcatcagacgctaattcagcgcttgtctgaacctcttttccttccacttttcgagcatggacaacgattgacatcgtcatctctgtggtattcaacttcatcaagaaatcgagcttctcctgacccgatcctaagattttgatcttcccatcgagcgattgcttgacttggatcgttgtcatcactgatttatggcccctgcaaagcgtgtaagtaacctcgctttgcacgccttcggttttgctttctcctgtcaccgccgtggagagacagctcctggcggtgctcgaatagccttggaatagtttcactggcgtcgtcattgttattaattaaaagaattattagtgtaagacaagaattaaaaagacaagatgtgtatgaactatatatgttttgtgtaataattgatttttaatgaagaacttaatattggatgttatctatttatatagaagcctaaaaaagatacaaaatttttaatttgatgctaatctacgtacttgagagtacatacattagtccctttacgtacttattgttttttttgaacaagttcctttagttactttaaaatattctataaagttaagagcaatactattagatattttatagtgactagtactataccgatgcagcactttaagaatttagcagtttcttatattatttattaaaaaagaaaaggtaaacaccattgtagaccctgtgttttgcaaaagatactgattggactctctgttttgttaaatgacaaaatagatcctgtatttttcaaaatggtaaaaataagaccctgaactttttttttgtcaaaataaaatttaataattatccgatctaaaggtgttatgacaaaactatttatattttctgtatttgtttgtattttcaagttggttatattaaaaaaaaaaagttgtcaaaaattaagctcagagtactatttgtactattttggaaaatacagggtccattttgtcatttaacaaaacagagggtctaattggtaacttttgcaaaacataaggtccaaaatggtaattaccctaaaaaaaatcatataattaactaaaaatttgaaaaaaaaaatttaatgaaaatatacatattaacacggagaaatttttatttttataatttgatttttttttatttacaaaaatacatcttcagtaaaaataataaactgtattttttaattgttttataatttatttatagttgtcatgagattgtttttt

SEQ ID NO: 266569 - DNA, 3191 bp, Cannabis indica
ggcaatgagtggagtagcccatgttcttatatatggctcaattttctaccatttattctatgtgggacaatgtccacaacactccctgcagctaattctatcacctttcatgaaatttgggcaataatcaaatgaactaatcaaaacatgaacaaccttcattatcaatagtttgttacaggataacatcatcatatttatgctccaactgggaaaccaacacagaaaatcaaaagacaaacaaacctgataatttaagtgatgcgggactttccatgctctagatggcaaggaatcatttagaagaccggtaactgccaatggcccaacgcggtcggtacttggagtcacttccacaagccagttcaaacaactttggacagacatccacttgcatgattctgcattggattttcagtatttacaaaaacagcatatgatactcaaagaggaaaatagcataaaaaagctcagttaaaagttgttcaaaagaagaaaaaaagagtagaaagatgacaaaataacattgttagcaacttaaggaataatactgagattataagcttccagtcatagagcctactcaaccattttatggaaggcattatccagtaccatctgtatttttcagtaatataaaataaatttaccaatttcaaatacactctcaatttattttaatttatcccattaaatcttttcagttatcatgaatgagataggaacagtttgactttaaattactttttatttacaactttgatcaataaatttataaattttaatacatattcttaaacttttaaggccttttttttggtggcaaaggcttgtttttgttagaatccatttgttctttctcttttaaggaataattacttggcaacttttttctttttctgttgtttttttatttttaacaaaactttgaccaaaaaaaaaaacattacagtacttttgttttctaaaacaaattgaaaatatatatatattgcaataaatttatcaattttttactcctaaaattaaaaatgaaaaactaatatttttactaatcacaattaattatatataattttttaatttttacaattgttccagtaattattttagtacgtggatttaaattgtgattaatttattattttctaaattttcgtaataaagtgaatcagacaattttttcttaataaaaaattgcatgaaatcctactcaattatcgtgccaaataataataaaataataataactagaatttaaatttaaaattattgcaaaaaagaatttaaatttagttaaattaaaaataataataataataataataacctttcaaatgttcaccgccagctacgaaatttccatcgacgaacagagtctgaacaatcggcggcggtccaaactcagcttcctccacatacttccgaaccctcaaatctcccaattcagctacgccaatcaccaattgatccttaatctatcgattcaacaaccaaaattcattaataaaaaagtaaaaaacctagaacaatgtaagtaactccattattcttaccctattgatcgccaaatcaacatcgaaattcctcaattcgatcttctcagagtacgattctgcacccttgacctctacggaagaagactcatttcctccatttacaaggttcaatggcgtcgatgggaagtcccagagatcagaatcgacgtaggagtcgtactcttcgtcgccgaacttggagggacgggtctgcttcacgaggaggaattcggattggttgagagggttgttgatgatcagagcgagcttgtagataatggcggccatagctaatcggagaagattgggggaagaatttgaaaactacaaacggtacgaaacgacagtaagtgatggaactgtctaagacaaaacgacttgtcgtttttgttaagtgggagtgaaatgaacggttgaggagcccttcttaataataatattaatataccataattacctaacctaacggtcctaacctattttaatcacaagttaggttggaaagttggaatttaaggaagtaggaagtagattgggtggtaattacaagtttaatagccaattagaatcattgtaaattatataggtcggattttttgatacagcataaaatcggcacgagcacgatttggcatggaatttggacacaataaacacaacatgacaagaaagataaaaacttaagcacgatacatatatagaataaaactaacttaaaaacacgtttaaaaaactcgatatttgataattgttggtagaaattttcagctctgctcaaagtgtacacgacagttaaacaatcacaacgtttcatgatagaataatctctgtataaatcgttttgcactgaatgatagatatcgctctcaacaaattgttctgagaaattcgatagaaattttgaagagaagaaatttttgtgtgttgaaaagatgtcatcttctattgttttgatatgatttatatagagaagtcaattcaaaataaaacggtaagaaaacgattatgtgattgtgcaagatattggttcatggaagaaaaaagtaaattattgactaactgcttttactgttcattcaacgttataaaaaaaattaattaattaatataaaatatttattttattaaatatttttttctgtaaaaaataaaataacacttacatggaatattatttaatttttttagaatatttttaattgagaattaaaattttaaaaataaatattatttaaattttgacataatatcttgaccacaaatctagaacccttacatggacccaaatttagaccacgattcggatttgtagtcgacataaataaaatcaattaaaaataaaaattaaatttataaaatatatttttattttctatttttataattaaaaaaaaacagttatatatataatacatttttatttttaaaataaaaattttaattttaattttataattaaaaaattttaaaataaaatattaagaagacctaacatattaataagagtaaaaagtgcattgaatttgaccaaatcaaatcaatatatatagggacacgattttgtctcgtgatgtactttcacggaatgtattccgtgatgtacgacaactattagatgggagagttatttgatctgagggctggggttgatct

SEQ ID NO: 266570 - DNA, 2012 bp, Cannabis indica
ccccacattaatatacttgggtccgtcccttaggacaaggatgtgggtggctgaggttctggttgagaacaaggagagtctgtaacattttattgggaagcataagcatgaaaaaatgtaaagaaatcaggtgaaacagaaccatttaacacaaatggaaatatttgctcatgaaaaatgacatccctagaacaaaacattctatttgtattgagatcaaggagtttaaaggctttcatcccaatgggataacccatgaaaacacaaagagtggctctatgagaaaatttagttcttgcagcccctaaagtagaggcatatgcaagacagccaaaagatcttaactgttcataactagggactttggatttgagtatcttaaagggtgatttgtgttcaaggttaggggtaagagttctatttataagatatgatgtagtacttgtgcaatctccccaatgtgacagtgggatatgagactgaaaaagcaaagctctagcaacatttaacaaatgttgatgcttcctttccacaataaagttttgttgtggcctttgtacacatgaatgatagtgaataatgcttaaagaagaaaacaatgtagggaattgaagttccttagcattatcagacctaattcctttaacttgtacattatattgtgttttaactagatgtaaaaaagttgggatggctatttgtgcatcagatttgtttttaatgagatggatctatatttagagcaatcatcaacaatggtaatgaaatacctaaaaccttcaacagtttgaatatgttaaggtccccaaatatcaatgtgaagtaaatcaaaatattatttagaaatattatgattgctaacaaaagacaactttctttgcttggcaaaatgacatatggagcaataaaaatcagaacaatgggaatactgaaattgcaaagcttaattcattgaatggttctttacacaagaagcatgaccaagcatataatgccataagatttcattactgatttttcaattagagatagaacatgctatagggtttttctgttcaaacaagtagtaaaggttgctaattctttcacccatcccaatcagttaattcttggtgatatcctgaatcatacatatagtaggaaggaagaaaaaagaataattagccgaatcaaataaagcataaacatatatcaaattatgtttgaaatcagggacacaaagtacattgattagaataatgttggaaattttaacattgccaacaaaagagactttagtattagctccatttggtaaaccaacagaaatgatcttagcattattttgaatagagaaaaataaagaaggattggagcacacatggtgtgtagcaccagtgtcaatgatccaactagatttagggacaaaagaagcaataccatatatgtttgacacaacaggttgctctggatgttgaggctgaactgtagtttcttgtattttctatgctagcattgccatgagcttttgacattgtgcagctaagtcatgctcctctattgtactttcatttgtgtcattccctgttatgtaattagcaaacaatcgaccttgctagttccatggtttattgggtgttctcttggaaatttgccatacaattgatgtccaaggggtatccatgaattatgtaacacttaccaatggtatgtccaggtatgccacaatgagaatacacaggatgattatcatttttgttgtcaaaataattgtttccatgatttgcatgtgtattcccagcaaattgctctgtgttatcattagaagactggttattttcagtttgaggtataacaatccctctctgtttttcctcttggattatactggcataagccttgttcgcatttggaagtggatcttggagcaagatctgagatctagcactaaggtacgactcattaagaccaataaggaactcaagaactttgtctttgtcctaatatttgttggatttattttaccaggatct
